United States Patent Application Publication US 2007/0059710 A1 - sequence listing, part 5

SEQ ID NO: 9946 - DNA, 14189 bp, Homo sapiens
taaacaggccccccctgaaattgtgcaacacagtgaccctgaagggcaggtgtcttgggaaagcagatgggatcaaaagggcagaaaatcagatagatgaaaaggacatcaagaatatcagaattagcygggcgtggtggtaggcacctgtaatcccagctactcaggaggctgaggcaggagaattgcttgaacccaggaggcagaggttgcagtgagctgagattgtgccactgcactccagcctgggcaacagagcaagactccatctcaaaaaaaaaaaaaaaaaaaaacacacacacacacacaaaaacaaagaatattagagttcttttaggggaggaagcatgcactgaaagatcagtcacctcaggaaaggcaaggggtctcataaagaccacaggcctgacaaggttagaggattggaaggtcaatgggccatggggaagttcacacaaggatctggggttacmaggaaaacaagaaaatgaaagtggccaggcagtaagttggtcacaacctctcacctgggggctgctgacaggcccggagaatcctgggggagctggagggggcagaccaggggaccccatggaagaactgatgactggaaagggagagcccagtgggggtggtggcatcgggggtgggggtggggccccagagcctccaagggatggagctgttgaagggggtaggggtggcccaggaggagaagggggagggactccctggggaaggggatttggggaggagctgtctgggcttcgggagtctgagggaggggtatgtacaggcacacagacacacaagagacagaagagacaaaaaaagaaaatgagtcttcaaacatccaactagagactttaattctctaataccccaccgtgccggacccagcccactccacccatccccaagttcagagrcaccctgctgtcaaacaacagtgtaactccggctggtccgatggtagtgggttatcaraacttattaacatttgtgtcactaaaattggtatacaacctcccactgctatatttgactggctaaaaaaacccaaaaacagcgtaactcctcattgtggtgagaggagggagttgacaaggagaggaggatagttcaggtgaggaaaattttccaaccaatccatttgaaygaataccaggtcatcccaaagccacacctgtctcgtgggtggggcagcacgtggggtagaccatcgagcccctctattcccagcgtaaagccaggtagccagagcgtgcaagggaaagagacaggcaggagagacccctcctaagacgcaggatctgcctgtaaacgcccaaagtcctgaggtttaagaggaatcgtgcccttcccaggcccgcgacctccggtgcccaaggcctcaagcggtcacagctaggagggcggaagytccccttccccgccccgccccgggggggagggtgctaaggccctcgggagggaggggacgcgtgtttacaaacaagggggcgggagcgcaaggaaaagagcaccgggggagggtgtgggggaggggtcgcagataaagcggtcmmtggctcgcctgcccttctgctggggcactcaccccgcccgctgtcgcccatcccgtcccgtccagcctcccctggctccggctccggggtttgttgttctccgcctgccaccgccgccgccgccgccgctgcgggatccagccagggccgtcgccgccgccaccgggacgcgaccccacaatgcatttcttttcgcacccccaccggcccacactgccctgcggcatgccgctgagggaggaagggcgggcgagcggcccaagacatgatccctggctgagagtagggataccgaagaggtcccagggattcccaaggattgatcggaggattagctgagcacgaggaagcccctgagagaaagactctggcctggattgggtcgaattaagcccgtcgctctgctcagtaccaaaatgacagcgccaatgtggcagccatctttgtacagacgggaagtctcggcgcgagttcccgccccctcgtctagttggaaaccgaggaggcggtctcctccggcctgttagcccgcctcgcccaccctcccctcaaatcacctccacactcgcgcatgcgtgtcagtgcaggatggattcgycgctaccggagtgccgccatattggtaaaggcattagggcgaaggtggaacggaacttcctgttctcgcgggatctaaaggcsggactgccacgtccaagcaaaccgggaaaggagaggatcccggagccggtgagaattctctgttttttctctaccatcctttccaggccttttcctcacctaatgagtcgtagagacgagggcccagagagtctgtaaagtggctggtgaaagattagtgtcccagggccctacatccgggaggtggttcgggataaagagaactagtcttgggaacaatgtaggtgggaacttaagggaatgggagagcggcccatagaggtggacggagggcgcgattggagtaaagcggaccctgtgtaggtatagagttgagtcaagtggagtcactgcctctgtccctctggtcagcgtgatggccagaggcctgggggscccccactgggtggccgtgggactgctgacctgggcgaccttggggcttctggtggctggactcgggggtcatgacgacctgcacgacgatctgcaagaggacttccatggccacagccacaggcactcacatgaagatttccaccatgghcacagccatgcccatggycatggccacactcacgagagcatctggcatggacatacccacgatcacgaccatggacattcacatgagratttacaccatggccatagccatggctactcccatgagagcctctaccacagaggacatggacatgaccatgagcatagccatggaggctatggggagtctggggctccasgcatcaagcaggacctggatgctgtcactctctgggcttatgtgagtctccaggggatgggagagagaagggctggttctggattgttgggaaactccacagtacttgaccttgactctccctcaccaggcactgggggccacagtgctgatctcagcagctccattttttgtcctcttccttatccccgtggagtcgaactctccccggcatcgctctctacttcagatcttgctcagttttgcttccggtgggctcctgggagatgctttcctgcacctcattcctcatgctcttggtaagtaacctctgacttctacctcaaatctaacctatttcgttctttggaggaaaagggttctttctcctttatgatccctgacctttcgatattcccccaaatacacactcattgtgtcagatattccctcatctggttttcccccmttcttccagaacctcattctcaccacactctggagcaacccggacatggacactcscacagtggtgaggaagagacagatggggatgggagttggggtgctggggaaggtccgtctctccctattcctcacctcccgcacttgaggaggaggagtctggaatgcacatctcccttaawgtctcaatgcctccattcccaggccagggccccattctgtctgtgggmctgtgggttctcagtggaattgttgcctttcttgtcgtggagaaatttgtgagacatgtgaaaggaggacatggtcacagtcatggacatggacacgctcacagtcatacacgtggaagtcatggacayggaagacaaggtgagcccaggaacaactttcctgaaagctgacttgcctgcctcagaatctcctcatcttatggccctcaggagggagaggacatrttggaagatctgttctccactctgaccaactcttttcttccctcagagcgttctaccaaggagaagcagagctcagaggaagaagraaaggaaacaagaggggttcagaagaggcgaggagggagcacagtacccaaagatgggccagtgagacctcagaacgctgaagaagaaaaaagaggcttaggtaagggccagagttggtgataaatttgggcaagggacatcatcacaaaycacatggaatatgtgctgtgggtaatggcaggtatctgagaaacactaaaggactgggtgtaaagtggtctctgaggggaggtgtgagaatarctgaccaagactggaacaagtggtgatggaagcctctgatcattttctcttcttgtcctgtacaagacctgcgtgtgtyggggtacctgaatctggctgctgacttggcacacaacttcactgatggtctggccattggggcttcctttcgagggggccggggactagggatcctgaccacaatgactgtcctgctacatgaagtgccccacgaggtcggrgactttgccatcttggtccagtctggctgcagcaaaaagcaggttggtgatgtctgccaaacacagctgcctcaaaccctttatytctcctcactcaccctaaacccaaacagcctcttattagttccaaacaattcatactgtcattgacaagtcctctagaaatgagggggaagaagttctggttactttgtcctttagctcagtatttcttaaactggtctataaaccatctgaatggtttagtggagtcttacacacacacgcctactcaatcagaaagtctgtggaaaggacctctgatctcttaagatttttcagaaattgtctattctagactgctccctcttctctttttattttgatgtttagtttccaaatccatgtcccctatacctataccccaccagccacttctaaaccactgataatctttagctattggtgagtgcytttttctcttttctgcccatcaggcgatgcgtctgcaactactgacagcagtaggggcactggcaggcacagcctgtgcccttctcactgaaggaggagcagtggrcagtgaaattgcaggtggtgcaggtcctggctgggtcctgccatttactgcaggtggctttatctacgtagcaacagtgtctgtgttgcccgagctgctgagggaggcatcaccattgcaatcacttctggaggtgctggggctgctggggggagttatcatgatggtgctgattgcccaccttgagtgaggggtggataaactacccctgccccaaacctctacccctaactccaggtcaggggtgcgtagaggttgggggccctggccagggacatctgccaaaggaaggaactgtagcctgggagaatggttactttggcattagggccttcaagggctggcagtcttacagaggctggagcggtgagaatgagaggccagagggaccatagtgttgggcactgtctgaccatgttgcatttggaaggctaaatggggccatgaagaaggctggaagggacagggggtgatggcagcctacctggtgtcccctaccccacctgttctcggagaaccaagttgctacacaggaagttctccaaggtccagtttcctttctcccaccagttggtggaggcttcagggaagaccagagtcctggacagagagggtaacaggaggagtcggggataaacatcaaacatcaatcgtgtgtcctgatttgggagtgattggggggatggggtgggagagggttarttggtattctcatggcctgattttttttgtttctattccttttatatcactgtgtttgaatcgagggggaggggtggtaaccggaaataaagacctccgatcttccgccccacatgcagtctttgtctttttggggggaatggggccccttgtcttctccacacccggggcccctaagcagcagtgtcgggccacgccccctckgtgggaggtcggcctgcgctggtggccgcagatggcctaaggctggcgggcctttgattggccccggctttgcccttgccacgcccctctgcgctgggattggcttagtgctgggattcccacccacccacagcccgccatggcgtctcagctccagaaccgactccgctccgcactggccttggtcacaggttgagggggttctttccccgggcggtttggggtattggagtgaggtcaggggcgtgcccttggagtgcgcggccgctgtgacctctggccccttacccacattttactttctgccctgtgacctctgatccctgccctctcctccccgtgcccggtccggcgtgttctgtcctacctcaggtgcggggagcggcatcggccgagcggtcagtgtacgcctggccggagagggggccaccgtagctgcctgcgacctggaccgggcagcggcacaggagacggtgcggctgctgggcgggccagggagcaaggaggggccgccccgagggaaccatgctgccttccaggctgacgtgtctgaggccagggccgccaggtgcctgctggaacaagtgcaggtgaacgcyaggccactttccccctctaaagctctratattgcctccactgccccggctttttgtggggggtttttgatgcgtaacctccccctcccataggcctgcttttctcgcccaccatctgtcgttgtgtcctgtgcgggcatcacccaggatgagtttctgctgcacatgtctgaggatgactgggacaaagtcatagctgtcaacctcaaggtggcgatctctgaacctgcgacgtttggcccccttagcctggggagggagttggaggagggctgtcaccccagctgatcttttctcccttgttaccctttcccgccagggcaccttcctagtcactcaggctgcagcacaagccctggtgtccaatggttgtcgtggttccatcatcaacatcagtagcatcgtaggaaaggtcaggttgagttggacgaggtcagccagccaagtggtatagagaggagaacccctccttragactcctgactcattccacatctctgactcacctataggtggggaacgtggggcagacaaactatgcagcatccaaggctggagtgattgggctgacccagaccgcagcccgggagcttggacggttggtcagatgcttgagggtgctggggagcacctggggggtctgagggaggtaccagcattcagccctctccagaatcggcagccactctccttcccacagacrtgggatccgctgtaactctgtcctcccagggttcattgcaacacccatgacacagaaagtgccacagaaagtggtggacaaggtaggaggctgtgggtggagggcagaatcattcagagactcaatctctctgggcttcacagagagagagagagagagagagagagaatactgggcacagttcctggcaaacattaaatattcaatgaatgtatgagaaatgaagacaaaaaarggtcacagactcagtcttcaaaaaaatccataaaagaagctttcacccacatgagtatttccttacagattactgaaatgatcccgatgggacacttgggggaccctgagggtgagcactgaatgtagtggggtccctgggaagggggcctgaatraagagatccccaaagtttggggattttctaggggactggtggttggtgtctgtggagaggtttgtggggagggatgtctttggtgggagattatggctgttttgggtctatgggagtgagcagaattctgccctctccccaccattctcatagatgtggcagatgtggtcgcattcttggcatctgaagatagtggatacatcacagggacctcagtggaagtcactggtatgaggccagcatggggagggagagggcagagaagtagaacccagactatatgagaaagcaagtaaggggagtctggagccactgggaagggcagaggttcccaaggccagggacagaagtgggtaccccctagcccatttgtgtctccacccatgcatctgtccaaatgtttctgcccctcccaggaggtcttttcatgtaactgcctcaaggaccctggactctgctcacccccccaccactctgcctggcctcctgctgatgaggactctaagttcccaggatacaaaaggggtggcagtgtatggttcaggaatgctgaatatgggaagcaggggtgcttgtgaccctaataaattccaagtcctcttccctgccacctccggctcttcttgtgtccaagccctcakacccttccccacctccccctcctttccctttcccgaaggattgttccctttctctgcctggtctcccagggcaacccccgccgccgggtgtgagaggaaagagtatgtgtcactgtgtatgcgtgacactccgggtctttttgragggaggggttcgtgcgtcacccctttccactggttctgcagcaccagtcccctccccccaactccctgggttcttatggtccccaagggtgatttgttcatggccccatcttggtgtccagtctggccttgaaagggggtcttggaacaggtggccctcccccacccctctcctttctctgagtccccccctcccctttctctccaccttacaatagctgcagccggcctggggtcggatgggggggattaggggagggggccaggattaggggaatgaaccagccgatgaaaggggctggagagagcaggagggagggggctgggaagaggaggagaaggggagggggtctgcgctaatcgactctggcgcccacataaggactggccacggactgaaggagaggacagggaagtaggggggaactggggtggggggcgagggcacccactgctgccttgtcccagggacaggccaccccctggcagccgcagcccaagtccgggagcctcagctcgggcggggacaagatgcccatcagggtctctaactgccccccaccccctcgccctgtatccctctcattccctacactcaatggggatcgctctgccccttcctcttctctttcctccccatccccttcgtttactctagagtcctcgaagaggcttctgcccacttcccactccagacattctgcccctgtgtaccccacccacacgcgcacccccccttcccaatgggagctccatcttgtgtatgtccctgtttccgcgtggtgtctcyattccccctttcctcccgtgcgcctccctcccttccccgccccgggccgcggctcctgattgtccaaacgcaattctcgagtctatggctccggccgagagttgagtctggacgtcccgagccgccgcccccaaacctcgagcgggagagcgggtcggagggtctagggagagccaaagcagagggtggagggagtccccagggtggtaaggggaatcccgggcacatcgggacctaggtgtgttctcrggactagaaggctaaagcggcagatcttttgcagccttttcccccgggatcctggaatgggggttacggagaagtgaggggggttgatccccagagtcgccagggtacgcagagtgggggaggtagcccttttcacgagccctctgtcccctcctggggtcccagatattccaggccccggccccccggagctgaggccccgcgtgggggcctctggaagggaaccgaggctaaggttgttggccgcgcgacggtgctgggccgggggcggagaccgtggttccctaagtggcgcagaactcccgggacgcaggatcctcacgcgggacgagcccgtcccgtgggcgggagaaccgcggcgtccacgkcccgtcccacccgcgccgcgaatggtgggtgacgtctccgccggcggggggagcgggtgtagcggaggagcaggcggaagtgacgtagggccccagcgcccgggccatggcggcggcggtggcgggagctgctgtctgagcagcggttgcggaccgagcgaacttggcccaggagcccgggcctagggagaggcgcggcggcggcgggagcgcgaacggctggagctgggtgaggggcagtgccggcgcgggggcgggagcgggggcggagagggkcgcttctggaggggcggggtctacgcgaggggcggcccccctgacgcmctcctccccttccccccacccccagccttcttcgccttctcctcggctgtggagccctggtggggggtctgcgcccggtcaccatgacgacgccggcgaatgcccagaatgccagcaaaacgtgggaactgagtctgtatgagctgcaccggaccccgcaggtgacaggcattctccctttcaggcttaccccctcccccmaamccttatatccacagaccgcatcacacagcttcttttccgtaatttgctctattctgccttgcctggccctacctttgaatcaccttaatctttccaaagcactttcgcatttagctcatttaatcctcaaaacagccctgccagagaggtggaacaagtattattatcttcatttgaaagatcacaaacacaaaaattaccttccctgttcctcattcagtgtcataagtcagtgcayataagactcactttgggagtttattaaaagcagagcttcatgccccccaacattctgattcagtagtgaattgggttctcagaatctgaatttttaacaggcaccctatggggttctaatacaggtagcaccaggactttaaaaaattttgttgaatagtttttcccaaccacagatttgtgccatcttcactcctaggccacttagccacctcagatcctcctattccaaagctcctactcttagttaatggacactaaagtctgtcttttctccatttgctccaagtcatcagtccttctctttctcagaattcttgtctcctatagagaccaacatgggtcttctcactgtatttctcaaaattcttattttatgggctrctgtttctaaaacccctttccctctaacccacaccacctttctactcactgatgccttcaggaagccataatggatggcacagagattgctgtttcccctcggtcactgcattcagaactcatgtgccctatctgcctggacatgctgaagaatacgatgaccaccaaggagtgcctccacagattctgctctgactgcattgtcacagccctacggagcgggtaataggagagacatgtttgagatgagatgaaggggtacaaagttagggccctctcactggtcttggttcagcctaggcttcagtwcccttgactgaccactcagggcttcccttctcctaccccaggaacaaggagtgtcctacctgccgaaagaagctggtgtccaagcgatccctacggccagaccccaactttgatgccctgatctctaagatytatcctagccgggaggaatacgaggcccatcaagaccgagtgcttatccgcctgagccgcctgcacaaccagcaggcattgagctccagcattgaggaggggctacgcatgcaggccatgcacaggtgtgagggtcaggagagaagcagaactgatgggatgggtccgtgggtcagtccttgttgcctgctagcttctaagcctcagcatcctaggagctgaccacakactgatcattagggctggaaatcatgggtgtaaattgcagtttcttagtaaacaactggccctgctcttcttaagaaaaatatagggctgggcacagtgactcacatctgtaatcccagcactttgggaggtgaggatgggaggatcacttgagcccaggagtttgagaccaccttgaataacatagggaaatctcatctctacaacaaattaaacatttagctgggcatggtggcacatgcctgtagtcctaccttcttgggaggctgaggtaataggatcacttgagcctgggaagaaagtggatgttgcagtgaaccatgatcacaccactgcacactgcactccagcctgctgggcgacagaacaaggccctgtcacaaaaaaaaaaaaaggaaaaatgtagtttaccccatgactttctagaagttagaacagtagagcgattttgagaataagccccggattcatactgctggaagttaaatcacctcctaggccagcatctctcagtctttcatgtgtatccagattacctgtagatcttcagatgcaaactgtgattcagtaggtctagagttgggcccgagagtctgcatttcacaagctcacaggggatgtgtatgctgctaccgcactttgagaggtgacagcctatgatcactaacaagttacttaacctctctaagcctcagtttcctcagccataaaatagaggtaatataattacctgtgtcataggattcattgtattaggtaaggggattggtgcaaaacacttagtatactgagtgcttagcacattgtgtttaataaatattaggtatcgtcattaggatttttcttatctcttaattctctgaagtttaaagtctaagccctttatcctggatgccttctaaccttaaccacttgcttctacagggcccagcgtgtgaggcggccgataccagggtcagatcagaccacaacgatgagtgggggggaaggagagcccggggagggagaaggggatggagaagatgtgagctcagactccgcccctgactctgccccaggccctgctcccaagcgaccccgtggagggggcgcaggggggagcagtgtagggacagggggaggcggcactggtggggtgggtgggggtgccggttcggaagactctggtgaccggggagggactctgggagggggaacgctgggccccccaagccctcctggggcccccagccccccagagccaggtggagaaattgagctcgtgttccggccccaccccctgctcgtggagaagggagaatactgccagacgaggtgaggagccctgtctttccccagccactgagaaaccaaagatcacctagakttccatcagaagtgggctttgcccaaacccaaaataccaccccaacccagaatccattttggaaagcccctacctccagtcctcatctgaggcgctctggctctaagcctgtcctccctcccattccaggtatgtgaagacaactgggaatgccacagtggaccacctctccaagtacttggccctgcgcattgccctcgagcggaggcaacagcaggaagcaggggagccaggagggcctggagggggygcctctgacaccggaggacctgatgggtgtggcggggagggtgggggtgccggaggaggtgayggtcctgaggagcctgctttgcccagcctggagggcgtcagtgaaaagcagtacaccatctacatcgcacctggaggcggggcgttcacggtgagagcttctgagggcagtggtagaagaggggagaggagggagggtggtctgggccacatagaaccatgagcctggtctaactcatcagcactcttcccctatacatcctctatctctttctatgtcccctctcctttcccatcatccatgtccttttttgccttatcgcttttattattccttttttctttcctcctcccttggtcaccttttgcctctcattcatttccttttccatcttctccaactttcctctctctttycccctctctcccttttaccccctcctcagacgttgaatggctcgctgaccctggagctggtgaatgagaaattctggaaggtgtcccggccactggagctgtgctatgctcccaccaaggatccaaagtgaccccaccaggggacagccagaggaaggggaccmtggggtatccctgtgtcctggtctatcaccccagcttctttgtcccccagtacccccagcccagccagccaataagaggacacaaatgaggacacgtggcttttatacaaagtatctatatgagattyttytatattgtacagagtggggcaaaacacgcccccatctgctgccttttctattgccctgcaacgtcccatctatacsaggtgttggagaaggtgaagaaccctcccattcacgcccgcctaccaacaacaaacgtgcttttttcctctttgaaacctgcagttctgtgtgtctgtttatcaggggtgtacaagaaaaagaaaggaaaatagattggggagggaggcctagaaataatgtaaaatcagccttggaaatggggagaaaatgt

SEQ ID NO: 9947 - DNA, 202814 bp, Homo sapiens
tgtttgttgtggtgtctatagcaaagtttttctatcaattttcccccatcccatccccaccctggactcatttgagaagacttgagaaatgtcttaatactcacactgctgcatgtagctcttgcttatttactggtctgggaaacaggatgtgtttcctttttttaaaagccaattgacagattacacctaaatactcctccttttgtatcattcagccttttgttttagtttggtaagttttaagaaatttcagcagcaaagttgttattcagtgggcacgatggactccaaatgcctcaagttatgtatacctgtcccagatgtaaacttcattgtcctttgttggatgatattttaaatggatataaaataaattggtctaaagggctgccctccttgttgtgtttttaaattttagttaaaaactgctacagcttatgactttgtactttaagataattgtattgatcttttttcagattccttgtattttttaataaagtaatcttaaataaaactcagataggttaagtgttagaaattttaaacagcttacattgttagcgtaaagttatcttttcttttttcctaatcagagttcttgaccctttggttattgagtttaaaacttcaattgaaattcaatagtatttatttttkaaaaaaatcactaaactgtgcctaaagaacataactgccatattaatgttttggtttatatcctctatagtaatagaaaaacatttaatacttgtaatgctgaygtgttaatttgataccagttgagtagaatgtgatcaatccagtttacaatctatcatgagtattattaactaaaatctatgtgcttttcaataggaatcattcttctcttgctgtaacacttgaccttaacttttagaaagtgttcatttttaaactgcaactggaaaggttgaaaagttaggactcttgtatttgtgaactgtaatctgaagcagattatttaaagtgtagaaaaagaaacaagttcttcttttttgcaaaggtctgtgataccatatttcagctttgtgtaagtaatttgaatatccaaagggttgtgatgatcagttctgaatatgcaactgtccacttaataaggacaagtattccagtatctcttatgactgtagtcataaatgatgttggaatgtacattttgtgaaatagttggtatccctttactatgattaatttttgttattccaggaaatacttgtgaagccagccaattaataaagcactttagcatctgttcaggtagttttgaaaaccmacttttccccttcaggataagaacttccaggttacctaaaaatgcaataaaaatctttatagtctaagcttcttggcatataatttttcatcarggttttcttttattaattgagcacaatactgttttgatttaatttttttccctcaaaccacccagctccttacatagtttttaattatatagctatmtgaaagaggtggctaagacatttgctgcacacacttgaactaatgttgggtcagtagcttcgtgttactgccctgatcccagtgtaattcaggtggaaaggtatttttatctcacagggatatgtagctatgtattttactaattgtgaaacactggaaattaatgatgcagacaacttggtgtggtctttgaacagctctctgcagtatttttttttttcctgttaccataaattgtatttaagtgcttgctttccacttaagttgtactaatagaaccggtaactcccagccctccctgtttgacactccttagcttagattgatgtagttgtttttgttatccctataatgtgacttttatttttaagtcattgtgtactgcatttgtttgtcactagttgggcacgtgccaataatattctctccattccttatctgccatctctgttttgcctgatttctcttcaactgaataatggctttttgcatggaaaaaatagtttttactattagacgtgtaaagggaagagagagctaatgtattggactttgtgagcctacaaggaatattttggatccctccaataaataagggctatgtactatatgtactatatagagttatcatgtggtggaagatacttgcaagtcatagatttatgggcaggaggatttgttactscctatatctaggctgaatgtaaaatcccttatgttgtatcaatgggggtaaaaactatttttatttgcctatgatatacttggtttctaataaagtgccctaggctctagtgagaactgkctactttgaattgccatttactccctttcctcctttggccgatatgctcttggctagctttttataagttaatgtgtttccccaaaaagtttcactactttatattcatttgagtgtgatcctaaaacacctggatcaacagtacatctcatatgcaatctgcatcagctcctattctgtctggatgtctagaactgttggaagattttgacgtcttaagccctaggttttgctttgggaaataaggtttgaaatattgttcattgcattaagatttgtgtgtgtgtgctttgtaagcccagaaccaggttttggaaaatgcctgtactgtgaaagcaaattaggactctttctgagcctctttcattgtcagaaatagaatcactttccatcagcttccaggaaattgtgtrtctggagtcgaagagatttracatcaagaatccagatttttaaatgtaattgttttttaaatgctaatgtttgtaaagcaccttcagttcttcggatgaaaggtgctatattccctcagtgtaaattaataaaaagrttacaggaagtttgtcaaaaaattcaatgcatagtctgtagtatgtcctgacaagaagttagcattttatataagaaattaaaaaatgcttattcctccacttggttgcttgactggtgaacaaaagtgaaacctttttttttttgttttgcatttgactctgagctaagtgttccaactctttaaaggcaatgtttattgttacaacctcgatccagtgcccagaactatgcttcrtgagatcatcacaactctttaaattgtatatttacagtgtgtagtgatgctgacgaaatacacggtagtaaaccaaaaagaaacatttggaaagtcccctagcatgatgccagacacactagatgcttggggaaggttggttctgcattcccctcctgttttctatttccgtatcaatttattggtgaatttgtgccctcatgagagtaggcttatgctggcttagatcattcaaatgttttcttaattcaaaaatgcatgacatttatagatttgtgttgtcaacaaaaatactacrtaagtatattccactcaatccctaggcacccactatgctcagcagcactgtgcttttgtatataaatggtgggttataaaagactgcatggaggcattatggaatagcacmggctttgggatcagatctgggtgaaaaccccagctctgtcatgcagtaatagcaactaacctgtatacagcatatgtgctaaattgttatgttctctattttgtgatgcccttgctgtatgggtctatgactatattaccttttattttttttttttcttggtagagatggggtctccctatgttgcccrggctagtcttgaactcccggctgaagagatcctcctatctcggccttccaaagcactgggattacaagcataagctactgtgcccagcccaaacttcaaaaaaattaataaatcttgttcatccttctctagaacttttctccccctagatgaggaaataggcttagagaggataggtgacttgtctaacgttgcacargagagctggaacttgaatccctagagggcacaccagagtatttctttagcgctctattttaagcaatattggttattgtagttgtgtgaccctgaacagattgaattttctgaatcttaagtttctgtgtctaaaataagagaatatcaggcagggttaatctcactattaaaaatagcacacacaaagcacccagtatctggtccaaagctgccttttattaagggctcatactcataggccatttgttcaaattcattgtagttgggaagaataatccaaggcaatgtataattgctaacatagtgtagattttgtaagtacaacacatctggacaaggaaatgtttgatgtaggatggagtaattggggaagataaagaggaagtgtgaattaagtgtggactggaatgatgggatttgtatgtcttacagagttaaaataagcagagatcacttggacacaatgtgaagactcgaggatcctttttgggaaggcgtaagaaatgaataggtcctgttttattgacaatatctgccatatatcagtgaggattggtcaattatggaagatgctaaaaagcaggcmatggatttttaataaggaatataataaatgtatttcaagattacttccctagtgagttgatgatcccccttcgtctgacacaaattattctcgagttctttcctctctctggcttgataatatgggtggaaactgttagttgagattgaggtgatttgtggttctgtgactttaggattacgtgaaatactaatttgggggaccaacagagatttgacattttttcaaagcaatttttcaattcctactacaatttaccgtcagtattacttcataaatggaaagtcattttaccattaaagatgtaggtaggaccatctcagaagaaaagacaactctttacaccaaatacatttggttttgtgaaaaactagtatcctaatttttgccgcttatggagatcaatgagagattttccccaccccaatgttgacatgtactactcgacgctgtcatattattgaggcataaaagatgttctaataaaatggaagtgacttaagagaaagttttatgcctcctcccaactctgaacagatgctgagaatataccaaacaagttcacacaggagtagagatttagagaggccttcccaccttcaagaattttataatacgttaatgagctgagtcttattttcaaggatggctttgttaaagcagaagaagggtaactatgcttatgaaaggcagttttgcatgcctgtttgtcaaaaaatacagtacaatttattttaaaattgattaattggtgtagaacttgcaatggtcacacaatcaggatggtcagcttccattcagggatcaaatttgtccaggcctttcaaaatggaacacgttgcttttagtatggcattggttctgtttgtagtgctgatttttctttcatggtaattaaaaaaaaatcttactttcttaaaagcctgcacccaagctagtgagcttttctgcagaggattgagcatccaarccatgctttattttggtggattcttagagttttctggctgggtcctttttgaggggtagctgtgagctgtgagacaatttcagcaagatgtagggacaaggatcgcattcgaggtggcttaaaaggaaacacgtttgtgagagttgcctcactgtctcacctgctagargaaattgggagatttcagggcttgttttcggtcctggcgtggtgcagaggtggaggggcgccagcaggtgtgtggtatgcaggacgcagagccaggagaacctggggcaggtgtctggagccgggggtgcagttcctacttttagacgcatggtggcgctagggtctcctccggccctgctagcaatctctaaggcacctccgccgccacctgcagtctcaaccaaacctctgggtgggcagcgcgggatgtgacgggccgagcgtccaatcgactgacagatttccgtccacactactgctctagccaatgggagccgaggagaggcgcggaggaggcgggccccgcggcaagcctggcagaggcgcgaggccctcctcccgcctctccgcctactccagcctccgccgcctcagcttcccgagcgagccctgcggccgccggagcagctcccgcggcggagcaggagccggatggtcagaggagcccggcagccccagcagccgcggagtcgcctggcccccaggtgcgggggctgggtggaggccggggttggggatggggtgggggccagggagcgggcccagggscrgcggctcggggcggtggagcattcggggcgcagagaccggaggggcggggggtgcaggctggggggaccttgggggcgcctgcaggcggcggcgcgggctgggcgcgatcgcctcctcgaggccaggtgagaggggcgtgtgagggaaggggcgccgaggggtgaggctggcggcgcggggccgggaggggcaaggcgggcgcgcccccggaggggccgtggaatgcgggggtcgccgggcccggagaggcggggcgtggagggggcagtgcacggtcgggaacgggtgggcacaggaaaggggaggctaggggggcttgcgggggtgacgaggcagacaatgagtaggtggaggtgggtgattttggggagctgggctgtgacgagcaggggtcgaggatggggtgagggaccaggaaggtttgagctcagggggaattgggggaacggtgagtcccaggaatgctaggtcttggtaaataggggaaacagggcatgaggcgtttgtaaggtcagatctgggcttggcgagcctgtggtcccagagggtggtctatttagttcttgactggcacggtagcgccgggagatgttttcttgtatgttacttttagttaccgtcttatttgtttggtctgcagactgactggcacagtggagaaaccgcctcgaaaacggagaagcaggtaaggcagtgccttcctattttgcttcatgtttttctttttgcttggctgcacctgtgccgtactgcataattgtatactgtcagtagatgaagtttcttatttatcccccttttaaaagaatataaccacatgcatgatttttcttttgaggacttcaaattactacctstacagtcgattttttttttcttggtatctaagataatgtgggaaatcttgagaaatcctacttttttactttttgatgttgtgtaaggatctcagctatttttttttttaaccttagccataatttcattttctccagcatctctgtttaaaaagctcatcttggctggggtggctcatgccttcaatcccagctctttgggaggctgaggcaggaggatcatttgagcctgggagttcaagaccagtctgggcaacagagcaagactccgtctctacaaaaaattgaaaaactagccggtcccataaatatatacacctactatgtacccacaaaaacaaaaaattaaaaaaacaaaaaccaactagctgagcgggtgttgtggacctgtagtcccagcttctcaagaggctgaggtgggaggattgcttgagcccaggaagtcaaggctgcagtgatgcagtgagcygtgatcatgccactgcactccagtgtggggaacacagcaagaccctgcctcaaaaaataaactaattttattgagcatctactatgtgccaagtactgtgtacgaatgctctatgtgtatcttctcctgtaatccycaaagaaccctaagagaatatgtagtgtcactattttacagaagagggaactgcgacacagagaggccaaatatttacccaaaatcatgcatctagtaaaagataaaaccaggatttgaatccagacagtctgactccagagcttaagctcttaactgttataccataatgctgctaataaatatgcaattgaaagtaggttttcttattgctttatcttttgtcgttggacactgtgtagttaactcgaatggttgaaccttaggaaaatagaagcaaagagtttaagtagtccacaaacaaagtgaattagtccttgagtaatggagatgaagatatatttatcacataaacatttttgactgcattccatgtgagaggtactacatagcaattctgtgtagtcattagatgattcctttttcacagatgttggcattgacctagagaaagtaagctactgtagttatgtgaccagtaggactactttcatagttaatatctggcaagttaatgatgttaatacacagaaaacctcaatagtaaatagacacgaaaygctgatggtggaagtgccaacagagtttccttgtcacactttaggcctgtactgtccaatccagtaaccatatgcagggtgagcactcaaaatgcatctagcatgactgaggaactaaatttttaattttatttaattgtaattaaattaacttgagaaactgctacttgatcasctattggaaaacgttcaagtatgttttgaacaacttgggtatgtgagtctgtatttttcatccgtcattttatgaaatctaagtatatatcaaatatttccaatgagaatttagggtctgaaatgagataagtataaaatacatgctagatttcaagttagtacaaaaattgaataaataaaatttctcagtaactttttatattgatgacatagtgagayaatattttaggtatattggagtaaatacttttttttttttttgagacagggtctggctctgtcatccaggctgtagtgcagtggtgcaatctcagcatactgcaacctccacctcctgggctcaagccacccagccaattcagcctctggagtagctgggactacargcgcctgacacctcacccagctcttttttttttttttttttttgtagagacaaggtttggccatgttgcccaggctggtctcaaactcctgggctcaaatgatccaaccaccttggcctactaaagtgctgtgattacaagtgtgagctgccatgcctggctgtaaataaaattgttactaaaattattttcacttactttttcctgagacaaagtcttactttgttgcccgtactggagtgcagtgatgtgatcttgactcactgcaatctccgcctcctgggttcaagcaattctctttcctcagcctcccgattagctgggattacaggcgcctgccaccatgcccggctaatttttgtatttttagtagagacggggtttcaacatgttggccaggctggtcttgaactcctggcctcaagtgctctgtctgactaggcctcccaaagtgctgggattacaggtgtgagccaccgggcctggccttcacttacttctttttcctttttattttycttctgagacagggcttggctctgttgtcaaggctgaagtgaagtggtgcaatcacagctcactgcagcctcgacctggtaatccttccacctcagcctcccaagtacctgggactacagatgtgcaccaccatgccaggctaactttttattttttgtaagagacagggtctcactgtgttgctcaggctggtctcctgtgctcaagtgatgcgccagccttggcctcccaaagtgctaggattacaggcgtgagccaccatacccagcctttctttttattttttctaatatggctactagaaaattaaaagctgcatacatttaacttgcattgtatttctttgcattgtatttcttttggatagctctcatttaactctcattaccccactgccagactcttcagtagccttctgactggtttccctaccttgaatctgtaattccctccctgtactgtgcaaatcgatcttgtaattctcatgcttaggatccctctgtgcttcctcattgcttattgaacatcattcagacttttagcctaatcatataaaaaaattgcctttattttacttcttcatactttcccagccacggttaatactttggccatatcgattttcaatgatggaactattaaatgtctacttttaaatgatttaactttctggtgaaccttcaagatgaattaattgctgaatgtaactccgtgcwccatttgccattcccagaacttatgttccctctttgctttggttttttgtttttagggtttttgttgtttttgttgttgttgttgttgttttttaaagacggtctcacttcagggtggagtgcaatggtgtgacaatggctcactggagccttgacttctcgggcccaggtgattttcccacctcagcctcccaagtagctgggactacagatgtgcatcactatgcccagctaatttttgcattttttgtagaggtggggttttaccatgttgctcaggctggtcrtgaactcctgggcttaagctrtcygccttcctcagactctcaaagtgtttgaattataggcgtcagccacagtacctggtctgctttgggtttttgtatgtgatttctttttctttctggagtactttctccttgctccttgacaagccccctcctttaagactttgctcagtgagggcttccccccaccctccctctgctccaccttattgggtcccatcatggcctgtacatacacttacatgaaatggtctgggctgaatttgaattcagctctgtcaaatgtagtttgcgagatcatgtgcaagttaataagcctgtctctgcctcagtttcctcatctatatagtagaaataatagttctgctggcgtggtggctcacgcccgtaatcccagcactttgggaggtcaaggtgggcagatcacctgaggtcgggagtttgagaccagcctgaccaacatggagaaaccccatttctattaaaaatacaaaattgggccgggcacgatggctcaatcctgtaatcccagcactttgggaggccaaggcgggcggatcacaaggtcaggagatcgagaccatcctggctaacacagtgaaaccacgtctctactaaaaacaaaaaaaatcagctggacgtggtggcaggtgcctgtagtcccagctactcaggaggctgaggcaggagaatgacgtgaacccgggaggcaaagcttgcagtgagctgagctcataccactgcactccagcctgggcgacagcgagactccgcctcaaaaaaaaaaaattggctgggcgtggtagcgcatgtctgtaatcccagctactcgggaggctgaggcaggagaatcgcttggacccaggaagtggaggttgcagtgagccgagattgcaccattgcactccatcctgggcaacaagagygaaactctgtctccaaaaaaaaaaaaaaaaaaaaaagaaataatagttcgacttccccaaggttgtaaggtgcctaggatagtgcctggcacatagaaggtacacaataaattttaggttaaaaaacacccatcaaatatcttttatttcccacttcttttcaaaatgagaagattaaaaataaaggccaagaagaaatgaaagaagcagataaagccagtggcagaattagtgcatggaccggaaagtcctgcatcattgctaatggttgctttggtgtttggctctgagttttctggagtaaaatgaagaagaaaataaagttcagttttcagattcatggtatctctaaaatcaaacgtgagtttttaaagattgcttcttggccaagcgtggtggctcacatctgtaatcccagcactttgggaggctgaggcgggtggatcacctgaggtcaggagtttgagaccagcctggccaacatgacgaaaccccatctctactaaaaatacaaaaaattagccgggcatggtggcgcgtgcctgtaatcacaggtactcaggaggctgaggccagagaatctcttgaacctgggaggtggaggttgcggtgagctgagattgcaccactgcactccagcctgggcaacagagtgagactccgtcttaaataaataaataaagattgcttcttatacttctcaatccragtgagttattgccagtgaacagtctccacggggccaaagcaatgtggttttggtatatggctctctgatggtttggcttgattcagaggtaaagagggatgcgtacactgtggggactatacgtgttttgttcactgtttatccccagcagctagaatagcatctggcacgtagagaacagtttattgaatttttgagtgaacaaatcctttagtaattctccaggaatttaagtaagcatcaggttgcaatgagtttattttctcagtccagaatcatgaggctacatattcagcatgcctgatttaggttagatcctgatcatgtcagcattttgacctgaatggacaaccagcacatgtatttaaaggtcctatgggcaggaccaagattttcctcagaaaacagtgcaggggttgctctaaaactagaaaacaaaatgtacagttaagaccccaaagatgaattatagaataaggatgtaatggttgtagccagatatttaaaaaaataggtgttaggccgggcgcggtggctcacacctgtcatcccagcactttgggaggccgaggcgggtggatcacaaggtcaggagttcaagaccagcctgaccaagatggtgaaaccccatctctaaaaaatacaaaaattagtcaggcacaatggcgcatgcctgtaatcccagttacttgcgaggctgaggcaggagaatcacttgaacctgggagaaggttgcagtgagccgagatcgctgcactctagcctgggtgacagagcaagacttcgtctcaaraaaaaaaaaaaaaagtggtattagttgccgggcatgctggctcacacctgtaatcccagcactttgggaggcccaggctggcagatcacgaggtcaggagtttgagaccagtctggccaatgtagcgaaaccccgtctctactaaaagtacaaaaattagccgggcgtggtggcaggcagctgtaatcctagctactcaggaggctggggcgggagaatcgcttcaacctgggaggcagaggttgcagtgagctgagaccacgccattgcactccagcctgggcgacaaagcgagactccatctcaaaaaaaaaaaaaaaaaaaaaagaaaggtattagtatcagttttatactgtggctatagaaattctgaatatcaaatgatataaattcctggtaaacacttcaagatgaattaattgaggcagatgaatggtgtgagcccaggagttcaagaccagtctgggcaacatggtgaaacctcatctctaccaaaaatacgaaaattagccaggtgtggtggtacacacctgtagtcccagctagttgggaggctgaggtgggaggatcagctgagactgggaggtggaggctgcagtgagccatgattgcaccactgcactccagcctgggcaacagtgaaaacctgtctcaaaaaaaaaaaaaaaggtaagttaattgttgaatgtagccttgagtaactgattgaacgggtctgctatgtagagttgttgacagttatattacatatgtagtacattttagaaaacagttgacagaattatggttttttttttgttttttttttttttgtttgagatggagttttgcttgttgaccaggctggagtgcaatggtgtgatctcggctcactgcagcctctgcctcctgggttcaagtgatcctcctgcctcagcctcctgagtagctgggattacagacatgcgccaccacacccagctaattttgtatttttagtagagatggggtttctccatgttcgttaggctggtcttgaattcctgacctcmggtgatccgtccgccttggcctcccaaagtgctgggattacaggcatgagccaccatgcccagcccagaattaggattttaaaaatttttatttagttttgagatggagtctcactctgtttcccagaccggagtgcagtcatgctatctcggttcacagcaacctctgcctcctgggttcaagtggttcttgtgcctctgcctcctgaatacctgagattacaggggcgcaccaccatgcccagctaattttttctgtttttagtagaggcggggtttccccatggtggctaggctgatctcgaactcctggcctcaattgatccgcctgccttggcctcccaaagtgctgggattacaggcgtgagccatcgtgcctggcctaaaattatgatttttattttaggatattgatgttaaataattctttttgataggtgttagttagtggctgagttatcttttgagaacatttctagtgcagaccaaactgtaagacagtttaagaaaaacaaagacagtttgagataagaacctcatgcattattatttctttgtatctttttccccttaaaacttttatttccttatcatagttcatctttgcacccttataaggtactaagggggagctcagtaaaactagtgaaccaataaatgaattggtggcaagaggagttagtgtgggatgggtttggttgtccaaaataatgtgatactatttaatgcccctgaaaaactgcaatggactgaaaggagttttaagattaggaaactggccgggcgtggtggctcatgcctgtaatctcagcattttgggaggctgaggcgggcggatcacctaaggctggaagttcaagaccagcctgaccaacatggagaaaccccgtctctactaaaaatacaaaattagcctggcgtggtggcgcatgcctgtaatcccagctactcaggaggctgaggcaggagaatcgctggaaactgggaggcggaggttgcagagagccgagatcgtgccattgcactctagcctgggcaacaagagcgaaactccatctcacacacacacaaaaaagattaggaaacttggtctctatgtgcttttggaaaattctgaagagtccaatatgtctgttaatgatgtttgggttatgagttggagaatcctttctggtcctattaggaacaagatccatttgtttggataggattcacattgatgaaagctttactgtatgatttgggggcttttgttgttgttgttgttgttacatatttaaagcaaagagatccgggcattttgttgttgtatgtaatttgtttaagaaacatttgaatgctttctagttctgggttctagggatatagatatgagtgaggtggccgttgttggggaaaatctcatgtattaatgggaagacagacactgaaatatgagacagtgtaatgactttgtatatatacaaaggtttacacartacatacaaagggtttataggaattctgcatagtggtagtgagggcagtttctgcagtcatttatctaagccctgaaggtttagaaggttaatttgttggtagtgtgactattgaaatgacaagagatgacagcctagatgtagactgactaataatgaggtcttgggtgaactaaattcaggacctgaaccaagatagtgccagaagtggaaagaaagatgtttttaagagcttgggctgtggtgtcagactaaggggtggttctcaactaagggggttttgcctcctaagggacatttgagaatgtctggagacattttgggttgttacaacttggagcacctagtgagtagaggccagatatactgctacacatcctaaaatgcatgggacagcatcctaatctaagagttccccagctcaaaatgtcattagttctgaggctgagaaatcttgcattagagtttgaatcctagcccttccaaatgtcctcaccaatacttggtcttgtgattctttcttttttttttgttttttgaacaggtctgtagaggtacagttggcatacagtgagctgtacatatttgaagtgtacaatttgataagttttgaaatacatgtatacccttaaaaccaccaccattgtttgccattctgtgggtgtacactggtacgtgtcattgtggttttcatttgcctttccctgatgactgataatgttgagtatcttttcatgtgctaatttgccattcatataacttagtgaagtatccaaatcttttgctcactttttgtcagttgtttgtcttcttacatagttgtaagagttctttatgtattctaaaaacaaaatttaaaaaagcaaaatcttttttttttgtttttgagacgaagtctcactttatcacccaggctggagtgcagtggtgtgatctcatttcactgcaccctccgcctcccaggttcaagtgattctcctgcctcagcctctgtaggagctgcgattaaggcgcctgctaccacacccggtgaatttttgtatttttagtagagctggggtttcgccatgttgcctaggctggtctcgaactcctgacctcaagtgatctgcccacagcggcctcccaaagtgctaggattacaggtgtcagccactgtgcctggccacaaattcattattaggtatgtgttttgcttatgttttctcccatgtatggcttgccttttacttttctccacagtatcttgagatgcttgcagcttgaataataggttggatgggaatgcttttatttatttatttatttgtgagatggagtctcactctgttgcccaggctggagtgcagtggtgcgatcttggcttactgcaacctctgcctcccaagttcaagtgattctcctgcctcagcctcctgagtagctgggattacaggcgcgtgccaccatgcctggctaatttgtatttttagtagagatggggtttcaccatgttggtcaggctgctcttgaactcctgtcctcgtgatctgcctgccttggcctcccaaagtgctgggattacaggcatgagccaccgcaccagcctgagaatgcttttaattgagacagcagacacaggagcaagagcaagtttgggacggtaagaacatgagtttattttggctatatggagcgtaaggtgcttcaatgaactgtctttaaccaggcggttaaaaatatgggtgttttgcagagaagcaagataacggcttcaggtatagattttaaagcattcagcaaacacgtggtgatccaagtcatgcaaatgaatggaatggatcattggctcattgatccattggatcacacctgtaatccaatggctggatgcagtggctcacacctgtaatcccagcactttggacggccgaggtgggtgggtcatgaggtcaggagtttgagaccagcctggctaacgtgatgaaaccctttctctactagaaatacaaaaactagccaggcgtggtggtacgtgcctgtaatcccagctactcaggaggctgaggcaggagaattgcttaaacccaggagctggtggttgcagtgagccaagatcgtgccactgcaccctaacctgggtgacagagcatgacgctgtctcaaaaaaaaaaaaaaggaaaaaagaaaagaaaatgaatgggataacctagcgaaagcatgttgagtgaaatgcaaagaaatagaacgtacagtaacacggtgtaaaaatagaccaaactgctttctgtcttttgggtgttatctctttctctgcagtgttaatctgtccactgcagggtatttctgtaggtagccgtcagacaggtagtgtttatctccaggagtttagatctctgtactctttgctgagaaacaggttctgaaggtagtttcttggaaaactagaacatttttctaatctacactgaaacacaggactattctagagttacagagctcatggtaggtttgcctcagcaacatccgtacagcaaatgcagtggttttggtaaagccatttcttgtagcatggtcagtgaaatcctagggcataaagctaaaattcagttctgtgaaagcagactctgcagggccaagatagcatggtcagtgtatgcagcattttcacggtaatattttactcaagaatgaaacctagaagagttaarcagtgattttcaagggcattcaaaaagagctcataggtcctgtgggactcattcaagggcttcctggagggtagagtgccaggagttgccagagggaggttaacaagcctagcctcaggckctactcctatattttatatatgtatatatgtttatttttcttttttttttttttttgagacggatcttgctctgttgcccaggctggagtgcagtggcacaatctcggctcactgcaacctccgcctccsgggttccagcgattctccctcctcagcctcccaagtagctgggattactggtatctcccatcatgcctggctaattttttttgtatttttgtagagatggggtttcaccatgttggccaggctggtgttgaactcctgaccttaggtgatccacccgcctcggcctcccaaagtgtttggattacaggcgtgagccactgcgcccagtgctaataattttttaaaaaaatatctgtttgttagctggatgtggtgttcttgcacctgtagtcccagtcccaggtatttgggaggccgaggtaggagcatcacttgagcccaggagtgagttaatgcccagcctgcacaatatagtgagacctctgtctccaaaaaaaaaaaaaaaaaaaaaaaaaagcggttcaaaccaagatccagataaggttcataacttgtaattagttgagtagctcttgaagtcttttttagtctatagcttttccactcattttttcctgtactatttattttttgaagaaagcatgttcgttattaagagttttccagtcttggccgggcacagtgggtcacacctgtaatcccagtactttgggaggctgaggcgggcagatcatgaggtcaggtctctactaaaagacaaaaaaaaaaaaaattagccgggattggtggtgtgcagctgtagtcctagctacccaggaggctgagtcaggggaatcgctccaacccgggaggtagaggttgcagtgaactgagattgtgccactgcactccagcctggcaacagagccagactccatctcaaagaaaaaaaaaagaggttttcagtctgaatttttaatttttaaaaaagttggtatataatttacatagggtgaaattcacctgttttagttctttgaattttgacgaacctagttgtgtaatcacaactataatcataatatagaacagttccatcactccccaaaattcccttctgtccccccgaccaattggcaaccactgaccagtttttccacagtctgaattttgctgactttatgacctcatggtatcacttagcatgcttctctgttccgtttgtgtcttgtaaattgatagagttaatttgcttttttgttttaagaatgctttggctggacgtggtggctcatgcctgtaatcccagcactttggaaggccgaggcgggcggatcacctgaggtcaggagttcgaaaccagcctggccaacatggcaaaaccccgtctctactaaaaatacaaaaattagctgggcgtggtggtgggcgcctataatcccagctactcgggtggctgaggcaggagaatcgcttgaacccaggaggtggaggttgcagtgagccgagatagcattacggcactccaccctgggcaacagagcaagactccatctcaamaaaaaaaaagaaaagaaaagaaaaactgcagcatagaagtgatgtgaactttcattaaagcttctcttttttatgttaggaacccatagtaatcggtatctagatttatgaattcattagggttgcaaatgttgaaattctaattgttttgcccatgcgtggtggctcacacctgtaatcccagcactttgggaggctgaggctggtggatcacctgaggacaggagttcaagaccagcctggccaacatggtgaaaccccatctctattgaaaatacaaaaatcagccaggtgtggtggcacgtgcctgtaatcccatctacttggtaggctgatgcaggagaatcacttgaacccgggaggtggaggttgcagtgagccaagatcatgccactgcactccagcctgggtgacagagtgaggctctgtctcaaaaaaaaaaaaaaaaaaaaaaaaaaagaaattctaattctttcattccttctttttatttattttttttaagttggagtctgcgtgatctcggctcactgcaacctccgccccctgggttcaagcgattctcctgcctcagccaactgagtagttaggattacaggcgtgcaccaccactcctggctaacttttgtatttttagtagagacggggtttcaccatgttaaccaggctggtctggaactcctgacctcaagtgatcggctcgcctcagcctctcaaagtgctaggattacaggcgtgagtgccactgtgcctgtctcattccctcttcattattagctggaatacttccagaaagagacatttcccttactgactgaaacaattttttgaattttatttatttatatatgagagggagttttgctcttgttgcttaggctggagtgcaatggcgtgatctcggtgcactgaagtctccgcctcctggattcaagcgattctcctgcctcagtctcccgaatagctgggattaaagttgtgcaccaccacacccagcaaatttttatatttttagtaaggatggggtttctccatgttggccaggctggtcgtgaactcctgacctcaggtgatagacctgcctcagactcccaaaatgctgggattacaggcgtgagccactgtgcccggcctgaattcaattatttatttwttttttttgagacggagtttckctctgtcgcccaggctggagtgcagtggcacaatctcggctcactgcaagctctgcctcctgggttcatgctattctcctgcstcagcctcccaagcagctgggrccacaggcacacaccaccacacccggctaattttttgtatttttagtagagacggcatttcactgtgttagccaggatggtctcgatctcctgacctcgtgatccacccgcctcggactcccaaagtgctgggattacaggcgtgagccacagcgcctggccatttttgtatttttaatagagatggggtttcaccatgttggccaggctggtctcgaactcctgacctaaggtgatccacctgcctcagctccacaaagtgctgggattacaagtgtgggccaccgcacccggccaaattacccgtatacattttagagaagggggtcttgctctgttgcccaggctggagggcagtgccacagtcacagcttacagcaccttgaacgcctgggctcaagcagtcctcccacctcaacctcctgagtagctggtgccatgtgccactgtgcccggcaggttttttatttttaaaaattgtttgtattgatgggtgtctcactttgttacccaggctggttgcaaatttctggcctcaagcaatccttctgccccagcctcccaaagttctggaattatagctgtgagccactcactgcacctggcctagaattttttttttttttgagatgcagtctcactctgttggccaggctggagtgcagtggtgtgatctcagctcactgagacttccacctcctgggttcaagcaattcccctgtctcagcctcccgagtagctgggactacaggaacgcaccaccatatctggctaatttttgtatttttaatagagacagagttttgccatgttggccaggctggtctcaaactcctgacctcagttgatccacccacctctgcctcccaaagtgctgggattacaggcgtgtgccacctcgttcggccggaaaaatcttaaatggagcagcttgtttggaactttctttgaaaccaccaatattacttatttgcaaaagatatccataggttagtacattaattgactgtatagcacatatgaatcttacctcatgaaatcaggtaagcaaaaagtattaacaatattttaattcctttaaatgaaatcaaattctgcccttgggggcaggtgtggtggctcgtacctgtaaccccagcactttgggattctgaggtgagagsgtagtttgagctcagactagcctgggcaacataatgagaaccygtctcaaaaaaaaaaaaaaaaattctgccctgggaccttctccccctcaattctaccaaactggttagaaatacaatctcagtgattaataatagagatccacccctccttagagttatgtgagactctaataggcttttgaggtaccaggagaagggtggaaggttgattttcagcctgtgctggatgtgactgagcacattgtctaagaggatatgaggcgttgaagcctggggattctgatgtmcaggcttcagctttgcttggtacaacacatgcccatttctctctgaggacttgggcactgctaggacgtggggttgcaggttccctttttgtggattctgaaggaattccttcttctcagataaattgctcccatttttcttcttatttctacctaacccccagctcccgccaaaggcactcattgttctacccttcttccctcagtataatctcctcaaggagttcatattttcagaaaacatgcacaaacctcccttgaggcaaagaagcaaataggactatcatcttggggattgggaagtaccatgataataaaacatccattgatgtcttaataacttatctggctacttatattttcatcagtaattctagtccctgtagtgggacttaatgatctatccaaaaatgatttgattttcccttctttaaaagatggagctgaattctcctcccttgagtgtgggctggacttagcgatgcacttctagtgaatagaacacaggagaagtgatgagatgtctcttcccagattgggtttttaaaagactggtttctgccttgcatgtgtgttctctctctctctctcwcacacacamasacacacacacccacacccacccacccacctcactttgcgggaggctagctggctagctcagattgggttttaaaaaaactggcttctgccttgcatgtgtgttctgtctctctctctctgacttctgccttgcatgtgtgttctctctctctctcwcacacacacacacacacacacacacacacmcccaactcactttgggggaggctaactccatggtatgaggcagcactgcatagagggaaggcacttgccatgttgtgaagacagccacccaggcagcccatggggagggccatgtggtgaggaagtgaggcctgccagcaaccacaacagctagcttggatgtagatcttctgaggcctgctggcagccacatgactggctcagaaaagtgagcttgaacagggatcctcctactctagttgagccttgaggatgactatagtccaagccaacagcttgactcattgtcctggcttcacaagggctgagttatgtgaatctgtgattttccttggagagtctcctttcttccagcactggcttcattgtacccaaggggctcaatgtccagctaagatttctcttatcctgtataggtttctgatggacaaagagagagaatgtgtgtgtgtgtgtgtgtgtgtgtgtgtgtgtgtgtgtacgtgtacgcacgcatgcatgagagagagaatatgtgtgtgtgttttggaagcagctatcttttttttttttttttttgagacaaagtctttactctgtcgcccaggctggagtgtagtggcgtgatcttggctcactgcaacctccgcctcccaggttcaagtgattctcctgcctgagccccttgagtagctgggattacagtgcctgccaccatgcgtggctgatttttttgtattttttgtagacacagggttttgtcatgttggccaggctgatctcaaactcctgaccttaggtgattcacccaccttggccttaagaagcagatatcttttgattaaagggcagttcagttttatttttctttcttttttttttggagatggagtatcactctgttgcccagactggagtggagtggcacgatcttggctcactgcaacctccacctcttgggttcaagcaattctcctctctcagccacctgagtagctaggattacaggcatgtgccactacacctggctaattttgtatctttagtagagacagggtttcaccatgttggccagcctagtctggatcctgacctcatgatcctcccacctcggccactcaaagtgctgggattacaggcgtgagacaccgcgcctggccttcatttttwaatttaattttattttttttaagacagagtttcgctctgtctctcaggctggagtgcagtggcgccatctcagctcactgcaacttccacctcccggatttaagcgattctcctgcctcagcctcctgagtagctgggactacaggtgtgcgccaccatgcctggttaatttttgtattttttatacagacggtgttttgccatgttgaccaggctggtctggaacccctgacctcaggtgatctgcccaccttggcctcccaaagtgttgggattacaggcgtgagcctcccacacagattgggaggtagtcctctgctcttgtttgccttgttaagggaagggccgtaaggtagttatccagtgaagagtcagttttcttctgcctgctctctctcaccaggctttaaactctttttcaaccccttttcttggctttttgggaagagtgggcaaaatagagccaagtcagttatgatggttcattttatgtgtcaacttgactgggccactgagtgcccagacatttggtcaaacattatcttaggtgtgtctgtgaggatgtttctggatgaaattaatatttgaagtgattgagtaaaacrgatacccttccgagtctgggtgagcctcatccaatcatttgaagacctggctagaacaaaaagactgagcaagagggagcttctcctgcctgactccttgagctgggacatcagtgttttcctgcctttggacttgaaccaaaactttggctcttgagcatggtagctgttgtattggaacttgcgccattgattcccttggttctcaggcctttagacttggactgcaactagaccataggctctcttgggtctctagcttactgactgacaatcttgggacttttcagcctccataattgcatgagccaattccttttaataaatatctttttaaatatatatacctctgtctctgtctctctacctctacctctgtctctctcctgttgattctgtttctctggagagccctgactaatatataagcctagtcttttattgccttacttttgtctcatttcaggtttttcagagtgctcctaatctctgagaacttctgcattactggcttaattctctgcattgacgcagtctgtcatgaaatggctatcttcatgacaaaccaagcaaaaggagaggtgcttgggttttcataaacttggcagctgttttggaaacattttactctaaggctaggcaccactgtttgtattcttattttgcatttggggtttctttctcctaagttctctctccatatattctcctggcctggaaggcatgtgtgcctgtttgacagtgtcctggaaattcttttctagacggggagtgcatgttgaaggtgctcacacgtggtttcctaaaatcctgcaaagtgrcagttaggacttttgtttgtttgtttgtttctttgtttctttgagacggagtctcactctcgcccaggctggagtgcagtggcgtgatctcggctcactgcaacctctgcctctcgggttcaagcgattctcctgcctcagcctcccaagtagctgagattmcaggtgcccgccaccatgcccggctaattttttgtatttttagtagagacggggtttcacgtgttagctaggatgttctcgatctcctgacctcgtgatccacctgcctcggcctcccgaagtgctgggattacaggcgtgagccaccacacccggcctgccagttaggacttttaaactcttaggataatttccaaactatagagtcatcatgtatagattttcagagaacaactgccaaaaataaagattttagatttagaattgttgacataagcctttttttttttgagttggagtctcactctcttggccagtctggagtgtagtggtgcaatctcagcccactgcaacctccatctccccagttcaggcaattctcctgcctcagcctcccgagttgctgggactacaggcacgtgccaccacacctggctgattttttgtagttttattagagacagagttttaccatgtctctcaggctggtcttgaactcctgagcacaggcaatctgcctaccttggcctcccagagtgctaggattgcaagtgtgagccactgagcctgtcgtagcctgtctttctaacaatagataagcaagctgtttttctattgaggtaacacctggctggtgataataaaattgtcatcaagtaaaaggattcttacttttgtataaaataggaatatgcatstatatgtccaaaacagktttttaaaattttactaatttatttatttttgagacagggtctcactccagtcacctgggctgcaatgcggtggtgcgatcttggctcactgcagccttgacttactgggatggagtaatcctcccaccctagcctctgaagtagctgggaccactgtcacataccactacgcccagaaaattttttgtatttttggtagagacagggctttgccatgttgtccaggctggtctygaactcctgggctcaagcaatccacccgcctcggcctcccaaagtgttgggattactggcgtgagccactgcacagtgcacaaccagcttttttttttttttttttttttttttgagawggagtctcactctgttgcccaggctggagtgcagtagcgcaatcttggttcactgcaacctctgcctcctgggttcaagtgattctcctgcctcagcctcctgagtagctaggattacaggagtctgccaccacacctggatactttttgtatttttagtagagatggagtttcaccatcttggccaggctggtcttgaactcctgacctcgtggtccacccgcctcgacctcccaaagtgctgggatcataggcatgagccaccgtgcctggcccacaaccagttttaaatcattaagatataagttaaaaagaagaggaaaatgttttaaataatttataagagaattatagaatctgtattgagagactactcagtccaaccgaaagcatagtaggagaaatcctagtgtamtcacattcctgaaaatgaagtccttaaaaatttcttagtcttagtcttttcacatatagttcacttacatatttaccaatgacatacatgtatttagtgtttcctaagaattttatccaaattgcctgtctcatgtacatgctgttgtatataaatgcccttgtgacaaaatacaaataacatttcgtagaggtgtcagtgaaattgtgatacttctgtcattgattttttcaataactagatgataaaatcacagttgtcatatagatgttcatagcatttttactctttattttttatttatttatttttttgagactgagtcttgctctgttgcccaggctggagtgcagtggcatgatctcccggctcattgcaacctctacctcccaggttcaagcaattctcatgcctcagcctcccaagtggctgggactacaggggtgtgccaccatgcctggctaatttttgtgttcttttagtagagatggggtttcaccatgttggccaggctggtctcaaactcctgacctcaggtgatctacccatcttggcctctcaaagtgctgggattacaggcttgagccaccatgtccagcctggatttttactcttaaaaaaaggttcttatgtttgaaaatgttggaaaccactagattaaattatctctggagccagttctagccatttccaaagtggaaaaggactttggcttaagggtggagcctttgcataaggatgtgttcaaagaggatagtacagcatgctggtgacacccccagagctttggcaggtttctagtcactacttttctttgtctttctttttaaattcctacatgccccagaggtttgattcatcttttttccagcatctcgtatgtcatctattgttctctccacccataaaccctcaactgaaacaggatgcaggtggcttagctttttctttaccttgttcacgctgaaactatttgacactatttcayttttaaggatttttactgctgttaacaacagagaatgaaatgaatgaatacaaatttgcacaatttagaattttattaaaaatgagaatttcttatccttcattgaaatgtaaacaaaaaaatttcagttttttagtagttgctaggataatggcagtagactaagtggtgtcaaaagtttcttccaactctgtatttaatttttagtggcagattactcatgtttccttattttatcactcttttttttctgggaagtccctaaatgtcctctctcctatttttctttttctttttttgagatgaagtcttactctgtcactcaggctggagtgcagtggcatgatcttggcacactgcagcctctacctcctgggttcaagcagtcaagcgatcctcctgccttagcctcctgagtagctggaactacaggcgtatgccaccatgccaggctaattttttatacttatttatttgtttgtttgtttgagatggagtcttgttctgttgtccaggctagagtgcagtggtgcgatctcagttcactgcaacctctgcctcctgggttcaagtgattctcctgcctcagcctcccgagtagctgggattacaggcgcctgccaccatgtctggctaatttttgtatttttagtagagacgggatttctccatgttggccaggctggtctcgaactcctgacctcaggtgattcacccaccttggcctcccaaagtgctgggactgcaggcgtgagccactgcgcctggctcttcctcctgtttttctttatcatttgactctgaggataattacttgtaggccattgaattcatttcatcatggggaggagaaactccaggttattgtctttaatctctttactccttgttttttacaggaaaactctacttaataaaaaccaataaatactattaacaaaaagtcaactttggtatattctggcatacaaccaatgtattggtatgacagattgtatttgccaaatgtgtctacagcagtatcgttcattttacatgttctacctacaatgtcatcttcacactcctcccatctagtggtgaagcctgtgtctcagtctcttaaccagagcagacttttgtaaatgcctttaccagtagagcatggctcaaacgacgtgtcacgtttagggctaggttataaaaatgccatggatttctaactttctctctggagtgtcacttttggaatctggctactatgtgaggagcccaagcaactaggagtggcctgtgtaagagggaaactgaagctcctgactctcagccccagctgagctcccagctgacatctgggatcagcttgccagccatgtgagtgagctgtcctaaaagcagatcctaatcttctagttccccatcacagtgccctaatgagtgcttatgtagtgtttatatgtagagcagagatgagttgttcctgtcaaactctacccaaattgcagattcatgagcacaataaaagattgttttaagccactaagttatgtagcaggggataactggattagcattccattttgccggagtttagagatcatactatacgttgaactgtaagaacaagaacaagatrtatttctaccttcaggagcactgttagttttataagagaagaaatatggattatgtgtccccttcctttatagattgttatttcactgtctttcattttacatatttattaaattattattttttttaactaaagagcagtacaaaacaagaaatcaaatattggacaacaatattgctgcctagataactccattttcatgtacttctagtttagaaggttgtgtgcatgttaataagcagtgacttcggaatgattcagaccacatgtgtgaccgtgaaggcagtatcctctttgtaaatcagttgatctataaaatggtatgtacttcatgggtttgctttgagacttcaatgatattacctgccacaaaatattggctgttcattactactgctcccccatcccccgccaacaatagagatgggatcttggtctygtcatgttgcccaggctggtcttcaatttgtgggcttaggtaatcctcctgccttggcctctcaaagtgctgggattacaggtgtgtgccaccacacccagcctggactttttgatagtaagtgattaggcagtgatacaatagcaaagacatggaaccagttcaaatgcccatcaatgatagactggataaagaaaatgtggtgcatatacaccatggaatactatgcatccataaaaaggagtgagatcatgtcctttgcasggacatggataaagctggaagccatcatcctcagcagactaacacaggaacagaaaaccgaacactgcatgttctcactcataagtgggagctgaacaaggagaacacatggacacagggaagggaacaacactcatygaggccatgtggggtgggggtggtgaggggacgaagagcatcaggacacaaatagctaatgtatacggggcttaaaacctaaatgacgggttgataggtgcagcaaaccaccaaggaacatgtatacctgtgtaacaaacytgcacattctacacatgtgaactgtattacctgttgtcattatgctttatttatttatttatttatttattgagacagggtctctgtctcccaggctggaatgcagtggcaggatcatagctcactgtagtcctaaactcttggggtcaagagatctcctacctctgtcttccaagtagctgggactacaggtgcatgccaccatgcctggttaatttttttatttttattttttagagttgtggacttgctgtgtttctgaggtttgtcttgaactcttggcctcaaatgatcctcctgtgctggcctctcaaaatgttgggattacagaatgttgggattacagaagtgagccaccatgcttggctccactatgtttattttttaacaagccttttaaatgtattaatattttacatataatgtgtagattttaagtgtttagttcactatgtgttttttaaatcaatttttaattgtttagtgattagttgattacaggtagcaggcactaaaccaaatggaaggaggagtccaagagaggataacttttttcgcagagtgctagtgcttattaggggataaggtttatatattamctcattagaagatgggggcattattcacatttagaaagagaaactgagacttaggaaattaaagtgattgacccaaagtaacacagctaggaagtggcacagtcaagacaaaacagttttgttttgctctgtaaaatttttgctattactgactagtgacattgaaattattcagaaaaacaaaacttggtagagataatttcctgtgagggtttattgaagtcccataaaataaatgaaagcagcccatgataaggaggtcttctggtttcaaatgcttcaaagttcctcragcttttttttttttttttttttttttgagatggagtctcactctgtcgcccagactggagtgcagtggtgtgatctcggctcactgcagcctctgcctcccaggcacaagcatttctcctgtctcaccctcctgagtagctgggactacaggcacgcaccatcatgcccagctaatttttgtagttttagtagagatagggtttcaccatgttggccaggctggtctcgaactcctgacctcaggtgatctacccacctcagcctcccaaagtgcwggaattacaggcgtgagccaaagttcctyaggcttctaaaactgaggtagtgtaattttatcaggcattcctctataatgattgaggtaatcaggtaaaaggagttgttttcagtaacctaggtacgtttttrcttttcagtatgaaagaatataagactaataagaatgaaaattttgtttctaggtagtttatgctattgcatgtgtcttatatgcaagatttaaaggctgaaatgtaagtgatgttacttcattggataacagacaagccacatacttcagaggagatgatggataagtagttaatgaaatgttactgagtgaaaaaaaayctcttcaggtgtgtaggaatgtattatttaattcagtcagcatagaattcctgcaggcctcagatttttctttattctcttatgtttcatattcctttatcctttgcagcgtgtcagatacattgatgtgtttgaaaattgacaccaggtaaagaataaatatgataagtgaaagggtaaatgagagttcagacattctttattttcataaattattcttaaaatttttattttatggaaaatactagctcaaaaaatgggataattaggacagattttcaagagaaaacaatgattttttcaacagatatttttaaagcatctagataggtcaggtacttttttttggttaacattctgaaggcttctgatggagagtctatttgacattcttaaggttactgaaagcagaaaatggttttctcttaatatattattggtgggttttgtctcctagatttttttcctagttcttataaactggtaaaaacctagagtttttatttgtaataaaattttacttgtaataaaaaatttaaacatcttaaaataaattcagtgactgtttcatgttayagtctatcctatattcctggtatccctttttctgttctacttcttattttttaaataaaaaagtttgtgtgtatatattcttttcccctcgtttattcattctagattttgctttctgtcwtccttcctctgctcaaatacaagccctgtgagggcagggatatttctttgttgataaagcacagaaaatagtggaacatagtagatgttcaacaaattctttgttgaataaataatacttttaatattttaaagttaattctaatatatacacaaaagcatatataacatgtatacttttttyttaaattaattttttttgagatggagtctctctctgtcacccaagctggagtgcaatggtgcaatctcggctcactgcaacctccgcctcccaggttcaagcgattctcctgcctcagcctcctgagtagacaggcatgtgccaccaygctcggctaattgttttttctgatagagatgggatttcacgatgttggccaggctggtctcgaactcctgacctcaggttatccgcccaccttggtctcccaaaatgctgggattacaggcgtgaggcactgtgcctggcccaacatatgtgtactttaaagaagaattacaaataaatgtctttgttctcactggtcaacttaaaaaatagtgtactgtcaataccttgaaattccctcatattcctcttttctatggcatttgcctccttccctctcctattggaagaataaattatttttattcatttgcatttttttcataattttacaacatgaatataactatattatttaagtgactggatatgactataactgtaaattgattttttagtttcagatttgttaaattttatattcatgaaatgatactgtatgtattctttagtttgctttattcattcaacattaggagtttgagattcatttgtgttgatgcatattgatatactccatttaaactgttacatggtattcagttacatgactatgtcactgtttattctatctgtgggcagttggtttgtgtctaaataacaagcagtgcaactacaaacatttagaaagtgtactctggtgtacatgtgcttcaagagttttttttttttttttttttttttgaggagagtctcgctctgtcacccaggctggagtgcaatggcgcgatctgggctcactgcaagctccgcctcccgagttcatgtcattctcctgcctcagcctcccgagtagctgggactacaggtgcccrccaccacgcccggctaattttttgtatttttagtagagacggggtttcatcgtgttagccaggatggtctcaatctcctgacctcgtgatccgcccacctcggcctcctgaagtgctgggattacaggcatgaaccaccgcgcccggctgcttcaagagtttctttaggccaggtgcagaagctcaggcctgtaatcccagctctttgggaagctgaggtggacagatcacctgaggtcaggagttcgagaccagcctggccatcatggcaaaacccggtctctactaaacatataaaaattagctgggcatggtgtgcatgcctgtaatcccagctacttgggaggctgaggaaggagaattgcttgaacctgggagatggaggttgcagtgagctgagatcatgccactgtgctccagcctgggcaacagagcaagactccctctcaaaaaaaaaaaaaaaaaaaaaaagccgggtgtggtgacacgcacctgtagcgccagctacttagaggccaaggtgagaggatcgtttgagccaaggagttcaaggctggtgtgagctgtgatcatgccactgtgctacagcctgggcaacagagcaagaccctatctctgggggaataaaaaaaaaggtccttcaggttatatagctaaagaaattctaggtcatataaaatgggcatttgtcaactaaatatggacagttgttttctgaaatggttgtaccagtttatgctcccatcaggtacttcagtgagaattccagtttctttccttgccagcacttggtattttaaaaatttagccattatactagatgtataatttttttttaaggaaaaaactttatttcattcttcaataactgtaattactagtggwgtgtatgttgggtattgtacaacttctcaaaccttagaatcattatacaccatcagctcttttcctgtaccatacaattttcacatagcatttattttttatgccagcgactactaacaaccagcttcaccaagatgtgacattattgaaaggaatgttgagtgaccttatgttaaagttgaattagctagaacttgtagtttgcatagtatccgacagatgtcaccgtatttaccttgaaaatttaaaatattttgcagcatccttgtgaatttgatgtgataccccaaggcacctgagcacacagtttgggaaccattgccttggaatattaatcatagttacctccagaragtgaaattttggataattaaaaaaatttcttttttcttgagatggagttttggtcttgttgcccaggctagagtgcaatggcgtgatctcggctcaccgcagactccgcctcccgctttcaagctattctcccgcctcatcctcccaagtagctgggattacaggcatgcaccaccacgcccggctaattttgtatttttagtagagacggggtttctccatgttggtcaggctggtctcgaattcccgacctcaggtgatcagcccgccttggcctcccaaagtgctgggattacaggtgtgagccactgtgcccagccaaaaaaaaaaaaaaaaatctttatactttctggattttccacttttataatgatcatataacacaagaggtgttatgattatatattttatgcattatgattatatatattgcatttactttttaaaatttttaactgaaattcataattttttctactttctttagtctttacctaatatcctttttctgttgcacccaggataccacattacagttagtcatcgcatttcctcagggtcctcttgccagttacagtttctcagacctctcttatatttgatgactttgaaaattttgaggggcattggtcaaatattttgtagaatgtctcaactgggatttgtgtgatgtttttctcatgattagattggatttttagggaggaaaatcacaggtaaaatgcatttctcatcacattgtatcaagggtacatgctgttctgcatgacttatttctgttgactgtaaacttgattacctggctaagatagggcttgtcaaatttcttcattgttaagttactactttattcacgcttttcatactgtactctttggaaggaagtcattgcacagtgcacacttaaagagtgaaggttgtgttccacttccttgaagataaaatacctacataaataagtttttcttcatttaagatttgtctgtgtattcagtcatatatttatgtaattggactcatggatatttgtttcatgctttggtttataatccagtactactttattttcttgctcagattgttctagctttggtcattgggagctcttttcagttggctgataagtccctttgacataccattgtcatgatggctttgtttgattttgtttgttttttaagtatttccttccctttctggcactacaagatgctccaggttcatcttgtatatttcctcagtcatagaatcagatatttctccaaggatccctgattccttttattggagaatggtattagaagccaagagctaggtgttaggtgtgtttgttgctactggggcacaatgtggttttaatttgcattcctgtgatgattgatgacatcagacaccattgtatatgtttattggttatttatatatcctgtttgtcatgtgacaagcctgtttaagacttttcctaacagcagtgttgcggttatgacagagactatatggctcacaaagcttaaaatatttattatctggccggttacaagaagagtttacttgcccctatagttataataactatgttaatgtcagtcctgttctgggttggttttgattggttgatttttcttatattttcttctttccgtgtctggttatctttgagtagatagtagacattgtaaagatacttgagttttttttcttttttataaatttcttgagacttttcttggcacgcagttaaattatttggaaatatttctgttctttaaggtcatacttttaagctttgttaggtggatcagatcaccgtttagggctgtcatcactagggcatataactgtactaatgtgacatgacccttctgaatgccataccagggaattataaggtttttcaagtctggctggtgggaacaggcactattatcgcttgtgtgtgagttccaggcttccaggcactgttccctctaatcctctcagatgattctttcctctctggtagttttcttctacacatgggcttatcagtacttggcggaatacttgagagaaactctccctagatctctaatattttctctctgtgcagctttctcctctacagcattctgtcctgtgcactctagatgccttagcgtctctagacactcagctccatctttttaactcagggcctctgcctgagttcctcttccctgcgctacatcctagaaatgctctcaaggcagtcagctggggtagttgtaggccctcccttcttttgtcctcagagatcactgtccttgctgcctaatgtccaatgtcttgaaaaccactatttagtccagggatgtacaatctttggcttccctgggccacactggaagaagaacagttgtcttgggccacatataaaatacactaacactaatgatagctgatggactaaaaaaaaaaaaaawttttcacaaaaaaagtctcataatgttttaaggaagtttgcgaatttgtgttgggccacattcaaagccatcctgggttgcgtgtggttcatgggccatgggttggacaagcttgatttactctatttcatctgctttcttcctttttttccagataggagggtaaatctagtccccgttactataccttggatagaagtagaagtctttgaggtctttttaaaaaattctgaatggatgtttaattttatcaaatgctttttctgtatctattgagaagatcatatgattttttttctttctctttttttccttctaatgtgttgaattaatttgattgattttttttttaaatgtkaaaccaaycttaaatttctggaayaaacccaacttagtcacgatccttttttaacatattgctgaattcaatttactcatatgtgttttaagatttttacatctatattttgtacatacactgcccttcttcaggtttggacatcaagattttccttataaatggttatccaaggttatagtgggtgggaaatgttctctctttttctctagaaaagtttgcataatactggtgttcttttttaaagagaagcggtttaattggttcacggttccrcaggctgttcaggaagcatggcagcatctgcttctggggaggcctcagggcgcttttactcatggtggaggcaaagcgggagcaggcctcttaaatggcaggagcagaaccatattagtccattctcatactgctatatagaaataactgagactgggtaaatttgtaaagaaataggcttaattggctcacagttctacaggcagaacaggaagcacagcagcttctgcttctgtggaggcctcatggtggaaggtgaaggagaagcaggcaggtcttacatggctggagcaggagcaagagagtggggaggcaaccagatctcacgagaactcactattgccaattgaaatcatgaggaactacccccatgatccaattccctcccaccagactccacctccaacattggggattgctgttcaacatgagatttggtcagggatacagatgcaaacmatatcagtcgtccaggctggtcttgaactcctggcctcaagtgatcctcccacctcagtctcttgaatagctgggattataggtgtgtgccaccatccccagctaatttttaaaattgtgttttagaaacatagtctcacatttggaccactgtttaattacagatctacttctctaacagatataggattgtttaggttttccatttgcacttgtttcggttttggtcagctgtgtttttctatgaagacaaatgatctgttcaaggtcatacatcttataatgaataaactttccaatcttaaactttttcmaatggtgtcataccaacataatacgtatgtttaaatttgtaaactcttttatcctctctactagaatatcaactagtgggtagattctgtatttactaaaacttcctatcatctgagtcttaaggcctataaayagatatttgaattaaattaaagcatgcttggggccagacatggtggctcatgcctgtaatcccagcactttgggaggccgaggcgggtgggtcacttgaggtcaggagtttgagaccagcctggccatcatggcgaaaccccatctctactaaaaaatacaaaaattagctgggcgtggtggtgcgtgcctgtaatcycacctacttgggaggctgaggcaagagaattgcttgaacctggaaggtggcggttgcagtgagccgagatcacatcactgccctccagcctgggagacagagtgagactgtgcctcaaaaataaatacatagatagatagatagatagatagatagatagatagatagataaatggaaaccttgatttaagtagttgcttcagtagttcatttgggctttgtcagtcaataacacattttacttctgtagtaatgggttactgataagggaaagatatgttagggtatgtattgaataaaaaggtgggaatggtgaattgaaagtatagttctttaaattatttactcatttttttaaaattgtttggtgttttattaaatacatggcactttaataacaaatgtaagctcctctttctctgttaccagagacctgtcttttattattattattattattattttttaaaattgataattcttgggtgtttctcgcagagggggatttggcagggtcataggacaatagtggagggaaggtcagcagmtaaacaagtgaacaaaggtctctggttttcctaggcagaggaccctgcggccttccgcagtgtttgtgtccctgggtacttgagattagggagtggtgatgactcttaacgagcatgctgccttcaagcatctgtttaagaaagcacatcttgcactgcccttaatccatttaaccctgagtggacacagcacatgtttcagagagcagcgggttgggggtaaggtgatagatcaacagcatcccagggcagaagaatttttcttagtacagaacaaaatggagtctcctatgtctacttctttctacacagacacagcaacaacctgatttctctatcttttccccacatttcccccttttccatttgacaaaaccgccatcgtcatcatggcccgttctcagtgagctgttgggtacacctcccagacggggtggtggccgggcagaggggctggctcctcacttcccagaaggggcggccgggcagaggcgccccccacctcccggacggggcggctgccgggcggagacgctcctcacttcctggacggggcggctgccgggcggaggggttcctcacttctctgacggggcggctgccgggcggaggggctcctcacttctcagacggggcggctgccgggcggaggggctcctcacttctcagacggggyggctgggcagagacgctcctcacmtcccagayggggtcgcagccgggcagagacgctcctcacatcccagacggggcggcggggcagaggcgctccccacatctcagacgatgggcggccaggcagagacgctcctcacttcctagatgggatggtggctgggaagaggcactcctcacttcctagacgggatggcggccgggaagaggcgctcctcacttcccagactgggcagctgggcagaggggctcctcacatcccagatgatgggcggccaggcagagacgctcctcacttcccagacggggtggcggctgggcagaggctgcaatctcggcactttgggaggccaaggcaggcggctgggaggtggaggttgtagcgagctgagatcacgccactgcactccagcctgggcaacattgagcactgagtgaatgagactccgtctgcaatcccggcacctcgggaggcccaggctggcagatcactcgcggttaggagctggagaccagcccggccaacacagcgaaaccccgtctccaccaaaaaaatacgaaaaccagtcaggcatggcggcgcgcgcctgcaatcgcaggggttcggcaggctgagacaggagaatcaggcagggaggttgcagtgagtggagacggcagcagtacagtccagcttccgctcggcatcagagggagaccgtggaaagagagggagagggagactgtggggagagggagatggagaggggagaggggagagggagcttatttactcattttaaaatttatttttagagatggggtcttgctctgttgccgaggctggagtgcagtggcacaatcataactcactgcagccaggctcactccccagctcaggctgtcctcctgcctcagcttcctgagtagctaggactgcaggcacatgccatgacacctgggtaatatttaaaattttcttagagacagagtctcactatgttgcccaggctgctcttgaattcctgggctcaagttatcctccyacctcagcctcctgaatagctaggattacaagcatgagctatcttgcctggctctggttcttaaaccttggaggttccatttatatggttgtatttctttttcttttctttttctttttttttttttttgagacagtgtctccctctgtcgccaggctggagtgcagcggggcgatctcggctcactgcaacctccgcctcctgggttcaagcgattctcctgcctcagcctcccaagtagctgggactacaggcccacaccaccacccttggctaatttttgtatttctagtagagacggggtttcactatgttggccaggatggtctcgatctcctgaccttgtgatcctctcccctcggcctcccaaagtgctgggattacaggcgtgagtcactgtgcccagcctgttgtatttatttttctagattacagttaattttgttttcatttcttgaaacctagtagaatatgtatctgcctataattcaagggcaattgaaagaaagaaaaataactcaaggccaggcatggtggctcacatctgttatcccagaactttgggaggctgaggcaggaggatcatttgagcccaggagttcaagaccagcgtgggcaacataatgagaytytgatgytacaaaaaacttaaaaaaaaaaaaaaaaaattaaccaggcatggtggcacatgtctagctacttgggaggctgaggtgggagtattgcttgagcccaggaggtcaaggctgcagtgagtggtgattgtactctgcacagtgaaaccctgtctcaaaaaaaaaaaaaaaaaaaaggaaaagaaaaataatgcaagttcagcatatgatttagcaaaaccatttttgatttctctttgagagagattgtaacttgaatcctccttttagtggggagaatttaatgaatattttacatttcagtgtaataaaatgtgtccaacttgttacacaagacttagtttaarattcacatgtttgggaagaatgtgggtttgagtggtgagggttcagttgaaggtctctttctataaagtatataatttgttgccaaaggaaatattacctagcagcagtttacatgtgccaagagaggacagagaagtcttatagtagaaattgtacagaggagctgtcaaactagatccctgaggatgtcagacaggaaataaagcttatgatgctaaaaaattttactggatgactaggccattggaaatgaatcttccaatgcttgtgttttttttttatcatgcttttatttgaaaacagttacttacacttacaaatttaaactgtttaaggtatttagaccaaaatttaagaaactttataagatcttattggctaaatattgacttaactatatatatatatatatatatatatatatatatwtwtttttttttttttttttttttttgagatggagtctcactctgtcacgcaggttggagtgcagtggtgtgatcttggctcactgcaacctccgcttgctgggttcaggtgattctcctgtctcagcctcctgagtagctgggactacaggcccgcaccaccacacccagctaatttttgtatttttagtagaaacggggtttcaccacattggccaggctggtgtccatctcttgacctcatgatctgcctgcctcggcctcccagagtgctgggattacaggcgtgagccaccgcgcccggccaactatatctttttcttagaaagtgtttatcctctgagattaaggtttggaaagttataaggagagagactttaggttcttggagataaaatatagtaatgtaagcaatttccttctctatgccaaacgtggaaatacagacaatatgtataagcaattgtgccaaagtatttatctgtggttctctttattcctaaaatatattgcccatttctactatacacattcagatacactgtacagaattatagagatttggaacctgaaggactttaaagaacattcaaatttctttattttgtggagaagggacatgagacaggtaacattaaactgataagaacagatactacacttgatcttggccaaaaggccaagaagcgataggtaacataaaaatacagatagtttgcccagtatcatgaagggaataggagcagacttagctcttggagaaatagaakctttccttatttactgttgcagtaatgagttatttgaatttttatttatttattttagagacagggtctcactctgtcacccaggctggaatgcagtggtagcaatcttcctgcctcagcctcctgagtagctgggactacaggggcatgtcaccatgcccagctaattcttaaagttttttttgtagagatggggtttcactatgttggccaggctggagttgaagttttagaggtacatgatggctttggttttcttaccaccagatgatttatgaaagttgatgtatcagttgactgtcagcagaagtgaaaaactgtcaagcccctttgaagactattattattcaggaaacaaaacagtgttgacactaaatttttttttttttttttttgagacagggtcttgctctgttacccaggctggagggcagtggcattatctcagctcactggaacctccaccttgcaggtttaagctattctcctgcctcagcctcctgagcaggtgggattacaggtgcccactgccatgcctggctaatttttgtatttttagtagtacattaccagtgtagtttgtttgtttgttttttgacaaacaaagggttttgagaaagatggagtttcaccatcttggccaggctggtcttgaactcctaatcttgtgatccacctgcctcaccctcccaaagtgctgggattacaggcctgagccactgcactggcctttttttttttttttttttaaagtaaaacacaggatcagaaatctctttgttttgcatcatttgtgcaatatttgttttgtttgttttttccttaatgtcttgagagccagcaaagattatctgacagacagaattagactgaaatctcttagggaggttgtgaagtatttagagttaaaggctagagttaagaataagcagtggcaaaggtataactataaacctcaaagtgttactgacttaggattcattcatgactcttctgcattaagattgggagttaacttttaaaaactaggtacctccgtgaaacatgtatgcatcttactggacactcctttgtcgtttttccaatcacttctgccagatgggttttaatataataggaagaattgttacgatgtcagctctgttgtaatttggactggaatgattctgttctcttgtgaacttgaagagtccagttgaatcactttctagttattgtctttatttttttattgtagtttttaagtgtttgtttctacttgtggtaataatcctgttaggatgcatattaccaactatatgtgaaggcctggctatatggagcataaaattagatatgcttctttcctttggctcacagtctaaatttagtaggtgagagtttcctttcctagatgtcattaaaaatagaagatacccatctgtctggaatgggttagatacacttctccctacaggctgagagatgaattatataacactaacttccttttagccctaggattcttagaaaaaaatgtttctcttttaatacagaggccaagagtgtatagtttgaatgttaaccttaaattatcctataagtttgtgaaactcaggaagtcctaagaaaattgaattttgaggagaaatcgaaaagataaggtgaaacaacatcacttgattaagaaattggctttgaggtaaaatctgttcccagccctagatttacaatttactagctgtgtaagaaagttgtttaacctgagactgtaacttcattattgtggttggaatagtaaggaccgcttgttgaggggcaaattaaatgagtgaatatttataaagtgctttcttcagtgcttgggatgtaaaagacatttctggtggtggttattactgttaatgttaatattacttctggttctttttattaaaaatctgccatctcactattaaaaatcttaatttggagctcaggatagaatatgaggtcagagttaaatagggaattcctaggtgtatttggagtcctggaagtcatttagaggaggactgaaaaatcatcctcaaaggactacctgtgttagtggatgcagaagaaacaggaaaacagactgcgagaaagccatcaatgaggtgaaaagagaaccaggggaatgatgtcatgggattcaagagagagattgctcactgggtcagaaagtttcttcaggagttcatttaaaaatattttcagcactaggtgatgtcaggtagggaaggcctctgaggaaaccattgaactgggcaggtaagaggtcctcatctttgagagagtggaaaaatgactgtagacctagacttgattaggcagagaaggaaacaagcagtgaggaaaagcagagggcaggtgtctaagatggaacctcatgaaaatttagctgtatagagaaagagagagatgacttaagggagaggagaaggtgtttgggtagggctgggcgcggtgcctcacgcctgtaatcccagcactttgggaggccggggtgggtggatcacctgaggtcaagcattcaagaccagcctggccaacatggcgaaaccccgcctctactgaaaatacaaagattagctgggcatggttgcggggtcctgtaatcccarctacttgggaagctgaggcaggagaattgcgtgaacctgrgaggtggaggttgcagtgagcttagatcgtgccactgcactccagcctgggcgacagagtgacactccatctcaaaaaaaaaaaagtgggtttgtttgtttcattttggtaagagaaaaaattggcatgtttgaaggctgagggagaggttaaacttactgggcagggagtagctgatggtgaagttgtggtcagaggcaagtgggactggaatccagtgcacaggtggtggctggaggagcagctgatctttatgaaagaggaggactgagggagggtaagtaagatagaggctgcaggggaaaatgaggaaattcatgtctaatggcctcttaccgatttaagtagggaaacggtaatgaactcatcattgggataattaggatagatgaatagatccttttctgctgctaaataaataaaagtagacttgggaaaaaggaatatcattattttcctatggaagcatatattaaaacattagaccaatggttctcaactgagagtgattttgtcccttgggacatttagcaatgtctggagacatgtttgtcaccgacgtggggtgtgttactggtgtctagtgtgtggaggccagggatgccgctagacatcctgcagtgcacaggacagcacccacatcaaggaatgatgtgatcccaagtgtccatagtgttggagttgagaactttgccctagaccagtatgtgcctacaacatacacttcaacaaaagctaagaagttcacataacagcttgatgtctctatccccttgtggaaagtcacagtatatgtttagtttattcaagtctgaaaaattctcaaaaggaaatctaaactgtttagctgactgacattttccctgctctttcatagcaactgttaacaaacacactgagaaatacatttagggggaaaggatgtacttcagtctcttggctggtcagtactatgtattcatccctgtatttctagtgtctgacacagttcttggcatattttgtggtactaaattgactccagcctataccattcccctgaactctagactcaaaattccagctgcctgttctgcatttttgctcagatgtccagtagcttctcaaccctaacacttccaaagtggagctcctaatagacctcccagacatgtctggaggtctcatcttagtcagtggctattccatccttccagttgctcagatcaaaggccttggagtcattcttcaccttgtcttatcctctgcattcccatccattggtaagtctcagctctatctctaggaaatattcagcatttaactattttccactctctctactgatttaaactgtggcctgagttgttagagcagtcttacaactggcttccctgcttccgttcttgtctcccaatacagtagccagtgagatccttttaaaatgtcagtcaaatcacatcactccttgttcaaaacgctccattggctcctcatttgcttcagtatacaagctgaaggcttttcagtggcctacatggctgtgcgtgaactggttcttcagtatgtctctgacctcttcccctcctcatcaatctgtgcctggttccacttcagtctcagttgggtttgttgttgttgttgttgttaagagatggggtctcactgtgttgcccaggctggattcaaactcctggactcaagcagtcctcccttttcagcctcctgaatagctgggattgtaggcatgcatcaccgtgcccagctcagtcacagtttttagttcagtgttttgctgttgctcaaacacatcaggcaagctaactcggggcctgtgcacttgctcttttctctgcctagaataattttctaccacatttccctcacggtttattctttcacctccttcaagttatttttgcttagatgtcatcttagtgaggtcttttgtgatcagcctgtttccaattgcagctctttgtcccctttgtctgcttgctttttctccagagcacttatcaccatctaatatactatgtaatttatataatttgtactgtctccccctactagaggtaacttattttagtccaagaacattttatgtgtgttttgctcattactgtgttacctgcaatttgaacattgcgtgacatgtaataggcctttaatgaatgattgttgaaagaatgaatagtgattaaagcaaaggctctgacttagaaccgaaattgagtcctggtgctggcactcgtctgctttgtgatcttaggcatgtcattaacctatctggcctgcttactcttctctgaaatggagatagtagaaccaagtaggtttgtcttgaggattcaatgcaagaatctgtgtaaagctctcagctcagaatctggtgcataataaacagtcaataagtgattgcttttattactactttttcttcccttccaatgtgaaaacctgggccacttctgacatatatgttgcaagttgcaattctaagctaaatgttggcaatcaccacaagagacaagagctacttctcatagatctgtagaatacactgatatttgtgctttaaaatcttacattaaagtatggcagttccttaaaaaattaaacatagagttattatatgatccagccactcaacttctgggcgtgtgcccagataaattgaaagcaggtacttgaacagattggtacaccaaggttagtagcagcattattcacaatggccaaaaggtgcacacaacccggatgtccattgatatagatggacagataaacaaaatgtgttatatccatacaatgggatattatttagctataaaaagcaatgaaattctgacacatgctacaacatggatgaacgttgaagacactatgctgaatgaaataagccagacacaaaacgacaaatatgattccacttatacaaagtacttagagtagtcaaattcatagagacagtagaatttaacacctgttactgacagacacatgatttcctcatattcattactcactcaaagtctggaatgttcaaggccagccagagcctaagccaaagtaccagtgataattcttatgttttgcttaaacataaggtktgtatttgtttttctttgaaggatgaaaagctgccgtctgtaatcctagcactttgggaggctgaggcgggtgcatcacttgaggccaggaggtcgagactagcgtggccaacatggcaaaaccctgtctctactaaaaatacaaaaaaattagccaggcatggtagcgcacatctcatctactaggcgggctgagtcacaagaatcacttgaacccagaggcggaggttgcagtgaactgagatcgcactgctgcattccagcctgggcaatagagtgatgagatactgtctcaaaaaaaaaaaaaagataaaaagtgatttctttcataacaaaattctataggaattacatcatgcttagtttaatttggggaagtatctgcatatatattttctctattttttcctggatatgaatatgtattcttaaaattcctaaaggatgccaagaatgtagctaacagtatcagaaataaacttcaaggaagtgtttctctacatctcaacaaaatcacttctctatatctcaacaaaatccctacaagtaaatctgtttttaaaatttgtctcaaaacatttgcggtaaagacaattttggacacacatctaattttttttttttaatctgtgattttgccaattgagaagaactggaaacaggagggagaattttgatgtcgtagatgttcttgttgattaagggataagggcacatacagacaaacccaggaattatctgacttcggctaaaacaacaacaacaaaacatctccagtactagcctgagtaattgcttttggcataatagctgttacctcagacagactgaaagtttaataactagattggagacttccctttgcagttcacaaataggaaaaacaccaccacagaagttctgtcacacatctgacccccttcgattcttaatttacagtgtgactgcatcttgcagccatgccccatcttagcattcttaaattataatgttacaggttattggcctgccaaaatgttcgatatgtaacattgaacagttccaaatgagatgaaaacaatcttgttactcatgagagtttgttttttctaggcttctgtttcattttatgcaccagtatagtcattttgtggaaaataaaggttacactgctttattaagtctcttttataattgtaatccagatttaccatccaataagagataacattgttatattttctgtcatgttctaaatatgtgctgggcatgatggctcacacctgtaatcccagcactttgggaagccgaggcaggaggattgcttgaggccaggagtttgagactggcctggacaacatagcaagacccagtctctccaaaaaataaaaaaaaattatccaggtgttgtggtgtgcatctgtagtcccagctactgaggagattgaagtgggaggatctcttgagtccaggagattgaggttgcagtgagctatgattgtgccactgtaccctagcctgggcaacagagtgagaccctgtctcatatatatatatgtgtatatacacatatatatatgtgtgtgtatagatatatatatacacacacacacacatatatatattcttatatagatcagaatttatatacatataagaatattcttagaggaatattcatattcttgtatacattcttatatatgtaagaatatatacatataagaatatacattcttaaataatgttggtgttgaaatattgaagtttccattgctattattttaattcttgaaggttcacgaaatatctgtaatctttcttccttgaaatatatatttcaagcaacatatccttctgaaatatccagaatgcattttgccagtaacaaaagaatattcttttgaaataccagacttgtaatgggagttagagaaatcttcctacttctttctcttcttcctgcctttttaaatcacaaaactgtaagactawcctggtatttgatataaattttatttgtatataaaatatttaaatattttaagtattaatatattgaagattacatatatctgtgtctatatctatttcaggcctttaaactctttggggagttcaaagaactagaaaaaagaatgatttaatttatttacttttttttctaaattattactttttccccgagacggagtctcactctgtctcccaggttggagtgaagtggcatgatcttggctcactgcaatctctacctcccgagttcaagcaattctcctgtctcagcctcctgagtagctgggattacaggcacacaccaccatgctgggctaatttttgtatttttattagagacagggtttcaccatgttggccaggctggtgtcaaacttctgacctcaagtgatctgcccacctcggtctcccaaagtgctgggattacaggcgtgagccaccgcgcccrgctaattttttaacttttaacaaattttgcattgtttctttttggtattcctagaagtaattgtatacgtaatataatctttcttttctcattgatgagtagaatgataggagtgaatcaaagaagtttcctaccattttaaaattctttccctacttctcaaaaaaaatgtgtttgatatttatttaaacgttaagttataggcaaccatgtatcctggaaaatagtcaggagtatatatattttactgtcatagratgtggtccatgcaatacttyaagtgaataaggccagttgcatagtttatatcatataatttcattttcgtttaagagaaccacatgtttgattatgcaaagacaaaggtttggaaaggtgtacagttattgagtgtgataaaccctgggagaatgggatagaggcagggtactgcctcaggttgggttccccagaagcaggagttgagataaacttttatgggaagacaacttactgagaagagtttcagaaaaacctgctagggagtgggaaagtaggactggggacaggaagaggaggctggtatcaaggatgtgataccaagaaagcctcaaggtagacaactttggctagtcttgcaagggagttctggagcttatacctaagagttgtcactgccagggaccaaagaaataaagtagagcctttatactttcatacccatcagtaattgctaaggaccatccctggtggggaggtgatatggtttgcctgtgtccccacycaaatctcatcttgaattcctttgtgttgtgggagggacccggtgggaggtaattgaatcatgggggcaggtttttcctgtgttctccttgtgatagtgaataagtctcacgagatctgatggttctgcaagggggagttcccctgcacaagctctctctttgcctgctgccatccatgtaagacatgacttgctcctccttgccttctgccatgattatgaggcacccccattaaaccctttttcctgtataagttacccagtcttgggtatgtctttatcaacagtgtgaaaaacagactaatacaggatgagtgtataaatgtccaggaagtgctggcagactgagggtagcccctctacaaagacctgcaggtgctggctgttgggagtgagagcacagggttgggaggaaatgtgggcagagcactgacagcagttgtagccctcacccaagttacagagattttaaaaagattggggtttaattctttctcagtttaagcctcccagggcctttatggtggctccacagagatccaggctccttctattcttttgttttgttttgtttttccaggcttcttctctcttgttgctctstcatcactagcttattgcccacatccacgtggtccaagatgctcaatattatgtccatattcccattagaaaaaagggggaaagtcaggaggaagagagcacattaattcctctaaggacaagttctcaaagttacatcacttcacctcaaatcccactggccatcatttagttccatggccatacctggatgcaaggaagactagtgtttattatggttggccttatgcccagttaaaaataggagactctgttattatgtaatcatttctgtagaaggagagaacacgtattgtaggactatctattatagggatgttcattttctgttttatagggatatgctttgttttttagtttaataagcatgtattttttgtcttaactatcacaggttaggggctccagaaagcagaatttgagacacaacttaatgtgcagaatgttaagtagtgctcttctgttcaactcctgtggaagggaagaagcaagatttggcagggagaagttgagctgtggtacactgtgaacaacaggagctgactccacagggagctctggagctaacgtggacttttagagttgccctgctttgagcagaaatggctggaccatttatacctttgtctccgttggttactggatgagggattgtcttgggaagcacatgaccttgggcaaggtagctctgcagaggtaatgtctacaggagctgacagtactcccagcaagttctttcttgaagggagagctgggtgacacatctgtttgtctgtcacaacttcgtgtgtgaaagtaattaatacattttatgtatctattttataacttaaaaatttataatttaaagtttcttttattcytttatcagtagtttcttgtgtaactattagtactgggctttattatagacattggagatagggaaatgtccctcccctcatgaagtttgcattatatttggagatagataataaataaattttggctgggcgtggcggcttacacctgtaatcttagtacttagggaggctgagacaggcggatcaactgacctcagaagttcgagaccagcctggrcaacatggggagaccctgtctctatagaaaacacaaaaagtagctgggcgtggtggtgtgagcctgtagtcccagctacttggggagctgaggcggaagggtcacttgagcccaggaggtcgaggcttcagtgagccgtgttggagcccctgcacatcagcctgggtggcagagccagagtttgtctcaaagataaataagtataaggaagggtgttgctgttttatatggggtggtcagggaagaccagaaatgcaataagatgatttgagtgaaatgatggaactagctstgcagatattttgggaagagcggtccaagctgagattacagtgaattccaagacaaccctgtggcaggaatgtgtagagtattggtgtgtacatgaaacagcaaggagagcagtgtggctagaatgaatgagaatagtaggatgaagaataataggagataaagtcttggatataatagtggtgatcagatcatatgagaccttgtaagccattgtaaagacttggggatcttctcagaatgagatgggaaaccatgtgaagattctgagctaagtgatagaatttgacatattttaaaagatcatcttgtctgctgtgtttggaatgaactgtacccgaacaactggaaaaatggagttgctccaaccgagaaggggaagactgtgaatagagtaggtttttggggtgaatagttgcaattaagttttgtatctgataagtttggagtaccaatgagacattcagatagagatgacaaatagaaagttagaaagtggagactggaattcaggggagaagtccagtgtgtagattaaaaaaacgtaggtgtcggccgggcacggtggctcacgcctgtaatcccagcactttgggaggccgaggagggcagatcatgaggtcaggagatcaagaccatcctggccaacatggtgaaaccctgtctctagtaaaaatacaaaaattagccaggcgtgtcagtgtgtgcctgtagtcccagctactcgggaggctgaggcaggagaattgcttgaacccgggaggcgaaggctgcagtgagccaagatcacactgctgcactccaacctgggtgacagagcgagaccctgtctcaaaaaaaaaaaaaaaaggaggtgtcatcagtgtccagttggtgtgtaaagccatgaaaattcacactgtcacctatggaatgagtggagaagagaacatctcagagatttgagctcaggaacactccaacatttccacgttggatcatgaggtgaaccatcagtggaaactttgagaaggagcagcctgtgaagtaagaggaggaaatgatttttttatttttgagatggagttttgttctgttgcccaggctggagtgcagtggcatgatcttggctcactgcagccttcccctcctgggttcaagcaattctcctgcctcagcctcccgagtagctgggattacaggcgtgcaccaccatgcccagctaatttttgtatttttagtagagacagtgtttcaccatgttagccaggctggtcttgaactcctgacctcaagtgatccacccaccttggcctcccaaagtgttgggattataggcatgagccatcgtgcccagccggaaatgatgttttagaaggcaaccaggagtgtttcaagaagaggaaaatgatcaacagtgtccagtgctgtcgataagtaacataagatgaagactgataattaccctttggatttaccagtatggaactcattggtagtgacaagcagtgattcagtggaatgatgggaacaaagtgaattggtgtgtgttcgacagagaatgggggatgaatgggagacagctctatagacaagtcttctaaagagttaatgctgtgaaggagagtagagaaayagcatgaaggctagaggagcatgtgagctagaaagaagagttttaaattggaagctaatgcaccctgtttgaatgctgatgatagttatccagcacagaggcccattggtgatgctgcaagaagagaacagttgatgggctgatgtccttgaataacagtgagggatgtgaaggttaaggcatgaatggagggcttggccttagatagtaacatagttcaatcaagataatagaaggaagmcagaataatatgtgtggctacratagcaagtagatggtacattgtggctgggcatgtgtggaggatctttactgattttstctggtggttttttgttgttgttgttgtttgacagagtcttgctctgttgcccaggctagagtgtagtggcgtgatcttggctcactgtagcctccgactcctggattcaagctattctcctgtctcagcctcccaagtaactggcaccatgcctggctaatatttatttatttatttattttttagtagagacggtgtttcaccatgttggccaggtggtcttgaactcctgacctcaagtgatccacctccctcggcttcccaaagttytgggattacaggcatgagccaccatgtgcagccaagcctgatttttttttttttttttttttttttttttttttttttaaragacggagtcttgctctgtcscccaggctggagtgcagtggcgtgatctcagctcactgcaagctccgcctcctgggttcacgccattctcctgcctcagcctcccaagtagctgggactacaggcgcccaccaccacgcctggctaattttttwatttttatttttwttttttwatttttggtagagacggggtttcatcgtgttagccaggatggtctcgatctcctgacctcgtgatctgctcscctcggcctcccgcagtgctgggattacaggcgtgagccactgtgcccggcccaagcctctgttttttagtgaaatataaaacaattgccatcagctgaaaagtggggatggcggatgagatgttggatgtttgaggagagaagagaaagtgtgagatagggctctggaaagtgaagagtgagtggactaggaatgtagtggaaatgcccattctgtggtcatgctttgaaagtgagatcagtcagcatgattatgtgtatttcttcagccctatttagtagcccaggtgcaagcatggagtaggtagaatgttggatttaactgagtgataaataaaactaaatattcactttgaaagctgtttttaggaggtcggtgatgtgaatggtatttagaattttagctttttaattatacccattttggaaggctaaacttagtgartgacaggtcattaaaaaagcaaaaaagaaacggcattgttccaggaaaggttcttggttgaaaattacagaccttaattccagccaacttaagcagaaaatgaatttattggaaagttgtcaagtacctcacagcatggatggaaagactggagaatctggttcagaaaataggcaagaaccaagggaatccaaatatctgtaatcatggctgaagtcatgcccctaggggagtctggttccggatgctgttgccaccatttttgaaccctggtattgcatctgttggagtgagttatgaacctgtcctttcttttttttgagacagagtctcgctttgtcacccaggctggagtgcagtggcgcgatctcagctcactgcaagctccgcctcccgggttcacctattctcctgcctcagcctccggagtagctggaactacaggcgcctgccaccatgcccagctatttttttgtatttttagtagagacggggtttcaccatgttggccaggatggtctcgatctcttgacctcatgatccacctgcctcggcctcccaaagtgctgggattacaggcatgagccaccgtgcccagctaacctatcctttctcatttgagccactggctgcatctcaaaaacctctaaaaagattactctgaggccaagcatggtggcacacccctgtaatcccagcagtttgggaggctgaggtgggaagatctcttgagtccaggaggtcgctgctatgtcaagaatggagtataggagtgtaagagtagatgtggggagaataagtcatgaggctccaaaatagatgatattgacttagattaggatagtgacagtggagatgaaaagaagtggatagattcatgaactagcccattaggctgttgwtaaaattcttgtttagggaaaaattccttccttctcccctgccccttccttctccttcttcatcatcctccttcctcttcctcatctctccatcgctccttactctttcttcctcctccttcctcatcatcctccttcctcttcctcatctctccatggctccttactctttcttcctcctcctctctcctccacatcctccctcgttttcctctccttcctcttcttcttatctacctcctcctttcttgaaatctagacctttctagaggccttttacatactcctatcttgcataaggcagagtaacttatctagcagatattttataaaatcttgtagtattcatcatttgttaattaagaaaatatgcctagctcctagtatgtatactattgtgctgaagggggttgttgtagtcatttcagaattgagttcaagtctagacacacagaaatggtttatttcttctagggcactacatgcttgctgtctaggctaaccttttttctaggtgtgggtaattgagaatacatgatctaggtttcacctcaactttatttcccagcactyattagttccttattgtagtcatttacatatctgttattggaaatgggccaaatgtttatccattattttaaaaataataagaaaacaggtatctttttttttatcttcctaagacggtgaaggctagctactcagagactgccatgggaggatcacttgagcccaggagttcaaggttgcagtgagctgtgattgtgccactacattccagcctgggtgacagagtgagaccctgtctttctcttaaaacaaaacaaacaaacactgcccccsccaaccccaaaccaaaaaaaaacccagctagattactgcctcaaacttaatgtgcacacaagccatcttgaaagcttgttgaaatgcaaattctgattttgtaggtctgaagtggggcctaagattctgcctttctgttaagctctgtggtgatgctgatgctgctggtctatagatctcattttgagtaacaagaaactagataatatcctttgcactttcatctttgtatgggttattctgctttggggcatgttttggagctgtttaatttgaccacaggttaagtagtacattttaagaagattgaattgtataaccttttcctgcttttttgggccatattcttgaaggttataatactataaatagcttaagatttttagtttcagctttggaaatagatgaagagaagtctcagaagcagtataatttttattgaatcattaaatttgcagcagcacaattggtttatctacttgaggtagtctgaactacaagtagagtattagtaactgaattaagaataagaaaagatacaatgctgaaaatcattattagatatgtagaatacagttaagacttggggagtttctgttttgtagggttgggaatgttttggataaggtatatggtatatcagcactgggcttcttagctggggcgatctgcctcccaagacacatttggcaatatctggagatatttttagccgtcaaaacaagtaggggggtgatgcaactggcatctagtgcgtagaggcgagggatgccgcyaaacactctacagtgtaccagacaacccccacaacaaagacttatttggcccaaaatggcaggagtgagaaggttaagaaactctatgttagggagttttcaaaagcactttatttttaaaattaaaaataatacatccaggcatggtggttcatgcctgtaatcctagaactttgcgaggccaaggtatgaggattgcttgagcccatgagttcaagaccagcatgggcaaaatagcgagaccccatctctacaaaaaattaagatattaggtgggtgtgtgcattagtttgttttcacattgctataaagaactacctgagactggataatttataaagcaaagaggttaagttgactcatagtactatagcctgtacaggaatcatggctgagtaggcctcaggaaacaatcctggagaaaggcagaggggaagcaggaacatcttacatggctggagaaggaggaagagagaacagtggggaggtgctacacacttctaaacaaccaaatcttctgagaacttactatcaggagaatagcaagggggaaatctgcccccatgatccagtcacctcctatcaggcccctcctccaacattggggattacaattcgacatgagatttgggtggtgacacaaatccaaaccatatcagcatggtggtgtgcatctgtagttccagctacatggggtggtgaggtggaaggattggttgagcccaggagtttgaggctgtcatgaactgtgattgtgccactgcactccagcctgggtgacagtgagaccctgtctcaaamaaaacaaaacaaaacaaaacagttgagaccattctattgacgtatcaacaaaaactttttaaatgaaamattttaaatttacagaaaattaaatagaataattaatccccacattctcatcacctaacttcaacaatcatgaattgatggccagttatatactttacgtatattatatctataaatttgatatatttgtgtatatccacactcacctaaccctgagtttttgaagcaaattctaggtatcacatcatttaatctgtaaatatttcagtatgcgtatttaaaacatgaggactctttttgagccattatcacacacataaaattaccagtttccctgattcattatctcttctctcttgttttcttccaaatggatttttttgcttttaatgagatttcacataatgaaagagcactaattttacaaagcaatggaaattgatgctacatgggccaaacaaaagctatctgccgcaagtacttttttctaattatttttctagaatgtctttatttgtttgaaagtgccgtgtaaaataatgcaatactttctcttttctactgtgtctgttttacaaatcgcctttttcatcttccccagtattttctgagttatcttcaggctttgttatatttgctatagcaatggcctctggggactagttactacttactagctagtacctgcaggaatcattttcttaactggtggtgagcttcttgagggcaaggaccaagtcttaccaactttctgcctgataaccattagcatgtcctcaatatttgttggatggctgctactaatcttgagggcatcatgccaatattgactgatgtatcaatcaatgctactggcrtgtggtatttacagcaaaaaactaagtgtgctcatttagctataacatgtctttagcagaagagataagtcagatgttaacatttgatacctgcatctatgggaggtgaagtagagaatgctgttttctctagttacattcctttgtttcttcttacacttatttatagggtgaccatatgtcctagtttgcctgatacagtctggktttccaaagtctaatagtgccccttttcattcacagaattgtcctagtctaggtggtaaattaaatggcagtattacttacataacatttaatgtatgccagactctcttctaaacactttacatacattctcacttaatcttcatgataaccctgggaaacagtttctattattctacccatcttacatatgggaaagttgaagcacaaagaggtcaagtgacttggctaaaatcatgcagctgtatttgaatagtaagtggyagcaccaggattgagtgcaggctgtttgacaccagtgctcttacccacgccactcttgcccctatgctggtcccaaatatatctgtctgcctctgtagactacattttgatctattaagaatctcctgataattaatctgcatatttttagatcagcagtctggctaaggctttggaatttgaagggtttcctttgttttcacaaaatccttatagattctacatgtaccactaggccaatccgattatagtcttctttctcagaagaytgaatggtgaccttttttcatctttgtaatgccagctattcagcattccctctgagaccctccagtgatgaggtttcccagcatttggagagtatcaagtccctgcctcagtcacttttccttatctctgaccacctgtggtagctgaagttctctttccagcacctggaacagtggcagccatagagcaggcacacataaactgtttcactgcctttgattagtgcatattttggagttgcctggaaacagtgttcaaggcacttacataaggtgctttaagtaagaggttattgtaagctactgctttcaagtagcttacaatttaggaaggggatgacgagtgtacacaaataactatgatatacggcaattgaactatataagcaaagtattttaagagttcagaaaaaaacaaattgtttctgacaggagtgatccagaaaagtttgatagagatggtggtactaagtcagtttaataacttttaaattggctaaaaaattactgtctacttatgtttgctaagggtagaggcttgacagaagaataagacttgatgaacctccaggagaagaggatgtgtcagcttgacacttggtcctcttgggaggaatcctcagtcagcagtcttgctcggtttttatggtatcatcattatcatcatggcacattttaaccctctaggtggctcagatggaactttttctcagcagcaaagaattatcatatatattttgagacaaggtctcgctttgttgcccaggtgcgatcacggctcactgcattctcagcctcctgagctcaagtgatcctcctacctcagcctcctgagtagctgagactataggtgtgcaccacaacacctggctaagtttttgatggggactcttgggcttaagtaatcctcctgcattggcttcccaaagtgctgggattacaggcatgaaccactgcacccagtcaatatttttttaatgtagaagcctgatatgttatttgattttttttcttttttgagacagagccttgctgtgtcacccagagctggagtgcagtggtgcactctcggctcactgcagtccccgccctttgggttcaagtgattctcctgcctcagcttcctgagtagctgtgactacaggtgcacgccaccacgcaaggctaatttttgtatttttagttgagatggggtttcmccatgttggcaaggccggtctcgaacccctgacctcaggtgatccgcccacctcaacctcccgaagcgctgggattacaggcataagccaccgcacccgtctgttatttgattttatttttaaccttttaaagtctattgatgttcccaacatatttttccttaataaaaaacacagtctacttttattacaatgtaattacatttgcctttttaattggtagtaataaaaagtggttactttttaataggatttgtcacagtagtcagtaagataggatagttagtgctcattatcctccatacaaatgaagaaactgaaatttgataaaactgtaagctgcgtgactttggggaaaatggaacaattgggacctggacttgggtcttcagaattcacatccagtgtatgtatatcacatagccttatttagcttattagatttttaaaaaattttatcaagataaagaacaataaaagttgtggtgatctcatgttataacccctttttaataaatgtcattatagaatctaccttaacatgatgagtctgttttcatttctcagttgacaggcccattagcactgctttgatgatygtagacacaatgcattctacggaaagggaaatcctgaaggggttgcaggtggcctatatggttcctttgtgcaaattagaaaaaggccgcccctctaggggaaccagagtgctccctttctgtggtcagtcagaagaagcagctttggccccaggcaggatgatgagcttggagcatgggcatctggattgttgtctctgcttggcctcttttacgtagtgcttaaaaagcagcagccggccgggcscggtggctggcgcctgtaatcccagcactttgggaggcccaggcgggcagatcatgaggtcaagagatcgagaccatcctggctaacacggtgaaaccccgtctctactaaaaatacaaaaagttagccgggcgtggtggtgggcacctgtagtcccagctactcgggaggctgaggcaggagaacggcgtgaacctgggaggcggagcttgcagtgagccgagatagcgccactgcactccggcctgggcaaaagagcgagactccatctcaaaaaaaaaaaaaaaaaaaaaaaaaaaaaagcagcagccaagagtcctgttcatattaactaatttgtgaggggctgggttaaaaaaaattttttttactattgtatttttagacagaccctctcgttcctccgtacaccaagtacatacctgcctcagcatctttgtacttgttcctctacctggaacctggatctcccagccttcatttcatccaggtctccactccagtggaactctgcaagcttcacctcgcctactccagtgaaagtatcaccctccgtcattctcccttcctgctgtacttttttcatagtacttcttaccacttggaatattatatttatcctcattttatttttgtctttcacagagtgtagaaagtacactctgtgaaagcagatatttctttcactgctttttcactgccatgttctagcacctggaaaaatacctggcacatagaagactctcaatatttgttgaatgattgaactaaccatgtgattactccattttcatgcagctgatgaaggctacctgagactgggcaatttacaaaagaaagaggtttaattggacttacagttccatgtggctgaggaagcctcaaaatcatggcagaaggcaaggaggagcaagtcacatcttttttttttttttttttttttgagatggagtctcactgtgtcgcataggctggagtgcattggtgcgatgtcaggtcactgcagcctccgcctcctgggttcaagcaattctcttgcctcagcctctggagcagctgggattacaggcgcacaccaccacacccagctaatttttgtatttttagcaaagacgaggtttcaccatgttgaccaggctggtcatgaactcctgacctcaggtgatccacctgccccagcctcctaaagtgctgggattacaggcatgagccaccatgcccggcctgcaagtcacatcttacatggatagcagcaggcaaagagtgagcttgtgcaggggaactcctctttttaaaaccatcagatctcttgagacttattgtctgtcatgagaacaggacaggaaagacttgcccccattcattcagttacatccgggtccctcccacaacacatgggaattcaagatgagatttgggtggggaagccaaaccttattctgcccctggcccttcccaaatctcatgtcttcacatttcaaaaccaatcatgccttcccaacagtcccccaaagtcttaactcatttcagcattaactcaaaagtccaaagtttcattcaagacaaggcaagtcccttctgcctatgagcctgtaaaatcaaaaacaagttagtgacttcttaggtacagtgggggtacaagcattggataaatacagccattcaaaatgggagaaattggccaaaacaaaggggctgcaagccccatgcaagtccaaaatccagcagggcagtcaaatcttaaagctccaaaatgaactcctttgatgccatgtctcacacccaggtcatgctgatgcaagaggtaggctcccatggtcttgtgcagctctgcccctgtgactttgcagggtatagtgtccctcccggctgctttcatgggctggcattgagtttctacagattttccaggcgcatggtgcaagctgtcagtgtatctaccattctggggtctggaagayggtggccctcttctcatagctccactaggcagtgcccmagtagggactctgtgtggggattccaaccccacatttcctttctgaactgccttagcagaggttctccatgagggccccgcccctgcagcaaacttctgcctgggcatccaggcgtttccatacatcttctgaaatctaggcagaggttcccaaacttcaggtcttgacttctgtgcacctgcagtctcaacaccatgtggaagcayccaaggcttggggcttgtaccctctgaagcaacagcccaagctgtacctcggccccttttagtcatggctggggtgtctgggatgcagggcaccaagtctctagaccacacatggcatggcgaccctgggcctggcccacaaaaccatattctcctagacctccaggcctgtgatgggaggggctgccgtgaagatctctgacattccctggacattttttccatagtcttggggattaattttgggctcctcgttacttatgcaaatttctgcagccggcttgaatgtctccccggaaaatgggtttctcctctctgtcacattgtcaggctgtgaattttccaaacttttatgttcttcttcccttataaaactgagtgcctaggaccaggcatggtggctcatgtctgtaatcctagcactttgggaagccggggtgggcggattgcctgagcctttaagatcagcctgggcaacatggtgaacctccctctctaataaaaaatataaaaaattagctgggcctggcagcatgcgcytgtggtcccagctactcaggaggttgaggcaggaaaattgcttgaacttgggaggcagaggttgcagtgagctgagatggtgccattgcactccagcmtgggcaacagagcaaaactacatctccaaacaaaacaaaacaaaactgagtgcctttaacagcacccaggtcacctcttgaatgctttgctgcttagaaatttcttccaccagtaccctaaatcatctctgtcaaggtcaaagttccacagatctccagggtaggggcaaaatgccaccagtctctttgctaagacataacaagagttgcctttgctccagttcctaacaagttccttatctccatctgagagcacctcagcctggattttattgtccatatcactatcagcattttgggcaaagccattcaacaagtctctatggagttccaaactttcccacattttcctgtcttcttctgagccctccaaactgttccaacctctgcctgttatccagttccaaagtcacttctacatttcagcaagccccactccactgttaccaatttactgtattattccattttcactctgctcacaaagacatacctgagacttgacaattacaaaagaaagaggtttaattggacttacagttccatgtggctggggaggcctcacaatcatgacagaaggcaaggaggagcaagtcacatcttacatggatggcagcaggcaaagagataacttgtacaggggaactcccctttttaaaaccattgggtctcatgagacttattcactatcaggagaacagcatgagaatgacttgtccccgtgattcatttaccttccactgggtccctcccacaacacgtgggaattcaagatgagatttgggtggggacacagtcaaaccatatcacagtggattgtgattgatggtataaattatcagctttagtatttactaccttttattgactgtttatgggcactttctgtgacataatgttatgaatattgtctaatggaatcttcataatacctttatgaggggtaaataatataaactctgttttggagttgaagaaatcccaaagctgagaaaakttaaaaacatgcccaaagtaaaatagctagtaattcaagtcattccttgagaggtagatctgataaccaaaatcaatttctaaaaattgttttagtgattcttttgggtctcataatatttttttcaaagagtgatttttaatcactgggtaggggaaagcctgaaaatacgtttacttatgttttaaggaaaaggaraggtaggatctatgggatttgaaatactgggataactcgggatcagacaaccctatttcacaatatttgtgtttttatcttaggatgcatactatgagggtcctttgggaagaagarcatgactttggggttttttttctaactgtgtaattctggagaaataacttacttaagcctgttttttcatctctaaattctggtgacagtgcctaccttataggtgtgtgcagatgatatgtatataaaatgcctggcatagtttctggagcgtgggagcttgatttcttctgtaccctgccccctgcctttttcttcctccttccagctacaagtgactaaggatccaaggaactgagggccgttttctttttttttgataacttccctctagttaaacaatcccagattttaagctgcttttggtagtatgtagacaatcaaggtaccttttagaattcacatggcatcttgtttattgctgtaattcaaggagtaattcatgtgctttgttaagtgttgtgcacatattcccttcacagactttggggtctaattcctgctttcgtaatcaaatgctgaatgaaaactgagggtcaataactgtctttatttcttacagccttctcctcatgttccgtgaaataccagtttttttttttaagtcaccaacgtgtttgccaatacatatgaatttggatgctaacagggatttcttaagcaccatcttgtaatttctataactgtcattgtgtcaacaggatagtagtgtcatttacagactcaaagactgggaattcttgaactaatgagttgttaattaaggtaggttaaaaaaaaaccaggcatttttatatgaagatactttctgtatgaaatttgattaggcagtatarcatttaactagtaagtgtgaaaaattatttactaagaagcaaagaacaggatttaaaagaagtacaaccaacttccagttatagatgtctgaggagccttttcaattatacgcagatcttctctcccttttaatatcctattatgtgccatataatgaagcaataaaaaggctcacaatttaagcattaatgattgatttaaccaaagatatataattattagcttacataaccccaaataatgatataattaacaataacataactaatgatggggggaggcactctgggagctataagagaacaaaatccttatttgccatttgcagaaaatctgtaatatcaaaaatagatgaatcaagcaattgcaagaaaagcttattatataggaaaatagaggaaacaattatcaaaatagatgaatatcagaaatagatgaatcaagtaattgcaagaaaagcttatataggaaaatagaggaaactattatcaaaatagatgaatatcaaaaatagatgaatcaagcaattgcaagacaagcttattatatacgaaaatagaggaaactaccaggtaaaacagaagaattgaaagttttttgatttttggtttttcttacattttagagacagggtctttgtctatcccccaggctggagtacagtggtacaattatggctcacttgaactcctgggctcaagtgatcctcttgcctcagattcctaagtagctggggctacaggtgtgcaccaccacatccacctaatttttagattttttataggagtctcactatgtttcccaggctggtctcaaactcccaggctcaagtgactctcctgccttggcctctcaaagcgctgggattataagtgtgagccactgtggccagcctaacagtgggaagctgttgatgctggcagtataggggtggtggggggaagggtgaaccagcagactactgtctttaagtgtttgtgggtaatgttggctttttttgagatagagtttcactcttatcgcccaagctggagtgcagtggcgtgatctcagctcactgcaacctccacctcctgggttcaagcrattctcctgcctcagcctcccgagtagctgggattacaggcatgtgccaccatgcctggctaattttttgtatttttggtagagatgtggtttcatcacatttgccaggctggtcttgaactcttgaccttaggtgatccgcttacctcggccttccaaagtgctgggattacagatgtgagccaacacgcccagcctaatgttgacttttttttgtttatatattattttgacaaaaataaaagttaactatgagaaaagaaaaatagaaatataagcaatccaaaaaagtgaagacaactcacaaaaaggaataatgtatttgcaaatcatttatctgacaaggtgcttttatctagaatgtgtaatgaactcttaaaatgaaataataaaaagaaaacccattaaaaaaatacaccaaaggctgggtacggtggcttacgcctgtaatcccagcactttgggaggcggggggggtgtggatcacttgaggtcaggagttcgagtccaacctggccaacatggtgaaacactgtctctactaaaaatacaaaaattagccaggcgtggtggcaggtgcctataatcccagctacttgggaggccgaggcacgagaatagcttgaacttargaggcagaggttgtagtgagccaagattgcaccactaaactccggcctgggcgacagagcaagactccatctcaaaaataaataaataaataaataaatgtcaagtatctgagtagacatttcttcaaaggaaatatacaaagccccaataaacacagaaaagccatcagggaaatccaaatctctctagacagataataacaagtgttgttgaggatgtggagaagtacaatacttcatacattgctgcatgtgtgaaatggtacattcactttggaaaatagtctggtagctcctaacagggttaatatagagttgtcagatgacccagcaattctactaggaggtatacccccagaagaaatgaaaacatgtctatacaaaatcttgtaggcaaatatttgtagcagtattattcatagtagccaaaaagtgaaagtctgttcatcacttgttgaaaggagaaacaaaatttggcatatccatacaatagagtattacaaggaaaaacaaatataaccaatcagttactgcttaaagaaaaagtaatttttctttctcctttgaggaaaagtttattcttttcttacctatcatgcatccactttattgtagacaaaacatgaaatstaggaaagcagaattgtgacggaatacatcatatgaccatatgagtggggactggctctgtcacccaagcctgagtgcagtggcgcttccaactcaccttcccgagtaggtgagactacaggcacacaccatcaygcctggctgattttttcatttttttgtagaaaaatggagtttctgctgggcgcagtggctcacgcctgtaatcccagcactttgggaggccaaggcaggtggatcacctgaggtcaggagttcgagaccaacctggccaacatggtgaatgaaaccccgtctctactaaaaatttgcattagccaggtgtgatggcacttgcctgtagtcccagctactagggaggctgaggcargagaattgctagaaactgrgaggcagagggttgcagtgagctgagatcacgccactgcactccagcctgggtgacagtgagactctgtctcaaaaaaaaaagaaaggaaaaatggtgtttcgccatgatgttggccagactggtctcaaactcttgaactcaaacaatttgcctgcctcgacctcccaaagtgctgggattacagaggtgagccaccacccagccatccatgtttccttttttctttctttctttttttgttttttggaagtgcaggccacacagttttgttttgttttgtttttttgagatggcttctcactccctctgtggcctaggctggagtacagtggtgcaatcttggctcactacaacctccaccccctgggttcaagcgattctcctatctcagcctcctgagtagctgggattacaggcgcgtgccaccacgcctggctaattattgtatttttagtagcaatggggtctcaccatgttgaccaagctggtctggaactcctgacctcaagtgagctgcctgcctcggcctcccaaagtgctgggattacagatatgagccaccacgcctggcccataagtatctttcaatgagttatttttattgttgttctgcttagtacagattaacccaacatttgatgactaacagccttctgtcagagtatgctgagatgttgctcgagtgtcccctcatgattttcatgttgtttgtatttatactacatacacagactgttggccactgttgctctcatctttgtatatgatcgatcaacaaggaaatgtctgttggctgggtgtggtagctcacacctgcaatcccagcactttgggaggccgatgagagtggattgcttgaggtcaggagttcgagaccagcctggccaacgtggtgaaacctcatctctactaaaaatacaacaaggccaggcgtggtggctcacgcctataatcccagcactttgggaggccgaggcggttggaaaacttgaggtcaggagttcaataccagcctggtcaacatggtgaaaccctgtctytactaaaaatacaaaaytagccgggcatggtggcacatgcctgtaatcccagctacttgggaggctgaggcaggagaatcacttgaacctggaggcggaggttgttgtgagcggagatcgtgccactgtactccagcctggtcaacaggagcgaaactccatctcgaaaaaaaaaaaaaaaaaattagctggacrtggtggtgcatgcctataatcccagctacttgggagcctgaggcaggagaattgcttaaacctgggagcagaggttgcagtgagccgggagatcatgccactgacagagtaagtgagaagctgtctcagaaaaaaaaaaaaagaaagaatgaaacatctatgtggcctgcacttctttacagactaaatagaaatatagacctaatagcttgctgattggtgattgaggcttttgcctacatttcttgtttcctcttgagttttggtgttataaataaataaatggtgatttaaatgaaagtacattgtattttctgcctctgtgagttctctactggagacagtttgaatgaattgttaggagtaggcgrctttgagtcatgcttccttacatccgtctccagattcatattttggatgctttctttcattttgtgtatttttgtatttcctgccccattagcttcataaatagtcattccatgcatcttgtttgtatgtattgtttttagataaccaactaactggtccttagtttttcatcttttattttttttgagatggagtttcactcttgttgcccagactgaagtgtagtggtgtgatcctgcaacctccgcctcctggattcaagcgattctcctgcctcagcctccygagtggctgggattacaggcatgcaccaccatgcctggctaattttgtatttttagtaggaacggggtttcgccatgttgctcaggctggtctcgaactcctgacttcgggtgatctgcccacctcggcctcccaaagtgttgggattacaggcatgagccaccttccctggccagttttttatattaataatataagagtttagattttattgggtttgtatttaaattagatcaagtttggatttgggaaccagcataactgcaagcctggaaatccttaggagattctatctgttctttgccactgagagaagtactgactattctgaaaataaggcagaatgaggccaggctcatgcgtgtaatccaaacactttgggaggccgaggtgggcrgatcacttgaggtcaggagttcgagaccagcttggccaacatggtgagacccccatctctactaaaaatacaataattagccaggyrtggtggtgcacgcctgtartcccagctactcaggaggctgaggcaggaraatcgcttgaacctgggaggtgggggttgtagtgagccaagattgtgctgctgcactccaacctgagtgacagagcgagactctatcttwtttttttttttttttgatatggagtctcgctctgtcacccaggctggagtgcagtggtgcaatyttggctcgcggcaacctctgcctytcgggttcaagcaattttcctgcctcagcctcctgagtagctgggactacaggcgcgtgccaccacacctggctaattttttgtatttttagtagagacggggtttcaccgtgttagccaggacggtctcgatctcttgacctcatgatctgcccacctcggcctcccaaaatgctgggattacaggcatgaaggcatgagccaccgcgcctggcaactctatgtttaaaaaaaaaaaaaaggagaacgagagtgcttagggaaattgagagcatttggaagaataggaagaatagaagcctgcagtctgtgagtgaaatgtaagggtatttgactaaccatacagggaaaagaaacctttcagagtgattaaatcctgtactcttcattttatttacacatttattttatttttatttttgtttttcttttttatctttacatgacattgaccaggctggtcatgaactcctgaccttgtataagtgtctttttgctgcataaacagagtcataggatagacattgctccaaagaagatatgcaaatggccaataagcaggtgaaaagatgctcagcatcacttgtcattagagaaatgcaaatcaaaactacactcattcatatggctgctatcaagaaggtataatagtaataaatagaaaataacaagtgttgagaaacatggagaagttggagctcttgtgcattgttggtgggactataaaatgatacagccactgtggaaaacaatatagcagttcctcaaaaaattaaaaatagggccgggcgcggtggctcacgcctgtaatcccagcactttgggaggccgaggcgggtggatcacgaggtcaggagatcgagaccatcctggctaacacggtgaaaccccgtctctactaaaaatacaaaaaattagccgggcgtggtagcgggcgcctgtagtcccagctactcgggaggctgaggcaggagaatggcgtgaacccgggaggcggagcttgcagtgascsgagatcgcgccaytgcactccagcctgggcgacmgagcgagactccgtctcaaaaaaaaaaaaaaaaaaaaaaaaaaaaaattaaaaatagaatcctcatatgatccagcaattctacttctaggtttatatccaaaagaattgagagcaggttcttgatgaratatttgtatacccatgttcatagcagcattattcacagtagttataacatggcagcaacccatgtgtccatcagtggatgaatggagaagcaaaatatggtatataaaaacaagggcgtattattcagccttaaaaaggaaggaaatactgatatatgctacaccatgaatggatcatgaggacataatgccaagtgaagtaagctggacacaaaaagacaaatactatatgattccacttacatgatattcttagagtagtcaaacctatcgacagaaagtarattggtggctgccaggggctaggaggaggggaaaatgggggagttattaagtagtgggtatagaatttcagttttacaaggtaaaaatggagatggatggtggtgatggctatacaatgctatggaygtattcaataccactgaactgtacacttagaaatggttaagatggtaaatatgtatattttaccacaataaaaaagtaaaaaaataagtcataggaataaatttttaaaagctattttctacatttttcaattttttctgttttatttcttcatttatactcagtttattaaacactgtttcattgttatttttgtatattggaatgatataattcttactacagttacttgagtaagagaagaaatttttaatgtaactatatcttttctcagcataagaatctctactatcttacgcctgtaatcccagcacattgggaggccaaggtgggcggatcatgaggtcaggagatcgagaccatcctggccaacatggtgaaaccccgtctctactataaatacaaaaattagctgggcgtggtggtgcccgcctgtagtcccagtgactcaggaggctgaggcaggagaaccgcttgaacctgggaggcagaggttgcagtgagccgagattgcaccactgcactccagcctggtgacagagcaagactgtctcagaaaaaaaaaaaaaagactatctactatcccctgtctcttgccctytttagttttcccttctggcactggcattgaaacaaattcatgcagatctgtatgccttaagcagtgaaagtaatttgttcttttgccctgaacacgtcatgctaatcagaacttagtttcctcaataagtatggactaattataccagtgtgcactagagaaaatgcagaatacagcaagcggagccaacatttactctgattaaccaacactccttttgctctgtgtatcaagcaattgtgtgttctttttttttcctgccttttttccctttcactgcagtactttctgctaggttgtgctatgtctcagttgaattactactggaatttgtgtaattgtgtgtgttagataaacatctctctttttctrtatttgataggcaaaatgatgtctttatagtcttgtgggcaatattttacaaatggccttctggctgtgtatcactgctgctccatgccaaaactcctttggcttccttttcttaaactctctgtcctcatggtattattcagtttctttatacattgatcaacaagaagtttggtacctatgcatttctctttkcattattattataacatgtaactttttttctttgagttagagtctcattttgtcacccaggctgtagtgcagtggcacagtcatgttcattgcagcctagaactcctgggctcaagtgatccttccacctcagccatcctaatagctagaactataggcacacaacaccatgccaggctgattttttacaaaaatttttatagagatagagtcttgtgatagtacattagtccattttcacacggctaattaagacacacctgagactgggtgatataaaggaaaagaagtttaatggactcacacctccatgtagctaggaggcctcacaatcatggtggaaggtgaaaagcacatcttacatggtggcagacaagagagaaaatgagaaccaagcgaaaggggtttcctcttataaaaccatcagatcttgtgagacttattcactaccawgagaacagtatgggggaaaccgcccccatgatccaattatctctcgccgggtccctcccacaacacatgggaattatggaagctacaattcaagatgcgatttgggtagggacacagccaaaccatatcagatattgcccaagctagtcttgaactcttggcctcaagtgttcctcctaccttgggattacaggcatgagattacaggtgtgagccaccatgcctggccttgtaatttaacttcagtaacatgttggaataagacaaaaagattgttttggcctggtgtggtggctcatgcttgtaatcccagcacgctgggaggtcgaggtaggtggatgacttgaggtcaggagtgctagaccagcctggccaacatggtaaaaacctgtctctactaaaaatacaaaaactagttgggtttggtggcaggtgcctgtaatcccagctactcggaggctgaggcaggagaattgcttgaatcctggaggtggagcttgctatgagctgagattgcactgctgcactcaagcctgggcaacagggcgagactatgtctcaaaaaaaaaaaaaaaaaaaagattgtttttagaaaataatttgtgtataattcatgataattttatgctatccttgatacatgaagatgcttcacactgtggtaaggaccagcttttagagctctgtcatttgttcccattataggaatgccatctgtaccaagtggtagctattctgtttatactgaatatggcaaaaccatcatcatcacccctcacatatacacacatattcaacactttctgtacttggtatttttcaatttatgctgtttcggagtgtatttgcaacaattttgcaactaacaatttcatggtatagtgtaatttatagcacagtttcatatctgttagttcattttgtgcaacaactttaagagctaggtattattaatattccatttttacagctgagacatgtgatagtattttatgctcatgcttaattatacagccattccatctctttgtatgttttttaaaaatatgagctcatggccgggcacggtggctcacgcctgtaacctcagcactttgggagaccgaggtgggcagatcacctgaggtcaggagttcgagaccagcctggccaacatggcgaaaccacatctctactaaagtacaaaaatcagccaggtgtggtggcgggcgcctgtratcccagctactcaggaggctaaggcagagaattgcttgaacccgggaggtggaggttgcagtgagccaagatcatgcaactgcactccagccttggtgacaagagcaagacgacgtctcaaaaaaaaaaaaaaaaaaaaaaagaccgggtgcaatggctgacgcctgtaatcccagcactttgggaggctgaggcgggcggatcacarggtcaggagatcgagaccatcctggccaacatggtgaaaccccgtctctactaaaaatacaaaaatattagccgggcgtggtggtgggcgcctgtagtcccagctactcgggaggctgaggcagaagaatggcatgaaccccagaggcggagcttgcagtgagccaagatcacgccactggactccagcctgggcgacagagcaagactccgtctcaaaaaaaaaaaaatctgagctcataacaaaatgatccctttcttagcatgtgatttccataaatgctctcctttctttgtcagaataaatttttttgttttttaatttttcttttcttgagatggagtctcactctgtctcccaggctggagtgcagtggcatgatcttggctcactgcaacctctgcctctcgggttaaagtgattctcctgcctcagcctcccgagtagctagggttacaggtgcatgccaccaggcctggctaattttttgtatttttagtagagacaggagtttcaccatgttgaccaggttggtcttgaactcctgaccacaagttttccaaccgccttggcctctcaaagtgctgggattataggcrtgaggcaccgcgcctggtcaaattttttgttatatttttattttctttcctatgtacttcctttcttttctctgcctgtttaccttttcagtctgatcacagagttgttccttatgtttttgaaacatcactaactgcagaataataacgatggtgatattatatattatgtagtgttttcaaactgattttacagctgaaatcttatttttatcttcacaacaggtatctgaggtaagcaagccaagtgtaaatttatttttaatttttttataaaaaatttttagagaataattgagatggggttttgccatgttattcaggctggtcttgaactcctggcttcaagcagtctgtctgccttggactcccaaagtgctgggattagaggcataagccaccatgcccagcctctttgttttttgttgtatttttttkttgttgttgttgtttttcagacaggatctcactctgtcagtcaggttggagtgtggtggctcagtcagctcactgtaacctcaaactcctgggctcaggggatcctcctgcctcagcttcccgagtagctggaactacaggtgcatgccatcatgcctggctaattttttaatttttgtagagatggggtcttgctttgttgcccaggttgatcttgaacatctagcctcaagcgatcctcctgccttggcctcccaaagtgctaggattacaggtgtgagccaccatgcctggcttgtaaatttcttgttttgctggattaaaaacttgcaatcacagtgttaactaaagttatttttggttaaaatcacataactaagtgttagcaacagaaatactcgggcttttgtgctataccaaggccctttccactgccattatgactccactttatgcatactggtataatgtaatgcagacttaacattattttctctcaagatttctttcagactttcatattaccaactacttactcagaattcagtccagagaggcagtttttcttgttgctttgtcacaaacttcctataaaaagtaattatcaacaaggcaggtcaataatttgccaaattttctttactcagcaaaacacatctttgagcagttgtccctgctcgttgttgttttgcttgtttgcccattttgtaatctgtgtaaggactctatcgatgtattatgtatctatgtattagtttcccaggcctgctgtaacaaatgaaagggcgttgaacttcattagttgtcagagaaatgcaaattaagacaaaaatgagaaatgacaagctgggtggcttaaaacaacagaaatttatgctttcatagttcaggaggccagaatccaaaattaagtggttgcagaattggttccttcttagcgactcagaagggaaatctgttccaggtctctctcccggcttctgatggttgccagcaatccttggcgttccttggcttgaagctgtgtgattttgatctctgcctccgtcttcacgtggctgccttccttcctgtctgtcttcacatggcattctcccttccctgtgtgtctgtctctgtgtctcctctgctctttaaggacagcagtcacattgtgttcagggcccactctactccagcatgacgtcatcttaacttaggccttaattacatctgcaaaacccctatttccaaagaaggtcccgtcccgttcacaggtaccagaagttaggacttcaacatatcttttaagggggacacaattcaacccattaaaatatatgttctttttcctttgtctctacttctattcttgtgatatgtttacccatgtgcttcccacaagtgtctgttgaattgatcttgtttatggatttccagtctgcccacataatttatatatacagtcgtgttgcttaacaacagggatatgttctgagaaatgtgtcatgaggcaattttattgtgcaaatatcatagagtgtacttacacaaactagatggtataggcttcctacatacctaggcttcacggtatagcctgttgctcctgggctgcaawcctgtacagcatggtactgtactgaatactgttagcaattatacaatgttaagtacttgtatatccaaacatatctaaacatagaaatggtgcagtaaaaacacaatgtaagagattaaaaaatggttccaagcacaactgcatctttaaaaaaaataaataggccaggcgcagtggctcacgcctgtaatcccagcactttgggaggccgaggcaggcggatcacgaggtcaggagatcgagaccatcctggctaacagtgaaaccccgtatctacyaaaaatacaaaaaattagccgggcgcggtggcaggcacctgtagtcccagctactcatgaggctgaggcaggagaatggtgtgaacccgggagtcagagtttgcagtgagctgagatcatgccactgcactccagcctgggagatagagcgagactccgtctcaaaaaaaaataaataaataaataaaataaaataaaataaaaaatggtatacctatcagggcacttaccatgaatggagcctgcaggactggaagttgctttgggtgagtcagtgagcaagtggtgagtgaatgtgaaggcctaggacatgaccatacacttctgtagattttagaaacactgtacactgaggctacactaaattgatttaaaaattttttctttgttcttgggaatatagaaatatacttaacctttatatgtgttgaccttttatccagaaactttgctaaacccactggttaattctgataattacatatagattcttttgaaatttctatggaaatgttcatgttatgtacaaataataacagcttatatctttgttttctttttttctttattcaatacagtatcagaggttctggtgatagcagtcattcacaatctcaaggggaaagatatcaacatttcactgaaaagtatgatttttgctatagttttaaaatacatatcctttataaaattaatgaagctccctttctgttcctagtttgctgagttggtttctttttcttaattgtgagccaatgttaaattttaccaaatgtgagttgtgcatctgttgagcaattgtagtatgatttttgtccttcattctacttgtgtgataaattacagtgattgattttcaaatatcaaaccaactttacattcctaaaataagtccaattttgtcatgtcctttttatatattgccgaattggacttgctaacatttggcttagtatatttgtatctatactcattagtgagaatggcctgtaattttgctttcttataatatccctgttagggtttggtatcaaaattatgttggcatcataaaatgagctgaggaatgttccttcttctctattctgtaagagtttatgtaagattgcctctttttcttttgtcttctttagatgttttttataaatttgacagtgaaaccacctgggtgtggagttttcattgtgggtaggctttcaattaggctgtcaatgttttagtagatctagaactcttcaaaatttctttgtgtatcaggtttagcaaaaagtgtttttctcagtgtttgtctattttacttaaatgttcacgttgatggcattaagttatttataatattccttttgtgatctttttgttttcagcagtgatactcctttttttcattcttgatattagttattctctgttgttgttttttttcccccgtgggtcattcttgccagggttttattagtctttttaaagaactaactttattttgttgactttgttgtgtttcttatttaattaatttcatctatgtaaatttattgccctctattttctttgggtttaattggctgctcttattggctgttcatttcctaacctctttttaaatgtatgtgtttaaaggccagccatttctctctaagcatagaattatctgtatctataarctttaattttcattgtgaatcagttcagaatgttttctacttttcattatgatgttttttgacccgtgaattatttacatggatatttcttaatttccaaacatgggatttttttgtttgtttgttttttgagatggagttccactctgtcgcccaggctagaatgcagtggcacgatcttggctcactgcaacctccgcctcctgggttcaagtgattttcctgcctcagcctcccaagtagctggggttacaggcacccaccaccatgcccagctaatttttgtatttttagtagagacgggatttcactatgttggccagtctggtcttgaactcctgaccccaggtgatctgcccacctcagcctcccaaagtgctgagattacaggtatgagccactgcacccacctgagaatttttttagtaatattttggctattgatttctcacttacttgcagtgtggtcagaaggtatactgtaattttaattatttgtgacatctagggacttggtttatatctagcatagaattagtatttatttacttatttatttgagatggagtatgagaattagtattaattaattaatttatttatttgaaccacggcacccgtctagaattggtctttatgattgctccatgggtatgtgaataaaaaagacatattctgcagtttgtagatgtgtggttctctatatttcagttaggtcaactttattaatggggattttaaaaatcctactatcgttagtcttttttttatgattcttttgttagttactgagggatatgttctaaaatttccccttatgattgtggatttgtctgtttcttcatttagttttatccgtttttatttatatattttgaggctatgttattaggtgcatatgatttttagaaatatattgaattggctgggcgcggtggctcacgcctgtaatcccagcactttgggaggccaaggcagggggatcacctgagtctggagttcaagatcagcctggccaatatggtgaaaccccgtctctactaaaaatacaagacttagctgggcatggtggtgcatgtctgtaatcccagctacttgggaggctgaggcaggaaaatcacttgaacctgggagatggaggttgcagtaagccgagatcccgccattgcacttcagcctgggtgataagagtgaaactctgtctcaaaaaaaaaaaaaaaagataaaagggatatattgacctgaacactttgtcactagggaatattcttctcatctatgttgattttttttttgagggggacttaaagtcagtgtcgcctgataatagcgtagctacacttcttcccttytggttgatgtttcaagatatgtattttccatactttgacttacaaccttttcaatcttttactcatgtatcagttttttttcttaaatccaatctgatggacttcatcattaaattttattacttagttcattaaaatatattgtagctactgacatattgtgttttaattttactgttacactctttgccttccatttgtcctgtcttttctatattcattcttttttttttttttttcctcctttgagattgattctcactctgtcacctaggctagagtgcagtggtgcgatcttggctcactgcaaccttcacttcctgagtggctgggattacaggtgtgtgccaccatgcctatctaatttttgtatttttaatagagatgctgttttgccrtgttggccaggctggtctcgaacacccaatccaagtgatccgcccacctcagcctcccaaagtgctgggattacaggcgtgagctactgcgctgggcctaatcttgcccttttytggggggggtggggggttataattaaaaccattctattatttgacttcattagtacttacacagtgttttacattttttttttttttttttttgagacggagtctcactctgacaccaggctggaatgcagtggtgcgatctggactcactgcaacctcctactccctggttcaagtgattctcttgcctcagcctcccaagtagctgggattacaggcacgcgccaccatgcccagctaatttttgtatgtttagtagagacagggtttcaccatgttggccaggctgttcttgatctcctgacctcatgatccacccatctcagcctcccaaagtgctgagattacaggcgtgagccacctcacccggcctttktttgtttgtttgtttgtttgttttgcaattttggctcrctgcaacccccgcctcccagattcaagcgattctcctgcctcagcctcctgagtagctgggattacaggcgtgtgccaccacacccagctaatttttgtatttttagtagagatggggtttcattcaccatgttggtcaggctggtctcgaactcctttgaccttgtgatccacccaccttggcctcccaaagtgctgagattacaggcatgagccactgcgcccagcctgcttttcttttttttttttttttaattttaatatagagactaggctgggcacagtggcccatgcctgtaaatctagcactttgggaggctgaggcaggaggattacttgagtccatgagtttgagaccaacctgggcaacatggggagaccatgtctctacaaaaaaatacaaaaaattagccgagcatggtggtgtgcctggagacccagctactcaagaggttgagataggaggatggcttgagcctgggaagcrgaggttgcagtgagccatgatcacgccactgcacaccagcctgggcaacatagcgagaccctgtctccaaaaaaaaaaaatctagagattaaggcatgctttcctgacttaaaatttagtataaattattatttttgtcactttcagaataatgcaaggacctcagcaaactttaactccatttattcccctttcaattaatagactaacattttttccattcttctgtaaaacacatacatatcttcattttataatgtcaatatttgcttatatttacccatgcatctcctttacccttgctctatatttttttcctatatctctaagtttctttttttgattattttccttttgcttaaaggacactcttccttttgttctgctggtgrtgaattccatatatatttttttcttttcttttcttttcttcgtttcatttctttcattttgagctgggtcttgctctgttgcctccagtggtgtgcagtgacactgttatagctcactgctacctcaaacccctgtgctcaagcagtcctcccacatcagtctcctgagtagctgggaccacaggtatgtgccaccatgcctggctagcttttgtatttttttgtagagtcagcgtttcactgtgttgcccaggctgatctctaacttctggactcaagtgatctgcccttctcagcctccaaagtgttgggattacaggcgtgagccactgggcccagccttgaacaatatttttttaagtttaggttttatattactttgtccaaaactattaccataatccatttcaattcataagactgaaataaatacttgaggtatttgaagttctattgaaggtttagttgaagagcaagaataaatgtaacatgggtttagcccttaaggacttttttttttttgagacggagtctcgctgtatcgcccaggctggagtgcagtcgcgcgatctctgctcattacaagctccgcctcctgggttcatgccattttcctgcctcagcctccagagtggctgggactacaggtgcccgccaccacgcccagctaattttttgtatttttagtagagacagggtttcatcgtgttagccacgatggtctcgatctcctgacctcatgatctgcctgccttggcctcccaaagtgctgggattacaggcgtgagccaccgtgcctggccaaggactttataatctggtatgacatgaggcacaggtttctgtaatattagagtagaatgtgataagtagcagctacaaggaaggatggtatatttatgaaatacttgaataggaacactgagaaagtcatgaaactcaaactatttgtcttttgcaacctagctgtattagtccattttcatgctactcataaagacatacctgagactgggaagaaaaagaggtttaattggacttataggtccacatggctgggaaggcctcagaatcatgataggaggcgaaaggtgcttcttacatggcagtggcaagagaaaatgaggaggaagcaaaagcggacacccctgataaaaccatcagatcttgtgagacttactcactatcatgagaataacatgggaaagatggccccatgattcaattacctccccgtggttccctcccacaacacatgggaattctgggatttacaattcaagttgagatttgggtgggccaaaccatatcactagcatactgaaagatttaaaaatatatatgatgatctttttggttatatattcagaatacctggctgtttgcaagacagttggaactactttgaagaaatatgccactctgaagatgtctgctgagaattatctccacaaacaatgctgttgctaggattacatattaatgccatctttatgtggccatatgtctttatcagtttcctttcactatctgccatggcttttttttttttttttcatactaagccttctaaatctggcatattttacacttatacctcacatttatagcacatctcaattcaragtagccatgtttcaagtgccaaatagtgacaaaaggctaatgactacacttttggacagtgtgtgtctaratggtgagatagacttttcaaaaaacaaataattgttatatttgttcaactctttgtgaagtaactgaaraagcccctactgacttgatcagaagtaggtgccagggaaagatttagattttcaaggaaagttttacagaaaagttgtcgtttgaatgctgtcttcaactatgaatataaatttggtaggtgtacaaaataggccaggggaatagcgtgtaaatcatgatgctgtataagagtaggatttgttcagaggctttcaagtatttccttgtggtcggagaataggtacgtgtgtgctagtggaaggtgagactggaaagatagattttgaagaatgtcaratgctagtgattcttcaccagttcttgtgttatgagtaatttaccagtaatgacagttaacctcaggataaattttctgcagtgtaattgatagatctcatagaatgaccatttaatgtcccctcatacattcagggaaacttatgggtttgaactaatttacactgcctctagcaactatgctggtttcagtgcatgttcaactgctataattagtgtagttttaatgtgctcattttgctgcattaggtttgtattttgttactgtattttactrtgtttgtattttgttcaccaattcatcattggtggttgaacatttttcttattaacattgaaatttactcctgtctagtccttagaccccattcaggccttaccagttgtctcaataacatcctttacagcagaaggatccaggggagaatcaggcattatacctcagttttcccttgtctttgaaggaaagtacttgacatttttgaagattacaggttggtyattttgtagaatgtcccccaacttggttttgtctgtttcctcatgattagactcaggctacagaactttgacaggaacagtacttctcatcgcatgggactttgatttgtctgattactaatgatgttcactttgatcatttgatcaaggcagtgtctgctggattttactgctgtgaaattactttttcccttggaagtaatgtgtagtttatgggggaagtattctgaaactatcccattcactaccacactttccatttattcactcatttatttatatctatattgattcatgatttcttattttgttcagtaggttataatccattgctattactattggtattgatgctgaaattaccctgtttggccagtgggatctccttcaagcttgatcctatgtctttttgacattctttagcattccttgagcactttcttgcttactaccacaagatattccagattgatcctgtactttttctacccstgtgctgtaattagtgaattacaattctccagagatgtctggttccttttattggagaatggtattaggggccaagtgttaggtgctagaaacgttcataccactggggagggaagatgatcactgctccaaggcgctctcagtagatagaattacagagctagggagtatgcatctgtgtgtgcttatgtagacacacacaccatgcatgtatgtccatgtcttcagaaatccatgagttcactcatacttacagtttattttttttgaaacgcagtctcgttctgtcgcccaggctgaagtacagtggcatgatctcagctcacctcaacctccgcctcccgggttcacgtgattctcctgcctcagccttcctagtagctggggactgcaggcacaccccaccatgctgggctaatttttgtattttttggtggagatgggtttcaccatgttgcccaggctggtctcaaactcctgacctcaaatgatccacccaccttggcctcccagagtgctgggattacaggcatgagccactgtacctggcccagtttcaatccacagagttcattctaacttyttccatttccatatttgcatctcccttctctgccaagtgagaactctgggtcccattgcctttaataaatcttttttaaaaaagaatttttttttttttaaagaaatggggtctcattctgtcactcakgctgaagtgcagtggagggatcatagctctctgcacccttgaactgctggcctcagtcgactctcctgcctcagcctcctgagtatctgaggtagctgagtaggcacctgccaccacatctggctaatttttacattttttgtagagacaagatctcactgtattgcccaggcaggtctcaaactcctagcctcaagtgatcctcctgcttctgcctcccaaagtgctgggattacaggcrtgagccactgcatctgcccttaatagatcttatttgatccttccctctttatatagcaaatctcccattgctgctttgaacccttctatgtggaggtgctcaggctcctactttccctgccagtcctccaccctcatgggtgccctcctcctcctccacactcggccttcaacatcctgtgcaagctggctctgcctgcgaatggcctcctcacgtagcttatattccracaaccatgcaggtaccctgtgatgtggatacccacttggtggctataagagtgaatttttcaggaagggaagagaattctgatttcctaagttttactttaatggttctagctgtgggattattttgacattctttgagtcctttcaattttaggtgttacattttctctaattctgggaaatttagtcattatttctgcaaatatttcttcactctcatttgtgtttttctctcctcctgtgtaagctattgtgtggcagttgatttccctcatttctctatcttatctcttgctttttcttttatatatttaatctctttctactgtcttttggcagagtaccccaaatctgatattttagcttatttatttgttcaactgtatcctttctgttcttcagtccatctattaaaattcattatttcaccaattgtatcacattatttcagtgactatattttgtctgcctatttttacatcctacaccaggaccaaattttcctgttgttccaggaatttctgtctgtgtgtaaacacaaatcagtttttaaaatttaggtttgtattgtacatactgtctgacaacttactgttgttttctgtttttacatggcagstttatgaaatttattacaagtggagatagtttcaatatagttttaatatacgtctgtgtgtgtacgtgtgtgtgtatgtatatgtgtgtgtgtgattttatatcccttttatactgaagtgtactcataccattgcctcaccttcttaaacagagttgtaagttagtgattgggtagagtgcagtggtcagtattcctaaccattttagtctttggggcctttaggttgttttcaatttttaaatgttatgatactaaaataaatacacggataaagtgttttcccatttgtgggatcattttccagaaggatttatagagtggatcaaatggacaaataaatcaatatttttagattgttaaccatgtagaggaatgcctagaacataacaggcattcaaataatatttattagaggaaaggatattataaaaattgctttctaatatggttccaattttcatccataccaatgataggagatgatctattttctttctttttttctttgttttttgagatggtgtctcgctctgtcacccaggctggagtgcaatggcacgtctcggctcactgcaacctccgcctccctgggtcaagcaattctgcttcctcagcctcctgagtagctgggactacaggtgcccaccaccacgcccggctaatttttgtatttttagtagagacaagctttctccatgttggccaggctggtsttgaactcctgacctcaggtgatccrtccacctcggcctcccaaagtgctgggattacaggtgtaagccactgcgcccgactgagatgatctgttttcttacagtatcttacacttaaattatatttttgtgatttgattgtaatcagaagaattctatatctgtcttggataaaaaatactatcagatgatataactaaggtttttttctatttttatttttacctcctgcatgaatgaacatatrttttcttacaggactgaatttrctcttaaagaaatcatgtcctctggaggtgctgaagatgatatcccacagggagagaggaaaacagttacagatttttgttatcttctggataaatctaagcaactgttcaatgggttaaggtgagtggactcttggtgttttgaacttttctttagttctgcatttgttttttttctggctgatgtgtggtaagtttccgaaaattatgggtagaatgtcatataaatttctgtattagagtgatcatgattttttctttgacatcatttttaaaattcttggataaaaaaacaataggaaaagaggataacttacactgttttagtcaacttaaaaagagctattttgtgaaatggttttgtatacataactcacaccagatctgattttaatctggttttgcacattagggtgttgaggtctgaggagcctaaaaatgcatatgcaattgaatgtggagcctcctattgcatttttgtaatttgtttacttgcttgtttcttttattctttctttctttgttttctgggatgaaatgtctgtgcctaaagtaatgatggttacctttgtctaccagattggggtggtgatggtggggggtgggtggaaaaagtaatgatgaggtgttataaaccatgctatttatgatttaacctgtatttcagttcttgagagtcttaggatattcactgacttcagacctaaagcttcattagcttagtaccagttasaagaaaattcatacaataggtaaaattctagggataaacaggttttatttttgaaaatttacataggaaggagtgattgtaaagatactaagttattttaaattatggtttatttatggataaaaatgaaatctttttatcttacattttacaattgtattatacatccccaggtttggacgtatactggcagggtttatttttaaaccagataatttatcttttaaaaaaattatgtgaatttttcaaataccattctgtctaaagctgcccttttaatcattctctttttcctatattcatttgatttgcttcatgacactcaccactcttaatattatttacttgcttattatgtctctcccgcattaaaatgaaatgtccctaagagcaggcccctgtttgtcactgtttctctagtttttaagcccatgtcttgcacattgtaaaggctttgtgaatatttgttaaatggaagattccaaaggcagtattcttaactcttgcactcttctgcttcctattttatgctgcagaggagatgtttgagatcatgtttttctttggctttataaattaattgtgtctttttaaagaatattttctttcactattttaattcagaagttttccttggtatgcctggggtttaaatcttttattttcctgcaatagattattttaaacctcttaaatttgcatacttagactttttttttttctctttgccttccaggtatattttttttcttcaacatttaattggcacccagtatgtaccatattctgtattgggtacgaaaattcagagataaagctaacagtccctgccctcaattactctatgaggaaattataaaaaaacaaaacccaaggcaaacttctgctcacagcaagcctcagctttagcacatccagtgaacctatttcacagataggaacacatatctgtgtgcctattgaaattaagtaagtaaaaagttagaagaggccaggcgcagtggctcacgcccataatcccagcacttcgggaggctgaggtgggaggatcacttgagcccaggagtttgagatcagcctgggcaacatggtgaaacctcgtctctacaaaacatgaaaaaattagctggatatggtggtgagtgcctcaagtcacagctgctcgggagactgaggtgagaggattgctcaagcccaggagatcgaggcttcagtgaactgtgatcacaccactgcactccagcctgggtgacagagcaagacccttaaccaaaaaataaaaacaaaatcttaaagggattatagatttaaaggtaggaaggcatttaaaagcttgcatttaaatcccttgtgtaacttctggcacatgggctctcaaacttaaaacactgacatrgttataatagctcggaccccatttttttgagacagttttatggagctatatttatatacaataaaatttgcccattcaaagtttacagttgaaaagtttggtatgtttgcagagttgtgcagctgttagtacggtttaattttagatcattttaatcacccccaaaagaaatccggttcctattagcagtgattctacattcttccaaatcctaacccctgacaaccaccaatctaatttttttctctatggatttacctattttggatattttatatattaattaattggaatcatacaatatgtggtcttctatcatggacatcttttgttaacataatgtttttgaggttcatctgtgttatagcacatatcactacttttattagtgattaatattccattgtaaggatttatcacaatttgtccagtcatcagttgatagacatttgagttttttggctatcaagaataatagtcctgtgaacatttgtatacaagtttttatgtgagcgtaggttttccytttttttgagacagagtgttgctcttgtcrtccgggctggagtgcaatgacacgattttggcttactgcaacctccgcctcctgggttcaagcaattttcctgcctcagcctcccgartagctgaaattacaggtgcctaacaccacgcccaagtaatttttgtatttttggtagagacaggtttcactatgttgrccaggctggtcttgaactcctgacctcaggtgatccacctgcttcggcstcccaaagtgctgggattacgattctcttggccatataccaaggagtagaattcctgggtcatatagtaattctgtgtttaaccttttgaggacctgccaaactgttttccaaagtggcctcatcaccagtaatgtgttctagtttctcctcattctcatcaacacttactattttctgtctttttgattatagacatgctactggatgtaaatggtgtctcttggtggttttgatttgaatttccctaatgttgggcatctttttatgtgcttgttagcgatttctgtttcttctttgggaaagtatctgttctaattctttgaccagttaaaaaattgaattatttttaaaattattaatttataattgtttatatattctggatacaagtcccttgtaagatgtatgatttgcaaatatatattctcttattctgtggattgtcttttactttctttctttcttttttttgagatgaagttttgctcttgtcccccaggctggagtgtgatggtgcgatcttgctcactgcaacctccgcctcctgggttcaagtgattctcctgcytccaagcgattctcctgcctccaagcgattctcctgcctcggcacccaccgcccccctaccccgagtagctgggattacaggtgcctgtcaccatgcccggctaatttttgtatttttagtagaaacgggatttcaccatgttggccaggctggtctagaactcctgacctcaggtgatccacccgcctcgacctcccaaagtgctgggattacaggcgtgagccaccgcaaaccggcatgtcttttactttcttaatgatatcctttgaagcacaaatgtttttaattttaataaagttaaacttatcattcttttctttcattgcttgtacttttggtattgtatctaagaaatcattgcctaacttaaggtcattaaaatgtactcccgtgtttttttctaagagttttatacttttagctcttacatttaggtctgtgatccattttgagttctttttattttaattaatttttttgagatggagccttgctttgtcacccaggctggagtgcagtggcatgatctcggctcagtgcagcctctgcctcccgggttcaagcagttctcctgcctcagcctccctagtagttggtgccaccacactgtatttgttttagtagaaacgggatttcaccatgttggccaggctggtcttgaactcctaacctcaagtgatccgcctgccttggcctcccaaagttctgggattacaggcatgagccaccattcccagcccattttgagttaatttttgtgtatggagtggaatgttagttttatgttattttttaaatcagaaaaacatttccaattgttttgattattgcatatttttcattttttctttttaaacattgatacataataattttacatatgtatggggtacatgtgatattttgatacatacataccattgtaatgatcacattatggatttgggatatccatcacttcaaacatttatcatttatttgtgttgggaacattttaaatctgctctttgagctattttgaaatataaatcttatatcccaggtatagagtcgtatctttctaaggtgctgttttaaaattttacaatactaataatgataaattttgatctgtcacctggaagagtggataagcaaatataccacagatatattttcagtgttttattgagtgaccctcttcaatttaaataagatataattggctgggcatggtagctcacgcctgtaatcccagcactttgggaggctgaggcaggcagatcacctgaggtcaggagttcgagaccagcctggccaacatggtgraaccccatctctactaaaaatacaaaaattagccaggcgtggtggcacacacctgtaatctcagctactcgggaggctgagacaggagaatcgcttgaagctgggaggcggatgttgcagtgagctgcgatcacaccactgcactccagcctgggtgacagagcaagactctgtctctaagtaaataaataaataaataagccataattatttatacaaaaataggtctgtggtgagcaaactatatatcttctctgaatgcttttggatttttgtttgagagagatgtggttgtccagtatagcagccgtattgttttcttttttttgtttatataaatgaaagtatctccaggagcagtggctgatacctgtaatcccagcactttgggaggcgaaggcaggagaatcacttgaagccaagagctctagaccagcctggcgacataggaagactccatctaccaaaaatttaaaaattagctgggtgtggtggtgtgtgcctttagtcccagcaacttgggaggctgaggtgggagggtcacttgaacccgggggtttgaagctgcaatgagctatgttatgccactgtactccagcctgggcaatgcagtgagaccttgtcccttttataaaaagaaaagagaaaaaagtgttctttgttcaatattagaccttgattataaagggctgtctttatcagttttgtaggccktccttaaagttccctgtggtggtgggttggaggtgtgtattggcattcttgtctacactactctccctgtttcctgcgtaaagaagatctttgagttttgttaatcagaaacctcttttctttcgagtgttgatgttgctttatgagcatttcttgagaaagggacaagatttattttggaataattataaggtttttttggttgctatccccctgcgcccacctccacccccttatttaaattggtctgagtaggtctatggcccttatagagaagaagaaatgtattggtagtggtctggaccagcattggcatttggggaaatggaatgaagtgggatccagctggaatagtgtcagtttttaatattaagccctttccctctagcatttttttcactgttagtgcttgtctttttttttttctccttttccacatgttgtaacatgtttttctttttgcttgctttcttcaattcatgtactgtgtcttaaacttattactgaagtataattgactgcggaaaagtgcacatgctgtaagtgtgtttttaagaaactgaatacatccatgtgacttgtattcagatgaagaagtagcacacacagcacctcagaaacctcccctgttgtgttccctgttacttggactttttaactcattatgagcagagtgaaaaagggcatttcagtgcatgaaaggtttcagatttttgtatcatgtctcatttgggatataatagattctctttttacgcttggaggtgtgtctttccacattatattaagctgttcatctaagttgtcagagcctttcattttcccagctgtgaatatcttaatggagtatttttctcaactgaaaataccttcttataatatgtgcataatagtttatctcttatttccactcactgtgtaagaaaacataatccagaaaaataagaattggatgaaatgaatgatgtttcgcatataatggctcttgcatgtagttgcaataataatgaagtgagaataatgttagaaaaagctttgaatactgtcagaaaatgrtcaaaagcccaagtgcttgcagggttctggttgccatggtgactaagactgtcgaagcagaatggaatacttagtgagattatataaggcagcatctcgagacatgtatttgagaaacacagctgtgtctatcagtgatatccctaacttgcagtgttttgcaaaagcagaggcctccaagtcactaattatttgactacagaggagcaaatacacaaagccaaagaaggcttgggaggccactgatagtatatataatattattattatagtacatataatagtatatattgtgtgagtgtgtgtgtatatgtatatttttaattgggaggtgccccaaagtgaagtgtactagtcttaaatgaaaataattacagaaattatttttattaaatatgctcctagccaggtgcggtggctcacgcctgtaatcccagcactttgggaggctgaggcaggcagatcacctgaggtcaggagtttgagaccagtctgaccaacatggagaaaccccatctctactaaaaatacaaaattagccgggcgtggtgtcacatgcctgtaatcccagctacttgggaggctgaggaaggagaatcgcttgaacctgggaggcggatgttgtggtgagccgagatcacgccattgcctccagcctgggcaacaagagcgaaactccatctccaaaaataaaataaaaataaaattaaataaataaataaataaatatgctcccagtattcaacttaagaaagtttctataatgcttcctttagaagcctgtttttaggattccctttttcctaaaatggacaactgagaaattaacagtttgttccattgaccccttcttcccctcccctgcccttttcttcttcttcttctcttttcttctttcctccctcttctccttctccttcttcagaaaattaatattctcttagaggctagttctgcaaactggtaatggcaagtttattgttattgaaataaataaccatgttattttagagattataccctaaactgtctgtacaagcttgtgatataggctgtcattttatatggcttaccaccagaagaattggacttgcctttgaggtagactgccaccagagtacagtaggtatcttgatcacatgctcttgaacatcattgattgactaggctgggcatagtggctcttgcctgtaatcccagcactttgggaggctgaggtgtgtggatcacttgaggttaggaatttgagcccagcctgaccaacatggtgaaaccccatctctactaaaaatacaaaattagytgggcatggtgrcacatgcctgtagtcccagctacttgagagtctgaggcaggagaattgcttgaacctgagcagcagaggttgcagtgagccgagatcacgccattgcattccagcctgggcaacaagagtgaaattccatctcaaaaaaaaacaaaagaaaagaaaatcaatgactaatagaaatttaatataagccacaaatgttattttaaattttctagccacattaaaaaataaaaagaaacaagtgaaattaattttaataatatttgatccaataaataaaaaatattctacttcatcataaatcgatagagaaatattagtgatattttacattgttttttatactaagtctttgaaacacagtgagtattttatacttacatacatttcagttcagattaactacattcaagtgcttagtagccatgtgtggctgtttgctcaggcaaaattcctcccagttttagtttctkttctcataatggctgactgtgctttctcgtgaatccatattggctattttggggttgtcttcttcactggtccatgaggtgttcccagttttgctttctttgtctcctccaacatagatgctaatagcttgcaggtcttttggctgttggtaatttgtctccaaccacctgggatttgatggttaccatattactgtatcagtttgctatggctrccataacaaggtgccatagactgagtagcttaaacaacagaaatgcattttctcacagytctggaggccggaagtccaagatcaaggtgtcagcaggttcagtttgttctgagccctctctccttggattgcagatggatgcctccttcctgtgccctcacatggtcatctttgcatgcatttgtgccctggcgcctctttgtatgtcctaatgtcttcttctaaggacgcaactcatattgtattaaaaccttccctaaaggcttctttttaattacctctttaaaggccctatctccagatacagtgaaattctgagatactgggagttagaggttgaatgtacgagttttgggaataacaattcagcccataacccttggttttattgaaatgttaccagtgggttttgctttattatctgtttgttctgcctgtgttgggaaggtatctgaatagattcaatactatgctgtcaccatttccccagaatctagaaaattagctatttaaatgctatgctaaaatattaaacaataaaatagatgaatatattctattataatataatatattctatcaaagtccatataaccaggtcttatatgttagctccctctaagatcttgtcaggtcttactagaaacatagagcatcttcccctttaaagttgctggtagaagctggatcgggaattggttaggggagaggtagttgtagttagtttttttttttttttwaatttcagtagttttttggggaacaggtgtgtttggttacatgaataagttctttagtagtgatttatgagattttgatgcacccatcacccaagcaatatacactgtacccaatgtgtagtcttgttcctcacgcccctcctaccctatcgtgagagtcccaaaagtccatgtgtcattcttatgtctttgtatcctcatactttagcttccacctatgactgagaacacatgatgtttggttttccattcgtgagttacttaacttagaataatggtctccaattccttccaggttgctgcaaatgccattatttcattccttttatggcctatctcatatatatatacacacacacacatatatatatgtgtgtgtgtgtgtgtatatatatatgagataggccataaaaggaatgaaatatatatatgtrtgtgtrtatatatgtrtatatatrtgtatatatatgtgtgtgtgcatatatatatatatatatatatatatatctcacaatttctttatycacttgttgattgatggrcacttgggctggttccatatttttgcaattgcaaattgtgccattataaccatgtgtgtgcaggtatcttttttatataaatgacttcttttcctctgggtagatacccagtagtgggattgctggatcaaatggtagttttacttttagtcatttaaggaatctccacactgttttccatagtggttgtactagtttacattcccaccagcagtgtaaaagtgttcacttttaaccacattcaatagtggttagtttttaagattcttcaggaggggtatagagagaaaattaaaaagatatgttaagaaccctgaagaattcattaaatcctcaaaacaatgtcattagtgtctattattttggttctacagatgagaaaaacaaagctttgccagttaaagtcatagcctatgttaatgtgatagattataatttgagaagtgctacttccgagaagtttttcctcaatttaggagtaaggattccaaacacagacgaatgtttgactctaagaatagaggcaggccaggcacagcgactcatgcctgtaattccagcactttgggaggccaaggccagaggattscctgagctcaggaatttaagaccagcctgggcaacaaagtgagaccccgtctacaaaataaaaaatatagctgggtgtggtagtgcatgcctgtagtccagctgctcaagaggttgaggtgagaggattgcttgaagccaggagttcaagaccagcctgagcaacacagtgagacctcatctctatagaaaattttaaaaattagctggccagatgcagtggctcatgcctataatcccagcactttgggaggctgaggtaggcagatcacttgaggccaggagtttgagatcatcctggccaacatggcgaaaccccatctctactaaaaacacaaaaattagccaggcatggtggtgcatgtctaaaaatgtcacaggatccttagggtgttatttttccagccagaaacctctgtggctagtggcacctttgcccgagttttgcttgggctcactgggcttgttcccgctactcagcctggcaggttgtgcttgacttatgctactggctcagatcccacacctgccaagggtaggccaggtatggagcagcgaggggtgtgttagcgaatgggcatggggtctggccactgtgcacagccaagcaagctagctgccgtggtggggcaggcatctccaggcactggygccatgcaaggttgcagctggattagatgtgcctcaagcagcttccactgcaggcacccacatctggacgaggggaacatggtggtggtgcccagaagcttggagatgccaggaaccacaagccccaaagaggatgtcacaaccctggctcagggagcccataggtctgaactcccaaagggcctcagctctttccttctcattgcctacaacgtggcgagcaagggggcatgtttcagccctgtttgtgttaccattttttgagtaccagaatttgccaggtcctgagttcttgtcctgcgcccaggaagaatgaggtatgtggacaactggagggtgaacaaggtggagaggagcttcattcagtgacagaagagctctcaggagacccctagtaggtagctcctttctgcaagcaggttgtccaggcaagtgtccagctcttagcagagaggagacctgtagtagttgctccttcctgcaggtggatcatcccagcaagtgtccagctctcagcagaaaggagtgggtagctcctttctgtaggcatgtcatcccacagagggtatgagtctggctgtctggggttattttgtgctctgaatggtggaagtgtgtgctgattggtccatgggaggccacggatgggcctggaaaaagcacctcgagttctcactctgggccatggacttcaaccagaactggcagccttatccccccaggcccgcctccyatgctcgtcattacccaaagtctggagagggctgaggcagcagggggcttgtgaatcagtgccgtcatgagcacacccagtcagttgtgacaggtcccaggcttggccacaactttgctccaccccagagtgggtgccaggagctgggagaggccagggagcaggagcaggtactttcaagcatgtgggggcagggagcttcttaagaccctgagaacacagggaagcatgggtccaaagctgcagctgggtagctgcagctgcayccaggagcgctgggctcccasccctccaactcagtaggtggcccggcttccacctgttcctggcctccacccattctgtggagcatgcagccctggccacaacttccccactgcagtcggcatccctgcagcagctgctccagatgggctgccaccaccatcataatcccagctacttgagaggctaaggcgtgagaatcgcttgaacctgggagggagaggttgcrgtgagtggagatcgcaccactgtactccagcttggacaacagagtgagaccctgtctcaaacaaaaatattagctgagtgtggtgccatgcacctgtagtcccagctactcaggaggctgaggcaggagaattgcttgagcccaggagtttgaggctgcagtgagctatgatcatgtcattgcacaccggcctggaggaatagagtgagaccatgtctttaaaaacaaagaacaacaaaaaaccactgggtctaccaatgggtaaaagcaaatactggtgctaaacaaggaaatgctcaactgggctttgaagtctcaaatgcagtttggtctcgtatacacatgaacacagaaacatggtttggaacaaagatgtcccagtaatatagtcctctgtgtttaaacaagaatatgtgagtcggacagtgtgctctttgactgaaaacctgattcagagaagttggcttattcctttgcctttgaccacagctttgttggaggtcagcagcatcctaagagccagggagcaggccaggcacagtggctcacgcctgtaatyccagcactttgggaagccagggcaggtggatcacttgacgtcaggagttcaagaccagcctggccaacatggcgaaacctcatctctactaaaaatacaaagcaattagccaggcatggtggcaaatgcccataatcccagctactcaggaagytgaggcatgagaatcgcttgaacctgggaggtggaggttgcagtgagccaagatcatgccactgcactccagcctgggtgaagtgagactctgtcaaaaaaaaaaaaaaaaaaaaaaaaaaaaaagccagggagcagaatgtggtcccagaaaagaactaacaactttacttgcgtacaaaatctaggtggttattccatatggtggaaaagagcattggattaggaggtagaaggtttgaatttgaatcatagctctacagcttactggccataattcctaagtaacttcctgtatgtatgtttctttttgtatatgtrtgtgtgtgtgtgtgtgtgtgtgtgtgtgtacacacacacacacacacatactctggtggaagccatgcatttagggactggactaaggaaagagaagttaatggaagagattgtaaggacagaaaaaagagttacaagatggtgagaaagtggtgaacagtgtaatgccatagagaggactgataaagaagggactgaaagatgccccttggacttggattttaggtgtacgtagggatcaatgatcttagctaattcagtttagtaaagatgggggatttacaggaaatttacagagatttcctgagttttgatatctcaacgttatatttgaaacatccctgataatcaggtttaattatttgcactgcatttcttcctaccatagtctcctgagttctactgatagaactgaggatttcaataaagagagattagtgtcatacttttactttcctccaaaatcttggaaaaaagaatatgattagctaattcataacatagctgcctttgcaaaatgtgaaatataaggtcacttaaattatggggtaattcagagccctatttaatttaattctatggaccattaatttcccatctttgctgacagtaataatgaccaaatgatatattcagagtttaaaatcagagtcaagctctgagtagtagaggagttttttttgaaactsttcatagagtaccttagttaattttagatgctgatcatatagtggttcgtatattaacttctgtgatatgtctcattagaaaaaggatgatcataggagttttcctatggacaaattttaaaaaatttaaaccctattttgaaaaagaaactggtgtctttataactgatttaractggaatagtagatgttctaaattcttttgaggaaaatagtatagaagttagccaatgttgttcatagctataaatcagaaaatatttatatattacagcttactgttaggagccctagtatagcattttagatcactttttatgtacttttagcctgcgtacgaagtcctsttcctttataaccctttttacttgacacctgaaataaaacactggcttctagttctgttttctcccttaacaggatgtattactgagatttattaattttatcagttttggaaactcaaaggaacttgcaggcaagtgcttacttgaaaaattgcctaaagactttagatagtatccttaatgaaacacaataattgtcagttgtcacaaagttggtgttgctgacaaatgcttgtacataataatacaatcytcctaacagcagcagcttcataagagaaagtttctagcagcaacttacatttaaaaacatctgattaggtcttcctgatgtaacctctcattagagatccgtggagacataaaaaagatgaaaacttacaataaatgtgggaaactaatatccacagttaacctatttctgtaatctgaaatgaatttcagcttataaggaaaatggaaatggatttttaaaatgcagttttaaacttgctaattcttgctattgtgcctgaaaatttcaggtaggaaaatattttgctttcttatccattaacttaacatctggtacaaaaatgcagatcttttttcactcttcacttccacctacagaaattgacctttcattcatattgtgtagctattcaaatttattagtatgaagatatttattacagcatttttaaaacagggaggccgggtgcggtggctcacacctgtaatcccagcactttgagaggccaagacggcggatcacttgaggtcagtagttcaagactagcctggccaatatggtgaaaccccgtctctattaaaaatgcaaaaaaaaaaaaaattaattggacatggtggtgtgcacctgtaatcccatctactcaggaggctgagkcaggagaacgcttgaacccaggaggcagaggttgyggtgagccaagatcgtgccactgcactccaacctgggtgacagagtgagactctgtctctaaataaataaataaataaacaaaacagggaaaaagtagaaagaatataaatgttcatcaggaagatattgattaaataagttggttcattatatactactttgtacacagtaaatattgatataattctctatgtattaaagaaacccgatatattcttaaatagacatgttgcaggacattatatgtagttttatcccattgatgtaaaataatggaaaaactcatgtatatacttaaatgtgcacagagaaagaaatcattcttttttgtttgtttcttgagacagagtctcactctaactcacccaggctggagtgcagtggcacgattatggcttactgcatgcagccttgacctccagggttcaagcaatcctcccacctcagccacccaagtagctgggaccacaggcacctgccaccacacttggctaatttattgtattttcttatagagacgggctctccctatgttgcccaggttggtctcgaactcctggattcaagtgatcctcccacctcagcctcccaaagtgctgggattataggtgtgagccacagtcccctgccaaaatcattcttattggtggtgtttgtggggaataaagttgaaaggagaagcaagagagcattgttttactttttgctttatatactttatagtatttttgttttctagagacttttattattttcataattgaaaaggaaagaaacataaggtctctgtgatagattgtttgtaaaatgagtcccttccctgaatccatgcttattactagttccctgtcatactgcctctgggttgggctaatagatttgctttggccagtgggacagttgcagacataattcaaatacttgaaaaatgcacattagagcttgtcttctctattgcaagtcttaaaaccttgtaaccaagccctatataaataaacccaagctggtcctggacatttgagagaggccacagaccactagctgtctgagttgcctgagtgagatctgactgagactggcrgaactgtccaactgaactcacatctaattgcctacccataaaatgattagcgactacatggtttttgttttaagcttctaagttttgaagtggcttgttatgcagcaaaagttaatcgataaagtctccagtggtgaaatcagcacctgcccttctgcatttttactgctttatgagatacccagattgctatttctttctttttctttttcttttctttttttttttttttttttgagatggagtctcgctctgttgccaggctggagtgcagtggcgtgatcttggttcactgcagcctccacttcccagattcaggcgattctccggcctcagcctcccgagtggctgggactgcagacgcatgccaccacgcctagctaattcttttgtatttttagtagagatggagtttcaccatgttggccagaatggtctgctctcttgaccttgtgacctgcccaccttggcctcccaaagtgctgggattacaggcgtgagccactgcacccggccccagattgctacttctaaaaattaagcmgaatgtaagagggggaagaaatattgtcactgtcacagtatacatactgagagctatgaaaccaatgagtaaagatcagttggccgggtataaaaaactttcagaagattgtcttctgtaataaaatgccacagatcatggcttctgtgaaagagcatagaactataaggagataacaggctaaggttaaataaagcaagaaagatgttcaggaaagcaaaaacgcagtagcaggattaaaattcacatcaaagacaatagagtagaactgatacttagacaagatgctgcrcctcagggtgatgtgactgcagactgatcctaccagtacttcaaaacatttagctagtgatattcaggaagaactgcagatgatctctcagtatcctgagaaaatgataaatatgaagtcaagagaatgaagatgacacaactgaataattaccaatatttttgatggagaattcagaaaagttgtaatggaaaaagtaaagatgaaattttaaaaaacattttacagcatttggaaaacatctaggtaagcagatcaagaagacatattcagaaaacatgctggtttgggggaaaaattatttggagacacacagctgctggccaagaaacagcagctcaaaaggaaatcataaattagatatcatggtattacaggcttggtgaactaccgatgtacactgcacccagtttatctcaagaaaaacattttaacaaaacatagcaggttgagctagccacactgataggccttgttttgtggctttctcaatgatgctttaaaaggaaacagtttcatttgaattatttcttttctttttttgaggtasrgtcttgttggactgcagtggcgcaatcttggctcactgcagctttgacctcctgggctcaattgatcctcccacctcagctccccgagtagctagcactacaggcctgtgccaccatgtctggctaatttgtgtatttttttgtagagacagggttttgccatgttgcccaggctggtctcgaactccgggctcaagtgatctgtccgccttggcccctcaaagtgctgggattacaggcatgagccactgcactgacctgttatttcttattttgatggccccaaaaatgggcacaagtaattcttttttttttcctgagatggagtttcactctcgtcgcccaggctggagtgcagtggcacaatctcggctcactgcaacctccgcttcccaggttcaagcaattctcctgyctcagcctcccaagtagctgggattataggcgttcgccaccagacccagctaatattttgtatgtttagtagagacgggttttcaccatgttggtcaggctggtctcaaactcctgacctcaaatgatccgcccgccttggcctcccaaagtgctgatattacaggcttgagccactgtacccggccaagaaattcttctataaaaccctttcagatcactaatagtcttagacagccaatgaaacagaaatacaatttccttatttaaggtgacaaaacaaatatgaccaggaaacagtctggcaagaaatacactaaaatattaaatggaattggttaggtcatgggattgttctttttcaacttgkacttttttttcttctttcttttcttttctttttttttttgtagggatagagtcttactacattgcccaggctggtcttgacctccttggctcaaatgatactctcccttcagcctcccagggagctgtgaccataggcatgtagtcctaccaggcctggctaatttttttttttttttaatcgacaaagttttgctcttgttgcccaggcctggagtgcagtggtgcggtcttagctcactgcaacttttgcctcccagtttcaagcaattctcctgcctcagcctcccaagtagctgggattatgggcgcctgccaccacttctggctaatttttgtctctttagtagagacagggtttcaccatgttggccaggatggtctcgaactcctgacctcaggtgatcagcctgcctcggcctcccaaagtgctgggattacaggcrtgagccactgcacctggcctgcctggataatttttttaaaaatgttttgaagaggtaaggtctctccatgtttcccagtgtggtcttgaacttctgggttcaagtgctcttcccgccttagcctccccaagtgttgggactacaggcatgagccatcatgcccggctacttttttcttaatgtatttatttaaaacttctttttcaaaacagcatatttatatgcatacatgcacagttatatgcttgtaagtaaataaaggtcttcacaatgaagacctaggttatttggaatagaagtggaggagacttactctatacataccttttgtgctctttgaattttatactatgtatataaattaccaattcaaaaaatgaattaaaatataactcataatttaaaaaacatgagttttacaaggtgaaataatataaaagggcttacactatgaagtagtattggctaaaacatccctctcacctggagtcctcatttttcagaggcaatcacttttgactctttctgattttrgttttcctggcatttactttcatttctcaaatatacttttatcactctttcttcgtttattaatttatacattctcctttgatatcctgccacaataaatgaagacttcatttacccaaaagctactcttttccctgccccatagaaatagtagcaggaataagaatactaatagcaactaacatttattagtgcttactttgtgccaggcctctttcaagtaatccacacatactgtctaatccccaccataccctctgaatttacgttaccactcttctcggttttcccattattcattttattttatttatttatttttaagacaggggctccctttgttgcccaggctggagtgcagtggtgcaatgatggcttattgcagcctcaacctcctgggctgaagcagtcatcccgcctcagcccccatagtagctgggactacaagcatgcccctggctaatttctttttaaagtaaaaacaagtttattagagaagtaaagaaagaaaagaatggctactctgtaggcagagcagccccgagggctgctggttggctaatttttaaatttttttgtagagacarggtctcacttcgttgcccatgctggtctcgaactcctggcctcaaatgatcctcctgccttggcctcccaaagtgctaggattgcaggcttgagtcactgtgcctggcccattattcattttattaatcatattgtcaactactggcagcacacgttttaaatgctgatcatagatgatagtattatctaacttttttgtgttttcactaggtgctgtrtattcttaggtcgttacctgtattaactcagtaactcttgtcatcaaacctatggtctaggctctattattattatctccattttataaatgaggaactaaggcataaagtttactctgtataacattgtgtagacaattagtggtaccaagccagtctgacttcaaaacccagtcctttaacccatccatacaccatattgatggtatccctttgattccattttgtaaggtaaattttcattcccactagttccatcatcttttctatgttttctttgtttctttgtttctttcwttttttctttttttaagatagagtctcactctgttgcccaggctggagcgcagtggtatgatcacagctcactgcagtcccgacctcctggactctaacgattctccttcctcagactctgagtagctgggaccacaggtgcatgccaccacacctggctaattgtttcatttttgctagagacagggatctcactttgttgccctggctggtcttgaatttctgggttcaagcagtcctcccatctcagcctgccaaagtgctgggattgcaagcattgagccaccacacccagcctctcttcttttctcatgcttagttttggtcagttatagcttcatgtttttatttcacagaacataaactgtatttaccatgctataatcatagttaaatattttgtgtttgatctatacatggattctaaaagttgaaaacagataataaacaacattttgacatataactatgtaaatattatacatagcaaagccaggagttgagaaatgatctttccttctctgtagttccagtgtatatctcaaatgaattcatccttaagttcacactcaaatggatcactcttttttacactatttgttttttgggtttgtttgttttgagacagggtcttgctatgttgcccatgctagagtacagtggcatgatcacagctcactgcagacttgatcttcgggctcaatgaatcctcccgtctcagcctcctgaatagctgggactacaggtgtgtgccactacgcctggcaaatttattttttattttttatttttgtttgtagagactgtgttttgccatgttgtccaggctggtcttgaactcctgggctcgagctgtctacctgcctaggcctcccaaagtgctgggactacagacatgaactgctgtaccctgccctgtttttcttttgtaacctctctgggttgagtcctttcacatgtagttcctttctcatgttttctaggttccagctttcttcattctgttatatggaaggcactaggctggacattttcagtttgcccttccagatcttaccttttgcctcttctcctaccctgggagactaacatttataggctgctccaactgatatctttgccctctgtcttccagctgggctacaccaatggaaagggtcagcaggaggttggagggcaggagtagagtgagcacagatgtgtattttgccagctccctcccttaagttttgggaactgccccctccctctgctgcaccaggcctaagggatagtaacttagccacaggtccttaaagtgttccttgttggtttcccttgactctgttcacatctttgtagcctctttgtcaaactcttcccagtgacccacttgtgtgtcgtctatttcccgccaggattttgattggtgggaagtaataatattgatatttcttcatataataatgatatttcttcatcaaatgttctttcagaagtttcttgaaatgtctcatctactgattgcctccctctctttttatttctgtatggagcctcgaaagagaagataaaattatatgctcagtccatcgtgtattgcttttttatttgtattactctttttaaaaacaacatctttattgggatattcagatatcttacaagttaccttttggaagtatacaactcagtggtttttagtatcctcacaggttaygtgcacccatcactacagtcaattttagaacattcattatcccyaaaagaaccctgtacccattagcagttattatctttactttttaaatgcgggaaataaacctrcatagaaagaccagaaagactttatgctcttgaactgtataaactgactccagcctacctgttgtaccttttgttgttgttgttgttgttgttgttgttataccttattttctactagttcccataatacatcatttatttaattcaggctgttttcctacttgtgctacaaagtgttattaacttataattgtcgttgcttctcttatatattttatttatctctgtctctgataatctcttaatctcttctttctcttttgcctatccaaatctttstctttgtgaagcatttcctggctactcaagccttccaatatgtaccttaaacatttttcattttaattaattgatttttttttttggagatggagtcttgctgtgttgcccaggctgaacttaaacccctggtctcaagcaatctttccgcctcagcctcctgagtagccaatgtgtcccttttctaaactccttattacttttattcagtgtcatgtaatttagtacttatttgcagttttttctacatatgtgatcatattttctgtctattacaaccaataatcctattaattgaagagatcagttttcacattactttatatggccttcataattattagcacttgatagaataatattagtaggctgggcgcagtggctcacrcctgtaatcccagtactttaggaggccaaggtgggtggatcacctgaggtcaggagttcaagaccagcctggccaacatggggaaaccccttctctacttaaaaaaatacaaaaattaaccgggcgtggtgacgggcgcctgtaatcccagctactttggaggctgaggtaggagaatcacttgaacccaggaggcrgaggttgaagtgagctgaggtcgcgccactgcactccagcctgggcaacagagtgagactccatctcaaaaaaaaaaaaaaagcataatattagtaawcaggttttctccttccattgagtgtcttcacaatatrccttgcccaacagcgaggtgggtgacaccaatagcaagatatcccaatggtgcaaaaggaaagctaaccagaggccgggcatggtggctcacacctgtaatcccagcactttaggaggccgaggcgagtggatcacctgaggtcaggagttcgagaccaccctgaccaacatggcgaaaccccgtctgtactaaaaatacaaaaattagccaggcgtggtatcgtgtgcttgcagtcccagctactcagaaggctgaggcaggagaatcacttgaacccgggaggtggaggttgcagtgagccgagatcgcgccactgcactccagcctggtgacagatagagactccatctcaaaaaaaaaaaaaaaaaaaaaaaawatatatatatatatatatatatatattcattttactattaaacatttgagtgttttctctgttctaaatatttctataggcattttagttatagggatcaatataaatatagcctgtacttcttttcttaattgaaaatagtgctaatggtggtcataggggtactgattgagacagagttgaactagcacaacaaaggtagacagataaacttagagaaaggagtagggggcccagaaacaagaacatgtattttatctggcaaccctaaatagaagagactggctctaaattgataagctgtgaatctgctgatggtacctaggggtcattgtactgttctctctacttttgtgtatgtttgaaattttccatcataaaaaaattaaaagatacaacttaaaaaatagagatacctttcacaaaaacaatgaaaatatgagaccttacagtaatgtgaaccaggaaatataggacctttatggaaagagttataaatgtatttaatgacaatgtttgtaccataaatggaaagaaatgctattgacaaaattagaaaaaatacgaattccccaaattgatctctagatttattcatttaccactaaattcaatgaatttattgctcctttatttttttaaaaaagtggccgggcgtggtggcttatgcctgtaatcccagcactttggtaggctgaggcaggtggatcaggagatcaggagatcgagaccacagtgaaaccctgtctctactaaaaatacaaaaaattagccgggcgtggtggcaggcacctgtagccccagttacttgggaggctgaggcaggagaatggcatgaacctgggaggaggagcttgcagtgagccaagatcacgccactgcactccagcctgggcggcaagagcgcgactccatctcaaaaaaaaaaaaaagtgacctcaatagtacaaatcttgtgaaatgtagttgactctttataatttgattcaagttagctccatgtacctgtagccataccctaaattctttgagacacgactgtcttctagactttgttagagataccttgagtttataaggtttctacaagacagccaaattcttaaattcctttcccaaatctgttttgtcccactgaaaaaaggtacttggggccatctccatctattcacagactttaatgaagaagttttgccctcgaagatgaggctgaattttaattggcatttatggatagcatttctcaattatatattttacagttatgcattagtaattgttgtatctttcaatcttgtaagttcttgaatttgtggattttctctttttcttttcaactccgcttgcagctaattcttttctgagttcatctttttctcattgtattttaagtgtagctaatagcatccagggctagcaacatactgtttcccaacctctttgtataaatcaacaagttcattaatcgtattatctgctttctcagttttctcaggcaaatgcagtgttaccattgcattatataggtcatcattgtttccagccttcagtaacagttacttgctactcagtcgcaattgcaggtgtcacrtatgttacatgtttgttatggcaataacgtactcctattaccagtttctggactagcttttccgaagtaaggctgctgtaacaaccctcaaattgtagtgccttcctacagtaaagatgtgtttctagctcccatgttagctacaagttgtctgtggttttggggcactgttaaatgtgtcttactcagtgttccaggctgaagaacagccctatctttgtcttaggtcagagggaaaattgaaaatgctgaaacactcagtgctcttaattttctcctaagatatgatataaataacttacaattatatttcattggccaaaggaagttaatacggccaggcccaatgtttgtatggtagggagtatttgcctctcaaagactgtactataagtcaccaggttcaaggacagggatgtatatttatcttatagggagaggatagaatagtgcagaacagtaataccatctacatatcgatttctaggtatattttctaaagcagtgtttttcaaacattcagctgagttcttagctgaagataaacatttggaagttgtcagtatataagtgagtgtgaataagatcaccgagggagagggaagagaggaccagaaacctcatgggagaagcatctgcaaagaacactaagaaygacctgtcagagaagtagggaggagaataggaaaagagcatgtcctggaccctagttatagaattatttctgcyccaaaaagtgtaacttttttaaaaaagaaagcctgaatgcaagcatttttcatctgtctggtttgtaccatcacaagacataatttccaaatagaataagaagtttaatattaatacatactcatttactattacagagatttgccacaatatggacagaagcagtggcagtcctattttggaagaacttttgatgtttacaccaaactctggaagttccagcagcagcatcggtaaatgaattttatagttaaaggagagtgaaggcctgttttgtattagtcacagtttttatcttcactacttcagtgctttttgtcttggtgctttttcttttttttcaccaacaaagcaaaggtaaatcttggtgcttttaaaataacatatttcatctttataacccaaatgaaaacaaatttatttctttcctatttatttaagatcttaaaatgtatggccaggcatggtggctcatgcctgtaatcccagcactttgggaggccaaggtgggaggattgcttgagctcaggagtttgagaccagccttggcagcatggctaaaccctatctctacaaaatacacaaaaattagccaggtgtggtggtgctcagctgtaatcccagctacttaggaggctgtggcacgagaatcgcttgaaccctgaagtgggggaggttgcagtgagcagagrttgcatcactgcattccagcttgggcaacagagagagaccctgtctcaaaaaagtaaataaataaataaaaataaataataaaataaggctgggtgcagtggctcctgtctgtaatcccagcactttaggagtctgaggtgggtggataacttgaggttaggagttcaagaccagcctggctaacatggtgaaaccctgtctctactaaaaatataaaaattagtcgggcatggtggtgcacacctgtaatcccagctattcaggagactgaggcagcagaattgctggaacctgagaggcggaggttgcagtgagcccagatcatgccactgtactccagcctgggcaacagagccacactctgtctcaaaaaaggaaaaaaaagagtaatgttcttgtccgatttttaaagacaatattatatgtggaatggttcagatcagctagagcataggtaggatgatttatggtttcattctaaaatatatgtttattggccaaagtagtttctttttatatttcaacttataaatagacatttaataaatgctttttaaatttaatggaatgactacattgaaatctaatgaaaaattcattagctttgctgaattggatggtattttatcctattgaatttacagatttgattagttttggaatttatagactcatttctattttcttgtatcctatataaaacagacaagtcttggataatcggtatggcttgaagcgctggcaaataggagaaattgcttccaagattgggcagctatactatcattattagtaagtaaattacacatggaaagagtaaagtgttgtctgattaaaacacagcatgcagaagtatacatacatagtatactcattgctaggcatgaaaatcacgagttacaaatgaaactctagtagttcggaccagattgatcaagacaatgttgtgcaataaccttccatagtcaaagtactatttgttttaaaggcttgcctcccaaacacttcatttggtcagactcatttataacttaaaaatttgatcttggttttagataaacrattaatactaaaggatttattgttcttgcagcttcacttgtcttaataatgtgtagcattgtattataacttgtatatgtgaatgaatggttttcagaaggatactttaaaaaactcatacttgcaggatatgtttgaaagatattttttattatatccttagagcactaacatctatatagtcccatccctgagttcagaaaacaagaagggtccttttaggaatctaaatgtcatcatcctgaagtgataatcaggtatacaataaaaaaggcttggaccatttgtaatctaaaaggcaataaaatggctgggcgtggtggctcacgcctgtaatcctaggactttgggaggccaaggcaggtggatcacctgaggtcaggagtttgagaccagcctagtgaaaccccgtctctactaaaaagacaaaaaaattagccaagtgtggtggcaggtgcctgtaatcccagctacttgggaggctgagggaggaaaattgcttgaacctgggaggcagaggttgcagtgagccgagatcatgccattggcactccagcctgggcaacaagagtgaaactctgtctcaaaaaataaaaaattagaaaaaagaaaagaaaagaaaaggcaataaaacttcttccatttcctacattttggcataccgctccaaattcccaccactaaaatcactctcttgggtagaatattttcttaaaaagtcccttgtaaaactagaagtgttttctcaggtagaaatgttttcttaaaaagtcccttgtaaaacataattcattaacatcccctgaagattcgtatggattagtgcattcctcagttctgtgaggacagaaattaaagaaatgggccaaaggactgtatggatttgaggaagtggcctagtcctgggagaggatttcactggatggaatgctgtttggagagtcccttcaaagaatgrggataatgtgtaatatgggttggcatcaaaaaaggcttggatgcagcgaggaggtttttaaaaaaatttcattattattttttatacattttaagggtgatatgattattgtcttgccgattcaaatttaggacagtcattcccmcccccgcaccccgtgccacagaggaatacagcggtatatagaacaagtatttaccatggtgaagagtctctgacactgtcatatttaaaaatatattttttctcatagcttacgcacatcggaaaccagctatctgaatgaggctttttccttctattctgcaatcagacagagatcatattattctcaagtcaataaagaggacaggtatgtatctgctatgtttttagaaagatgaggataaaacattcagtcttaatcttcgtagaaattgtgtggaaaagcatacatttttataacgtgtactcgtttaccaggctttattgagtgcctgctatgtaatagmccttcgaaagcatagagaagtttatgttacctaagcaataaatatcaaagatgtttaacagatgtcacaatgccaaaggagggttgggttattgttttacaagagattggcttcacacagatttaatagaaaagaaatgactccaaaacaaggcttagctaataacatttattctttagccygtgtaatcttaattcatatctcttcaaaagcctggtgacaactgtcatgtaggaccagggaatagtctgttaatgctgtttgaattttctctctytttttttttttttttggaggtggagtcttgctctgtcgcccaggctggagtgcagtggtgcgatctcaactcactgcaacctccacctccacttcctgggttcaagcaattatcctgcttcagcatcccaagtagctgggattacaggcttgtgtcaccacccccggctaatttttttgtattttttagtagagatggggtttcatcatgttggccaggctggtcttcaactcttgacctcaagtgatccacccgccttggcctcccaaagtgctgggattacaggcgtgagccaccacacccagcctggattgtgatttgattacttccagatgagtatggaattgtggaagaaatcagagatcttctggagaatctttcttgttagtattctgggaactgttggatgagaaagttcaggcacagaaggtctgaatattctctctaccccagcaacacaactcacagtttttatatggtgaaaagattatattctcttagcaatagaagaaaacagttttgacatgtttttctcaagaacactttgtggttgactgttgtaagctttccaactaaacagtgacattttggggaaagccccactcttgtaaatmtccttaatttccttgcatgtcttgttcagacttgtctaggggcgtttgcatggcacatgtaaggggtgcagatgctggagtgtacatttttcatatctttttgtcatccccttacatcagaagttccatcagttacttttcccttaggttgtcctatagtttgcttcacatattttcactacagatatatttcctccaactctaatttttaaaaaaattcttggcgagataaattatatcttaaaaaatgcgaaagagctgtataacattttatcggcattaaaaatacatataagcagagaactattttaagtaatagcaaaacaccttgtataatttacttttctgcattttctaatttgacaaaagggaaattggctttaaccttaatacccaacagtttgatttattgccataattttatgccttaataacaaacatcaaatttgaattgttttcctttgcagttttctagatcagagcatattatttagaagtaggattatttggaatcaggatgacaaaaactcttgctttgtgccagtaaattagaatcaaaggacaatctggtgtgcaaaaccttgaccttgctgtgtgtagttaggaggggctttgttcagtttgtaggttgtttcttagtttacacagggtaagagtgctagtcaagattgcaatcagcaacagctgctaaaatcaagagccaggagagaaaaccaataaggaagtattccacaatttcacagttcatttaaaaggcaaaaatcttcactcctcaaaaggaacaagttctctctgcactgtcttgacagctaagrattatgtcgagaccaggaggaataagtagtttgttccagcaacctcaaggttagtgtctgtcactaagcatagaccactcccagaacatctcattccatgggtccatcctacctaggagaggagatattacatacagccactcctcctaggagctgcacaccccaattctgttgcaaatggccaaagctgaacctggttggatatggagaaggtgaagattctgaatacccaagaggttttgtggagatgttacggtgagccacctggaagaacagagtttcctaggcaaatgtatagttaaagagtcagtgtcttgtaagtagggagcctagcaggttggacaaggctagaattctggagtccagaagtttgttaagagcttaaaaaaaatggccgggtacagtggctcacacctataatcccagcactttgggaagccaaggcaggcggatcatgaggtcaggagatcgagaccatcctggttaacatggtgaaaccccgtctctactaaaaatacaaaaaattagccgggcgtggtggcacgcgcctgtagtccgagctactcaggaggctgaggcatgagaatcgcttgaaccggggaggcggaggttgcagtgagccaagatggcgccactgcactcagcctgggtgacaaagtgagactccgtctcaaaaaaaaaaaaaaaaacttcataaaaagccttcaattttacattcatatttcccactggacaaaacttgatactgtcaccacttatgttgacgttgacaacatgtcaacatgtcatttattgttcagaagaaacaataaaaggtagggggaaagtgaataataaaattatgattattacaatagaaggcaggaaaggaaaataaactccagttatgttgatgtcaacataagtggtgacagtatttttttcagtgggaaatatgaatgtaaaattgaaggctttggcactgatgataaagagggcttgatgtggacccttgcagtgagtcacactcttttttctgcagtttgatatggagtcagttggtaggctaggggttgtggttcaggttatcgggcttgattgaggtggcctcttatgtatgagtggacagcactgacgcatttaatctgtgctttgctgcagttcatcacagtggcttccaaaatagaaagcacccacccacttctgtakgcttattgaatataaggatcagctaactatggcctgtttgcatgccagattgggcccatggcctgtttttgtactgtgtggcagtttagaatttttctttytttttttttacattttcaaagggttgtaaaaagggaaaagatgaatatgctacaggcaccaaatgtggcctgcaaagcttaaaatatttaccatctggccctttgtagaaggtttgctggttgtataatccatgatayagattcatagaacctattttttaatcaaaaaagtaacagaattaagtcattcatatttcaagtttgaattgacatcatccttctactaattttctttgttttgaattccactttcgacaatatgataggctagataacctgaaatactaaacacctagaaatgctggataaaataggacaatcatccttttaaatggaaaacttagttgtcaagaaagtaaggaagtccctagttcattttcccatggctgtggtgaccttggagggtggggcaattggtttgggtgacataaaagagcaaggaagaagaaaattgaaactagaaggggaaggtatgatatacaagaaggattggtaagaaaaaattatccccttgtattctaaaacatcgatttgatggggcagtaatcatcataacaatggctgattgacattattaaaataaaatggagccaaatctagataacaatartatgaaagaagaaaggggataaagaattaaaccattctgatatccatttattcttcagaagaaacatagagtaaagtttacttgttaatattttcagaaaactataattagaatgtgtaacttcagaagaggtagagggggaaagtgagtaacaaaatgatgatcattacaatgaaaggcaggaagggaaaataaactccaaaaagtataattagcrcaaaataataaaatagaaacaaatccgaatcatggtaagtaaaaatgatctaaacttccctgttaaagacaaagattatcagtatgcctcttagaaaaacccaataatatactgtttttaagagactcttcgaggccaaragcrgtgactcacacctgttatcccaacactttgggtggctaagatgggaagattgcttgcggccaggagttcaagaccagcctgggaaacgtagcaagacccgatttctacaaaaaataaaaataaaaaaattacccaggcatggtggcacacacctgcratcctagttactcaggaagctgaggtgagaggattgcttgagcccaggagtttgaggctgcagtgatttatgatggtgccactgcacttcagcctgggaaatagggcaagactgtctcttttaaataaataaacccttcaaagatgtaaggtagacagagaaagataatgagacagctactatggggaagaaatgtgtacgtgtatacgcatttcttatgtgtatactgtgtgtatatttaaaggtagaaagtattattgagaatagaggtttactctgatgaaaggaacaattcaggaaaatataaaaatcataaacttatatatacctaataacgtagcattatgataaagcaaagtgtttttttaaagtggggaaattaatgatctgatgtacatgggaatttttgatatatgatatctaataatttatatatcaagacaagaaattataagatttgagtaacaagtttgttccagtgtacctaaaattgtgtgcaacagtatatatgttattttcaaacttatatgaaaatctgtgaaattaactgatacttgccacaacacaagtttaatacaaggttcaataaagtgtgtgttgtctaaccatggtacgatttcattaaaaacaaaaataaaacataatttaaaaaaatcagtagctgcatttgcaggccagytactcagaaggctgaggcaagaggattccttgaacccaggagttcaagtccagttgggcaacataacaagactccatctcttaaacaaaaaaaaagtcaataagtttgtcaatcaatagacacatttctaagtaactcatgggtcgaaagaattttttaaaaattttattatggaaaatgttgaacatacacacaaaaaatacactgttgtaaggctattatttgtgatgtaggatatggaaagcaggaggaaatgtcaggtttgaattgatgattggtaagtgtaaagtgttatgtgtgaacagataaaatatattgtaagggcatttgataagttaaaggatgcacgttgttactcctagcaatcacttaaagaacaataacaaagaagtagtataactaggaagccaatagatgatataaaatggaacactaaaaaatatttgattaaccgaagagaaagcacaacaggaacaacagaggaacatagcaagagaaggagcaagtaggaaacaaatagcaaggtgrtagatataaacctagccaaagcaataatgacattaaatgtaattggtctaaaaacatcaagtaaaaggcacagagatcatattttcctgcctgtagtcttccacgcttcgttgtattcttaacttaaacatttaytactttctttaggaagccttttctcacccaagatctagtcctgtgggcacaaatagcattctttatttctcctatcattatattattccgttgtgttgtaagcatttatctctctcctgtatattttaagttcttttctgtctgtaagatctttgaagaagggaatatctctagttttttacaactgtgcttttagcaattaacagtatctgatgcatctaagttctcaataaatacttgttaaatgaatgaatatatgagtaaacagcttaataaatcagtaagaaatattttaaaaagactatatgcttatatgtgggaatgtttataattgtgcagaaaaggagggaaagagttttaaaagctatcagaaaattaaaaaaatcaaaaagcattcttttttaatctaatgagtaatttttcatttatcttccatagacctgaattggtagttaagaagttacgatattatgcaagatttatagtagtttgtcttcttctcaacaaaatggatgttgtaaaggatctggtaaaggtaaatacactttaaatagttcaaattctaatctctagttgtatatggatgatcttatttttaaaaaacagattttaggttaaaataattttgatatatcaataattacaatattcaaagtatagtaacttctgacaagggtaatgataaaaaaattttccaactcttttcatgttacaaatacactaatctgagataattatcttgattccttgcttttgtcctttctgcatgttttacatttcaaagcccatcagtggatggctgggaatgcaaacaaacaaaaattcttagtttaagagaaaataattgaaatgttatgtgaagaaaaagtacataatgctttacaaaggccttgcaaatgattttcattttcccaccactttagagtgtctgcataaagtctctccttcattaactgaggtgattaagagttaactgtcttcagacccacttaatacctgtaatcattgcatattaaattctgattgcattctgtattcaatagtttcaatggcatacttaattttgtatcaagtataacatgccagttggttttttgggttttgtggggttttttttttttctttttttttttttgagacaasgtctcgctctgtcatccagctggagtacagtggcatgatcttgtctcactgcaacctctgcctcctgggctcaagcagtcctcccaccttagcctcctgagtagctggaatcataggctcaagccaccactcctagctaatttttgtgttttttgtagagacagggtttcaccatgttgcccaggctggtctgaaactcatgagttcaagcaatccgccagcctctgcctcccgaagtgctgggattacaggcatgagccaccgtgcccagctcaacatgccagttttgacaaggccaccagaagtagctctctgttctccttttctaccttcctttatacccagttaccattaaaaatatttccaaaaaccatataatacaaatccaaataaagtcaggaagtatttttagaaatatataattttttgtagtggtagggtctcactatgttgcctaggctgctctcgaaatcttggcctcaaatgatcctcccacctcgacctcccaaagggctgggattacaggtatgagatactgcatccagcctcatttttttttattgttaaaatttttgaatttctcttttctgattctttcattaatgaattcattgctcatgtagtactgataggaagtagatctctgtaaagactttatttgatgggtgttattctgaagtttgtacttttgaagaaaatttattagttttcatctttgttttttgttataatcaggactgtgtattgctaataatcaaattttgtaagtatgtcggtttctgtcaggaatatggttctatatggctgtgtgtttttatgggttttttaataaccttttttgtgatgtttttaaaatcaggaattgtcagatgaaattgaagattatactcaccgatttaatactgaagatcaagtggaatggaacttggtgcttcaagaagtagcagctttcattgaggtcagtttttgataagaaaaatcataattattgataaataaatgaccgtgtagtttatgtttttattgtgtgtatatgtcaagaagaaggaatagcttactctattgatatttagtcttggccattygttaagttcttattgcttttttctttaggcggatcctgtaatggtattaaatgatgataataccattgttatcacatcgaatcgccttgctgaaacaggagccccattgctggaacagggcatgattgtgggacagttgtctctggctgacgcactcattattggtaattgtaataatcaggtaaagaattgtgaaggaattatgcttaaaattcactgtgaaaaatagtgctattgatgatcacagaattattttcttataaatatcctaacatcctcttgtgaggaaattgctgattaaattatgctgtgtgcatatatggaatatattacagatatttaaatagcttagaaagaatttttaataacatagaaagatactcgtgatacagtaaatgaaaataaacttgccatggagccaggaagcagaattatttcatatatgttagaatgtctatatgtatgcacacaggaaaaagacgaggaagaaatgttacaactatctaagttttatctccaaataaccaaattataggggatttttattttattttttacaacattctaaagtttccaaaatttctgacctggcacagtggctcacacctggaatctcagcactttgggaagcccaggtggttagatcacttgaggtcaggagttcaagaccagcctggccaacatgacgaagccccatctctactacagaatgcaaaaattagccagccatggtggcatgctcctgtaatcccagctactcaggaggctgaggcaagagaatcacttgaacctgggaggcggaggttggagtgagccaagatcacaccactgtactccagcctgggtgacagagcgagactctgtctcaaaaattaataataataataaagtttccaaaatgtatatgtcctactttccaatcaagcaaaaaggggcgaggagttggtgttttttgtgttttgtttttttttgagacagagtcttgctttgtcactcaggtgggagtgcagtgtcatgattttggctcactgcaacctccatctcccaggttcaagcgattctcctgcctctcagcctcccaagtagctgggattacaggcacataccaccacacccggctaatttttgtatatttagtagagatggcatcatcatgttggccaggctggtcttgaactcctgacctcaagtgatcctcctgcctcagcctcccaaagtgttgggattacaggtgtgagccaccgcacttggccaggagttgtttttgsgtaaatttgtcaaaagtgaatttcaaatgttttttcatgacagagtagcaccatgatgatgagatttaatgtactagaaatgaaatttactggaaattacaccagtgaatacatttttctagatgtgttttttatacaagtttaattttggatcctatcctagcatctatcaatcacttttgttattgttaaatttttctggtatttctccatttttggcttttatgaccattattttgcaaatgtctacaacgtttttgaaattatagtawgaatatactaaatggaaatattttgaaacatttatggtttgtatagttatactatcttaaggctcggtatttttctcacttttttttaattcaaagaaaatttttctaatcagaaaaatataaattaaaaccaaatgagatatcaccgamctagatgactaaaaacaaaagagaccaagaaactgataatagcatatcctggcaactagtacaagaactgaatatttcatactatgtagaaatagaaattgatagatttactttagaaaagtgtcaggcattatctagtacagctccatatgtgcacactctatgaccaagcatttccagtattttcttattgatctgtaagagttctgaatatattctacatgaaagtcctttgtcagatttatgtgttgaacyatcttctcctactcttgtcttgccttttactctcttctgatatcttctgtctctttttctccttttctttaaacatctgttaaaatatttattagtatctacgctatgccagacgcccctgttccagatactgagattccagtgaacagaagtccttaattttaatgtagtctaatttataatttttttcctttctggtattagcttttttgtgtcctattttgagaaatcattgcttaccttacctttcatatttagatctatgatatctttgggatttattttagtgtgaagtatgggtcagattttctttctggatttccagtagacctagcaccatttactaaaaagaccatcttttccctgccacmctgcagtgtcacttttatcataaatctgatgttcaaatatatttgagtctcrttctgttcctttggtctgtttgtctattatgctgatacttctgacttcattattatggcattttaataggcctcgatatattgtagtaaatgaaatactgattttttctaattttttctcttacattgattctgattcttatttccttcttcctattttgaatttaatttgcttagataactgacatttatttatttatttatttatttatttatttatttattgagacagagtcttgctctgtctcctaggctggagtgcagtggtgcaatctcagctcactgcaacttctgcctcccaggttcaagcgattctcctgcctcagccttcctagtagatgggactacaggtgtgtgccaccacgcccggttaattttttgtattttttttttgtatttattattttattttattttattttattttattttattatactttaagttttagggtacatgtgcacaatgttcaggttagttacatatgtatacatgtgccatgctggtgtgctgcacccattaactcgtcttttagcattmggtatatctcctaaagctatccctcccccctccccccgccccacaacagtccccaaagtgtgatgttccccttcctgtgtccatgtgttctcattgttcagttcccacctatgagtgagaagatgcggtgtttggttttttgttcttgcgatagtttactgagaatgatgatttccaatttcatccatgtccctacaaaggacatgaactcatccttttttatggcckcatagtattccatggtgtatatgtgccacattttcttaatccagtctatcattgttggatatttgggttgattccaagtctttgctattgtgaatagtgctgcagtagacatacgtgtgcatgtgtctttatagcagcatgatttatagtccattgggtatatacccagtaatgggatggctgggtcaaatggtatttctagttctagatccctgaggaatcgccacactgacttccacaatggttgaactagtttacagtcccaccaatagtgtaaaagtgttcctatttctccacatcctctccagcacctgtttcctgactttttaatgattgccattctaactggtgtgagatggtatctcattgtggttttgatttgcatttctctgatggctagtgatggtgagcattttttcatgtgttttttggctgcataaatgtcttcttttgagaagtgtctgttcatgtccttcacccgctttttgatggggttgtttgtttttttcttgtaaatttgtttgagttcattgtagattctggatattagccctttgtcagatgagtaggttgcgaacattttctcccatcttgtaggttgcctgttcattctgatggtagtttcttttgctgtgcagaagctctttagtttaattagatcccatttgtcaattttgtcttttgttcccattgcttttggtgttttagacatgaagtccttgcccatgcctacgtmctgaatggtaatgcctaggttttcttctagggtttttatggttttagatctaacatttaagtctttaatccatcttgaattaatttttgtataaggtgtaaggaagggatccagtttcagctttctacatatggctagccagttttcccagcaccatttattaaatagggaatcctttccccattgcttgtttgtctcaggtttgtcaaagatcagatagttgtagatacgtggcgttatttctgagggctctgttctgttccattgatctatgtctctgttttggtaccagtaccatgctgttttggttactgtagccttgtagtatagtttgaagtcaggtagcgtgatgcctccagctttgttgttttggcttaggattgacttggcgatgcgggctcttttttggttccatatgaactttaaaatagttttttccaattctgtgaagaaagtcattggtagcttgatggggatggcattgaatctrtaaattaccttgggcagtatggccattttcatgttattgattcttcctacccatgagcatggaatgttctttcatttgtttgtatcctcttttatttcattgagcagtggtttgtagttctccttgaagaggtccttcacatcccttgtaagttggattcttaggtattttattctctttgaagcaattgtgaatgggagttcactcatgatttggctctctgtttctctgttattggtgtataagaatgcttgtgatttttgtacattgatttttgtatcctgagacttttctgaagttgcttatcagcttaaggagattttgggctgagacaatggggttttctagatatacaatcatgtcgtctgcaaacagggacaatttgacttcctcttttcctaattgaataccctttatttccttctcctgcataattgccctggccagaacttccaacactgtgttgaataggagtggtgagagagggcatccctgtcttgtgcccgttttcaaagggaatgcttccagtttttgcccattcagtatgatattggctgtgggtttgtcatagatagctcttattattttgagatacgtcccatcaatacctaatttattgagagtttttagcatgaagcgttgttgaattttgtcaaaggccttttctgcatctattgagataatcatgtggtttttgtctttggttctatttatatgctggattacatttattgatttgcatatattgaaccagccttgcatcccagggatgaagcccacttgatcatggtggataagctttttgatgtgctgctggattcggtttgccagtattttattgaggatttttgcattgatgttcatcaaggatattggtctaaaattctcttttttggttgtgtctctgcccggctttggtatcaggatgatgctggcctcataaaatgagttagggaggattccctctttttctattgattggaatagtttcagaaggaatggtaccagttcctcttgtacctctggtagcattcggctgtgaatccgtctggycctggactctttttggttggtaagctattgattattgccacaatttcagagcctgttactggtctattcagagattcaacttcttcctggtttaktcttgggagggtgtatgtgttgaggaatttatccatttcttctagattttctagtttatttgcgtagaggtgtatatagtattctctgatggtagtttgtatttctgtgggatcggtggtgatatcccctttatcattttttattgcgtctatttgattcttctctcttttcttctttattagtcttgctagcagtctatcaattttgttgatcctttcaaaaaaccagctcctggattcattaattttttgaagggttttttgtgtctctatttccttcagttctgctctgattttagttatttcttgccttctgctagcttttgaatgtgtttgctctcgcttttctagttcttttaattgtgatgttagggtgtcaattttggatctttcttgctttctcttgtgggcatttagtgctataaatttccctctacacactgctttgaatgtgtctcagagattctggtatgttgtgtctttgttctcgttggtttcaaagaacatctttatttctgccttcatttcgttatgtacccagtagtcattcaggagcaggttgttcagtttccatgtagttgagtggttttgagtgagtttcttaatcctgagttctagtttgattgcactgtggtctgagagatagtttgttataatttctgatcttttacgtttgctgaggagagctttacttccaactatgtggtcaattttggaataggtgtggtgtggtgctgaaaaaaatgtatattcagttgatttggggtggagagttctgtagatgtctattaggtctgcttggtgcagagctgagttcaattcctgggtatccttgttaactttctgtctcgttgatctgtctaatgttgacagtggggtgttaaagtcacccattattattgtgtgggagtctaagtctctttgtaggtcactcaggacttgctttatgaatctgggtgctcttgtattgggtgcatatatatttaggctagttagctcttgttgaatcgatccctttaccattatgtaatggccttctttatctcttttgatctttgktggtttaaagtctgttttatcagagactaggattgcaacccctgcctttttttgttttccatttgcttggtagatcttcctccatccttttattttgagcctatgtgtgtctctgcacgtgagatgggtttcctgaatacagcacactggtgggtctggactctttatccagtttgccagtctgtgtcttttaattggagcatttagtccatttacatttaaagttaatattgttatgtgtgaatttgatcctgtcattatgatgttagctggttattttgctcgttagttgatgcagtttcttcctagcctcgatggtctttgcaatttggcatgattttgcagtggctagtaccrgttgttcctttccatgtttagtgcttccttcaggagctcttgtagggcaggcctggtgatgacaaaatctctcagcatttgcttgtctgtgaagtattttatttctccttcacttatcaagcttagtttggctggatatgaaattctgggttgaaaattcttttctttaagaatgttgaatattggcccccactctcttctggcttgtagagtttctgccaagacatccgctgttagtctgatgggcttccctttgtggtaacccgacctttctatctggctgcccttaacatttcttccttcatttcaactttggtgaatctgacaattatgtgtcctggagttgctcttctygaggaatatctttgtggcattctctgtatttcctgaatctgaatgttggcctgccttgctagattggggaagttctcctggataatatccgcagagtgttttccaacttggttccattctccctgtcactttcaggtacaccaatcagacgtagatttggtcttttcacatagtcycatatttcttggaggctttgtttgtttctttttattcttttttctctaaacttcccttctcgcttcatttcattcatttcatctttcatcactgataccctttcttccagttgatcgcattggctcctgaggcttctgcattcttcacgtagttcttgagccttggctttcagctccatcagctcctttaagcacttctctgtattggttatcctagttatacattagtctaaatttttttcaaagttttcaacttctttgcctttggtttgaatttcctcctgtagcttggagtagtttgatcgtctgaagccttcttctctcaactcgtcaaagtcattctccgtccagctttgttccgttgctggtgaggagcygcrttcctttggcggaggagaggcgctctgctttttagagtttccagtttttctgctctgttttttccccatctttgtggttttatctacttttggtctttgrtgatggggatgtacagatgggtttttggtgtggatgctgtttctgtttgttagttttccttctaacagacaggaccctcagctgcaggtctgttggagtttgctagaggtccactccagaccctgtttgcctgggtaccagcagtggtggctgcagaacagcggattttcgtgaaccgtgaatgctgctgtctgatgttcccctggaagttttgtctcagaggagtacctggccatgtgaggtgtcagtctgcccctacttggggggtgcctcccagttaggctgctcaggggtcggggtcagggacccacttgaggaggcagtctgcccgttctcagatctcaagctgcgtgctgggagaaccactgctgtcttcaaagctgtcagacagggacatttaagtctgcagaggttactgctgtctttttctttgtctgtgccctgcccccagaggtggagcctacagaggcaggcaggtctccttgagccgtggtaggctcgacccagttcragctttctggctgctttgtttacctaagcaagcctgggcaatggcgggtacccctcccccagcctcgctgctgccttgcagtttgatctcagactgctgtgctagcaatcagcgagactccgtgggtgtaggaccctccaagccatgtgcgggatataatctcctggtgcaccgttttttaagcccgtcggaaaagcgcagtattggggtggaagtgacccaattttccaggtgccatctgtcactcctttctttgactaggaaagggaactccctgaccccttgcgcttcccgagtgaggcaatgccttgccctgcttcrgctcgcgcacggtgcgctgcacccactgtcctgcgcccactgcgtgctccctagtgagatgaacccggtacctcagatggaaatgcagaaatcacccgtcttctgcgtcgcttaccctgggagctgtaggccggagctgttcctattcggccatcttggctcctccaattttttgtatttttagtagagacagggtttcaccgtgttaaccagaatggtcttggtctcctgacctcgtgatctgcgcaccttggcctcccaaagtgctgggattacaggcgtgcctcctcgcctggccaactgactttatttttatttttgagacagagtctcactctgtccctcaggctggagtacagtggtgtgatcttgactcactgccacctctggctcctgggttctagtgattttcctgcctcagcctcctgagtagctggcattacaggcatgtgccatcacagtggcccagctaatttttgtatttttagtagagacagggtttcgccatgttggccaggctggtctcaaactcctagcctcaggtgatctgcccccagcttggcctcccaaagtgttgggattacgggtgtgagccactatgctctttttcctcttctagtataaaaatccctgggctgggcgtggtgactcatgcctttgggcatggtggctcatgcactttgggaggcaaagtggggcagatcgcctgagggtcaggagttctagaccagcctggccaacatggcaaaatctgatctctacttaaaatacaaaaattagtcaggcatgatggcatgtgcctataattccagctacttgggaggctgaggcaggagaattgcttggacccaggaggtggaggctgcagtgagcccagattgcaccgctgcactgcagcctgggcaacagaagaagactccgtctctaaataaataaataaaataaaaatccaaagctgtaaaattctctttaagcattactttaattttattctacatattttgatattttgtattttttccaatcctgcttcttctataatattttatattttatattttctttcagttgaatgtattttcttatttcttttttaactcttactgacagtatattgcacatctccaacttgagtttgataattttttttcagcactttgaagatttaatttcattatcttctctcatttctgttgagaaattgtctgttagatttattagtcacatattatatccacttaaggaaatgtttctttcctctgtgtgtttttaagattttctcactttctttgattctttgcagttttactatgttatattcaggtgcagttttctttatttatcctgcttgaggttcacagagtttcttgaatctatgggtttatgtctttcatctattttgaaatatggttattatgtctctgagtattgtttcccttctgttctttctctgctccacttctaggactcagttacatgtttgtagacccgttcacagtgccacgtgtgtctgttatattcttttctgtatttttcatcattttttcctctctaggtttaagttaggctgttttctgttgacttcttttccatttcactaaccatatcttctgatgtgtttaatctgctatttaaccttttattaagtttcatatttcacatattgtctttcttagctctggatttttccatttgattcttgttttatagattaaatttttttttcctagcctgggcagcatgatgaaaccccatttctacaaaaaatacaaatatcaggccaggcagtggctcatgcctgtaatcccattactttgggaggcctagctgggtagatcacttgaggttaggagtccgagaccagcctggccaacatggtgaaaccctgtctctactaaaaataagccaggcatggtggcttatgcttttgatcccagctacttgggagactgaggcaggaggatcacttgaactctggaggcagaggttgcaatgagacaaattcgtgccactgcactccagcctgggtgacagagtgagactctgtctcaaaaagaaaaaaataaagggccgggcacggtggctcacgcctgtaatccctgaactttgggaggccgaggcgggcggatcacaaggtcgggagatcgagaccatcctggctaacacggtgaaaccccgtctctactaaaaatacaaaaaattagccgggcatggtggcgggcgcctgtagtcccagctactccggaggctgaggcaggagaatggcgtgaacccgggaggtggagcttacggtgagcagagatcagaccactgcactccagcctgggcgacagagcgagactccgtctcaaaaaaaaaaagaaaaagaaaaagaactaaaaaacaaaccttagctggatgttggtcatgtgcctctagtcccagctgcttgggagactggggtggaagaatcacttgagcccgggaagtcaaggctgcagtgagccatgattgtgccacacacttcagcctgggtgacagaagcagaccctgtcttaaaaaaaattttttttttttctttttagagacagtatctggctctgtcatgcaggtgggagtgcagtggcacagtcatggctcactgtagccttgacctcccaggctgaagtgatcttcctgcctcagccttccaaaaatgtttatgttttatagagatggggtgttgctgtattgccaaggctggtctcaaactcctggcctcaagcagtccttctgccctagcctcccaaatgttgggattataggcatgaaccacggcacctggcccttttttattttttagtagattttaattctctggcagaattctctatttcttcatttgtgttctaccatgtctattttgttgatcacacttagtagttattttaaagtccttttctgctaactatactctctagttatgctaactacaagtgtgttggtctgttctattgcttgtttctcacttttaaaattatcatattaatatttataattactatatatctgataatttgcttgcatattaatttataatcaaatcccccagcattctctttcttttctttttgttttgagacagtcttgctctgtcacccaggctagcatgcagtggcatgatctcggctcactgcatcttctgcctccctggttcagttgattctcccaccacaaactccccagtagccaggactacaggcacgccctacgcgcccagctaatttttgtatttgttagtagagatggggtttcaccatgttggccaggctcgtctcaaactcctgaccttaggtgattcacctgcctcagtctcccaaagtgctgggattacaggtgcgagccagcacacctggcctcagtttttacatttcatttattgtattttttatttttaaaagtataggtcaggtgcagtggctcacacctgtaatccccacactgtgggaggccgaggcgggcagattacgaggtcaggagttcaataccagcctgaccaatatggtgaaaccccatctctactaaaaatacaaaaattagccgggygtggtggcgtgcgcctgtagtcctagctactcaggaggctgaggcaggagaatcacttgaacccgggaggcagaggttgcagtgagccgagatcgcgccactgcactccagcctgggtgacagagcgagactccgtctcaaatraatgaatgaatgaatgaatgaatgtattaggttattttctacatattcctttgattggcttaatcatgattttaattacttcttctatttaagcatatgaaactaactttttttcttttaagagaccggggatgggggtgtgcatctcactatgttgccccttctttaatcccygcctcttggctggtctccagctcctggcctcaaatgatcctcccaccttggccctccaaagtgctgggattacaggtgtgagctgccacacctagacttttgcatgttatgtatgatgtttgtatcatcctgtttctgtttgctgaatcaggcgtgccttttttcttcatgcgttttatgatttttgtttctgagtcttctttgatgtaattctgtcagctagaattctgtaagacctgaattgaggatgccttcttccaacgaagatctgcattgctttttccctcaaaacttgggggcagtatcagtttttgttctttttaagtgaaaaaccttatagatttttcagccatgcaaataatgttaattcagattctcaaaccacatgagaatcagcatatggccgtgaattcttgggggagacttttcttgatctcttctcagaacaaaggctaaggtagagtttccttcatgtttatgtctctggagcagatttgtttctagtgttctcctctgaggccatatctttttgtgcatccagttttatttgggcataggtgtatgtgtgggaggggccatcttccaaccaaccaaccagttcttagccaggaggcccatgctacccttactacaggaaaacaaggcattagtgcccacttatctccttaaacctcttccccttctttaatccccgtctcttggctgggcgcagtggctcatgcctgtaatcccagcactttgggaggccgaggcaggtgggtcatctgaggtcaggagttcaagaccagcctgaccaacatggtgaaaccccgcctctactaaaaatacaaaattagctgggcatggtggcacatgcctgtaatcccagctactcaggatgctgaggcaagagaatcacttgaacgtgggaggcggaggttgcagtgagccgagattgygccgttgcactccagcctgagtgacagagcgaaactcacatacatacacacacacgtatattaaatgagttaaatgtttgaaagtgtagttagtaatcttcataaacttattctcatcttaactaaataattcctcttcttttatttgatagaaacatgttctttaaaaaattctcatctgttttattatcatgtgtgttcctgaagttctatataagtattactgaaattggaaaaggatatagacttaaatattgtgtagtgccaaaatgtatggaagaaattactataaaatatggatcataggctgggcgcggtagctcatgcctgtgatcccagccctttgggaggctgaggcaggaggatcatctgaggtygggagttcaagaccagcctgaccaacatggagaaaccccatctctactaaaaatacaaaattagcctggtgtggtggcgcatgcccataatcccagctactctggaggctgaggcaggagaatcgtttgaacccgggaggaggaggttgcrgtgagccgagagcgcgccattgcactccagcctgggtgacgagaatgaaactccatctcaaaaaaaaaaaaaaaaaaaaaaaaaawaaatatatatatatatatatatatatatatatatatatatatatggatcacagttgtatttcagcatagctaattcatcaaaagttagctcttttttctcatgtagcaaggattactatcaaacttctgtgtatagaattcgggctgaaaagtcaggaatcgtggcttatgcctgtattcctagcactttgggaggctgaggtgggcagatgacttgaggtcaggagtttgagaccagcctggccaacatggtgaaaccccatctctgttaaaaatacaaaaattagccaggtgttttggcacacgcctgtaatcccagctactccagagactgaggcaggagaatcgtttgaacacgggaggcaratgttgcagtgagctgagattgtgccactgcactccagcctgggcaacagagcaagactctgtctcaaaaaaaaaaaaaaaaagaatttgggctggagatccttgtggtgttagtgaaaaacttgcccctcacatagcacactacctacacgtgtgaattcatccaccagtctgtggaggttaacatgtttgtagaacctaatatagtctctgtgctgctgctgctttattttttttgagacagagtctttctctgttacccaggctggaatacgatggtgcgatttcggttcattgcaacctccgcctcctgggttcaagcgattcttctgcctcagcctcctatgtagctgggattacaggcatccaccaccacacccggctaatttttgtatttttagtakagatggggtttcaccatgttggccaggctggtctcgaactcctgacctcaggkgatccacctgccttggcctcccaaagtgctgggattataggcrtgagtcmccatgcatggccccctgtgtttctgtaactacttaaaaaaacaaaacctgaggaagtttattgattagtaaacatgtatatggctggagaggtatgtgaaaaagcaaatataaaaaatgcttattataggatctagatgatgaacatatggatgtcactgtagaattcttccagtctttccatcgcttgaaaatttctgtaacgaartattagagaaaaaggtacccaaagccctgaagtacatgtgaaagtcacaactagtaacgtgataaaagtctttaaagtctgcgtgttgcattaaggctaggttgtgtttgtttttttttttcttgcaggttaagttcagtgaactaactgttgacatgttccggatgttacaagctctggaaagggagccaatgaatttagcttcccagatgaataaaccaggaatgcaggtaatctcctcttttacatttgcaagtttggtaaccctctggctgcgtctctcctgttggaacgctgattattcaacagatactacagccttgaataaagaattcacttgatgagacatggagaaatagatcatcacagtaagactgagtgtgaaaataagacttccttgataagggctagtgaaaatagatattgataattcatttgtcaaatgcagcttttatgtataatgttttctgtgtgtaaatataggaatcagctgacaagcctactagacgagaaaacccccacaagtatctgctctacaaaccaaccttcagccagctatataccttcttagcagcgtcttttaaggtatgtgtgatccagtactttttactatgaggtgaaagtgtgccctaactaaaatctaagagtcactcttttgaaaaaatacttaagagtttaggtaaaatataaaaatgaaaaactgcctttagagtaatgatcctgataatagatatttttgttttgttttgtttctttttttttttttgtactcctggtaagctgtgaaatagctgtttgggaatgaaaattgcttatgatgttgtgattattcccatcattaattaatgataatagtggttctccttcctccagttttttattactcaatgattttaggtgtaacaatgcagaattggccaggcgtggtggctcactcctgtaatcccagcactttgggaggccaagccaggtggatcacctgaggtcgggagttcaagaacagcttgaccaacatggagaaaccccatctctactaaaagaatacaaaattagccgggtgtggtggcacatgcctgtaatcccagctgcttgggaggctgaggaaggagaattacttgaacccgggaggcggaggctgcggtgagccgagatcgcgccattgcactccaacctgggcaacaagagtgaaactctgtttcaaaaaaaaaaacagactaaaaaacaaaagcagagtgtctaggcttcttatatagtcaaggagctctatgaaacatttagatcatctgaaagaactgtgagaaataggagaattcttcccaaagtctatgtagagaaagccacagaagggactttgtcttgtagccatgtagtcaggatctttacttctccattcaagttttcggagaatattctccaaatgatggggtttttgaagcagagaatgtctttgcaacttttgacaatatagattaataatgaatctctgccgtgtrtatagttttaaagtcaggaccaagaagagcgtttcttctcttggaaaagacaacagtgcattcttatttatttcacaactttaagatgtcatgaactttaaataaaaccatgttgtttatccttgtttgttgttttgtgtatgtgattttctttcatttcaggagctgcctgccaatagygtgcttctgatttacctgtcggccactggcgttttccccacaggtcgttctgatagtgaaggtacaataaaggaatgctccctgttgtgagcagggcttgaattctctttattttctacaagacgatggcccgtagcccacagaccatctcagcctttctagacagacttccaaatttgaaacctggtctatttgttgattgataattttgtagataccccagtctgtcatattttctgaaatgttatatgtcaaagcccataaatcatcagaaaattcatatattaaatgcttgcttcactatcaaatgtatcaaaagcataatatgtaaatacatttagatatacataaggagtttggtgtttcaaagttgaaaaggatgatggaataaccaagcgtaatgatctatttcacatcattgaatttttctgagctttcagtgcattggggaatccggtcaatggctacatgatggctgaaagtctttgtagaaatcagtgtactttcgtaactgtgaaagttcaagcccttgtcatgattttgttttctgtcctttattttgttttatggattcaatctgtagaatatcgggatgctgtttcagaataaaaacgtaacactgtccagaacataccagtccagaaattggtcagaatagataagtaacttggatgtaaataagataattaaatatttgcctgggcaaaataaaaaaataaaaaaattcttaacatccttaacattttcctcttcatttgtttgttgaaatttgcattcctttataaaatgcatgtccttgccatcttccttgcatgacctccagattctcttaaaatgttgaaatgaaaacaaatctctttagccttttcattgcagkgatttttttaagaagtgaaatataatacaacattaaaagtaatgtaaaatcttaaactactttagttttttgtaataatgttagtacttttatttataattatctgtatgtctcatatactgttaaatcaagttttcttggtttccgcttaacatactgacttctttacttttttcaaagtatgataggtaatcgtactttgataggtcctttgagagagattatctgaacatcccacagttgctgttccatttggacaagagtttagctaattcatatgaatttagtgggaaaaggctaacttcagaaccagaactaaagtgcttgatacaatagtgataataatggatatttgcacgctgaaatctggcaatacattcttaarggtgaagtttttgtgaatgagaattttcaaattctattcaaatatttttctaagttttacagttagtggctcatttaaaattgtatttacttatgagactaagatttcattctttaaaaaaaaaaaagcttattttattctgcaacttctttttttttttctgagacagggtctcactctgtcatgcagactggagtgcartggtgtgatcatagttcactgcagcctgggaatacaggcacctaccaccatgctcggctaatttttaaaatttttttgtagagacaggtctcactatattgcccaggctggtctggarctcctggcctcatgcagtcctcctgcttcagcctcccaaagtgctgggattacaggcatgagcaaccatgtctgaccaacttccttttaaaataatattgttaaacctgagattttaagtttgcttgaaatgtaaaggtcattttgaacatcccagatctccattccttttattacttagaataatgatgccatagagtcttgttttgwttctcattatattctgtttgaagaactgctgaataattaaatgttttttaaaatgttgaaaatgacaacatactgaagtcatttaaatactccattaaattaaaatgttaaattttaaaataatttaaatgtgtaattatcttcgcttgaatcaatgagagattcacacagtacctttgtatttgaacatcaggtcagtgttagtcttcaactgaagtctaggattcttccctttgtttttataggtccttatgattttggaggtgtacttactaatagtaaccgggatattattaatggagatgccatccacaaacgaaatcagtcccacaaggaaatgcactggtatgtattctggtgtctactcttattataaaaattatacctctgtctataaatagaaaaaatattaagtaaaatggggagttttttctagtactagaatgattcccttagactaagatttagggacagaccagaaacacttatttggattccagcaataattcaggctctgtctatcctaggaaattagaacttttggttgatattcattgaataaatatgttacacactgtttagtcactagggatatgtcagtgaacaaaattgcattctagttggagacagtaaatatatacataaataaataatatgtcaggacattatacatgtaacatcaatacgaacttttaaacaaatttttttcttgagatggagtcttcctctgtcactcaggtcagtcttgatttcctggccttaagtgattctcccacctcagcttcacaaagtgctaggattacaagatgtgagccactgtgttcagcccaaacatttttttttttttttgagatggagtcttgccctgtcacccaggctggagtgcagtggcatgatctcggctcactgcaacctctgcctcctgggttcaagcgattctcctgcctcagcctcctgcgtagctgggattacaggcaccagccaccatgcccggctaatttttgtatttttagtagagatggggttttaccatgtttgtcaggctggtcttgaactcctgaccttgtgatccacctgccycggcctcccaaagtgttgggattacaggtgtgagccaccgtgcccggccacattttattttattttatttttttaattgaaaaataatcattgtaaatattcctggggtacttaatgatgtttctatatttgtaatgtattgtgatcagatcagagtaattagcatacttatcatctcaaacatccattccttgtgttgggaacatttaatatcttttttctagctatttatgataaaggctgatagcagtggctcacacctgtaatcccaacactttgggaggccgagatgggtggatcacttgaggtcaggagtttgagaccagcttggccaacatgaaaccctgtctctaccaaaatacaaaaattaaccgggtgtggtggcttgcgcctgtggtcctacctactcaggaggctgaggcaggagaatcacttgaacccattaggtcgaggttgcagtgaactgagattgtgctccagtctgggtgatagagcaagactctgtgtcaaaaaaacaaaaaagagaaaataaaaactatataacatattattaactatagtcatgctacagtggtatagaacactagaacrtattccttctatctagctgtaattttttaatctttaacaatctcttccctatacctccgttccccgttcccctacccttcccaacctctagtattgagtttgttttttttwtgagatggaatcttgctctcatgcccaggctagagtgcagtggcacgatcttggctcactgcaacctccatctcccaggctcaagtgattctcctacctcagcctcccaagtagctgggattacaggtggccaccaccacgcctggctaatttttttatttttcatagagatggggtttcgccatgttgaccagtctggtctcgaactcctgaccttagcctcggcctcccaaagtgctggaattacaggcatgagccaccgcgctgggcctgaattttttaatacaaggttttgttggtttaatatagcacaaatgaatgttgttacatgattacaaatagaacttcaggccaggagcagtggctcatgcctatgatcccaacattttaggaggctgaggtaggaggatcacatgaacccaggagtttgagaccatcctgggcaacttagtgagactctgtctctacaaaaacttaaaaaaaaatttttttaaatgcaaaaaatacaaaagcaaatagaatttcatctacaaaagttctttttcttttttcttttcttttcttttttttttttttttgagacagagttttactctgccgcccaggctggagtgcagtggcactatcttggctcmctgcaacctctgccttccgggttcaagcgattctcctgcctcagcctcccaagtagctgggattatagtcatgcatcaccacacccagctaatttttgtatttttagtagagatggggtttcaccatgttggccattctggtcttgaaatgctgacctcaagtgatccgcctgctttggcctcccaaagtgctgggattacaggcgtgagccaccgtgcctggagttcattctttttctaagcataacaacttcattgcttgggctgttattggctcattggctctagaatttttctagctgagagcaatctggttataaagaaaactggactggtctaaaactttgtttctaatacatattgaatatcccttatctgaaatatgtgggaccaaaagtgtttcgggttttggatttttccagattttggaatatttgtatatagatagtaaggtaccttagggatgggacccatgaaattgacttgtgtttcatatacaactcatacacattgcctgaaagtaattttatttttccctttgagatcctggataaactatgtgttgtgcacctgcatgactatgatccatcatgtgaggtcaggtgtggaattttctacttgtggcatcgtgttggctctgaaaactttttggattttggagcatttttcgttttggattttcagattaggaatactgaacctgtatggcatgatcacttatatgtggaatctgaaaaagttgcactcagaagcagagtgcaacggtagttctgaggagctgaggattggggaaaatagggagatgttggttaaagggtgcagcctctcagttgtaagataaatatcatttaaagtacagcatggtggtgataattaaaaatactatattggctgggtgcagtggctcaggcctgtaatgtcagcactttgggaggccgaagtgggcggatcacttgaggtcaggagttcgaaamcagcctggcaacatggtgaaatcccatctctactaaaaatacaaaaaattagccgggtgtggtggcatgtgcctgtaatcccagctacttgggaggctgaggcaggagaattgcctgaacgtgggaggcggaggttgcagtgagccgagatcataccactgcactccagtctgtgtgacagagcgagactccatctcaaaataaataaataaaaaaaaataaatgaaaatactgtattgttggaccgagcatggtggctcattcccgtaatctcagcactttgggaggctgagatgggaagattgcttgagttcaggagttcaagaccagccttggcaacataagaggatcttgtctctactaaaaatgtaaaaaatgagccaggcgttgaggtgcacgcccatggtcccagctacttgggagactgaggcaggagtatcacttgagcctgggagatcgaggctgcagttagctatgatcttgccactgtactccagycttggtgacaaagtgagaccccatctcaaacaacaacaataacaaaaattgttgtttactcgaaattttctgaaagagtaaagcttatgtgtcctctctgcccactgcccccagcaccaccccccmacccccgccccaccgcccacacacacgaagggtaacggtgtgggaatggaggtgttgattaatttgatcgtggtaatcactatacatgtatgcattaacaagtcatcacattgtataccttgaatatatacaatttttatttgtcaataaaagaaaaacttttatttgaaatataatgaagtttgatgatattgctcagtgaaacattcataaatttacatttacattagtatctatccacatatgcacatcgtgtactcagtcatcggaaagagcacgcacaccaagattctgaccttacgcattggctctcacatgcatgttactggatttccgcctttgggttcagtagctcttctgtgggccagtcaaactgcatgtttaacaagcccttgatgcaaatgtttagaggaaacatatggtaaaaagtagctgggcacagtgactcatgcccataatcctagcactttgggaagctgaggtgggcagattgcttgagctcaggagttcgagaccagcctgggcaatatggagaaaccccatctctactaaaaagagaaaaattagctggttgtgttggtacatgtctgcagtcccagctactcaaggaggctgaggtgggaggatcacctgagcccgggacatggaggttgctgtgagctgcgattgcacaacaccactgtactccagcctgggccacggagcaagacggtgtctttaaaaaaaaaaatagtgatagtaaaaagattttcctacttactacctgcagtattaagatgtagcctgaaatattaaaaatctttaaaatagaaattttgaagactcattgaaatacaaatctggttttgttattacatcttgtttccagatgttcttacaaggagcttttaaatatgaaacaggtatctgtttgccagcttctgaggttttcatgctgtgtgtttagtcatctttaaatacacagacttcactttagcttagatattcttgaataacaattgtctctgaacttttttttttttctccaaatagaactatcttggctatcctagtaaatacaggctttttttcccctttgcttaactagtctttgtttttctctcagtgctatgatgcaaaggagatatgagcagaccaaactgaagaataagatttctgagatgtggctgacacagtttaacagttcttcrttgttgttttcccagccttcatcccggggatctctatcctttcaccaggaagccactgttcatcattgtggattcgtctaatagtgttgcgtataaggtgagttccatgagagctattgcacaggtagacattgtggcaccaacccaagggtacccactcttaatgtgtgcctttttattttgctttattttatttaattttacacagtttgtatttagtgtttcttttcttttgaggttgtgcatgctagtcaggatcgggtgctatgaatagaaacaagaagaaaacgcatgaatggacactcagtggaaaataataaatcctcctgcaggaaaaaaaaattcaagatttccaagatctctggtgggaggtttatttttgttatataacccagaataattttcttttatagaggtagaggtataagggtgaatttctctagtgttcaaacgtttccccttctcatgctgagctgctgtagtttaagtaaaacttctagcccatagttttagtctttgaatattaacatactgttttacatgcacttgattttttgaaaatttgtgacaatcacaaaaaaaagatggccctgaatgctgaaataagtgacagggatctaacttgaacatccttcgttttatatttcactattgaagtgatgattttcagtgattttataaagaatgccagtggtcagctgggtgcagtggctcacgcctgtaatcccaacattttgggaggccgaggcgggcagattacctgaggtcaggagttcgagaccagcctaaccaacatggagaaacccccatctctactaaaaatataaaattagccaggcgtggtggtgcgtgcctgtaatcccagctacttgggaggctgaggcrggagactcacttgaacctgggaggtagaggttgtggtgagctgaaattgtaccattgctctccagcctgggcaacaagagcaaaactccgtctcaaaaaaaaaaaaaaaatgccagcagtgaaacactttaaaggtggatattataattcaaactatagtaatttacaggaaaacgaaagcacagtctttagagtcctttgtatctggtcaaaatgtttgattagtgaaaaatgtgttcaaaatattctgggtgcacagatctgccacttcaaactgtttctgttgtgggtgttcatactgcagttagagggagaagcaaactcctgataggtttctatcaggaaaccaatgaaaatgtctggtagccaagagagctgaccccaagtatacattttccatttagttttcatgtttagttttacttaaactctttattccaagagcttccaatgcaccatacatttttcagcatttttcctcctactcattttgttcagtattacaacttctgatttttaggaaagttagcagtgtactttcttttcttttcttttttgagacagagtttcgctcgtttcccaggttggagtgcaatggcatgatctcagctcactgcaacctccgcctcccaggttcaagcgattctcctgccttagcctcccaagtagttgggattacaggcatgcgccactatgcccggctaatttttagtatttttagcagagatggggtttctccatgttgctcaggctgttctccaactcctgacctcagatgatccacccgccttggcctcccaaaatgttgggattacaggcgtgttccaccgtacccagccagcagtgtactttcttaaattgtatatttgttttgtttttgtgggaaatggaagaatgtgagargctgctgaatgaaaaggtttattggctaccccaattaaacttataaagccagaggggtccaggcattttgtgtcttcacagaattcaaaagaagtactctgtctttgtcaatgaaaatgaatttgttgcagcagtttggtgatgtgacagaatgtgtttttgcactgggtccaatgtattgtttaacatgatctagcatcattgagagtactttagcaatccattagtttctcccaatttaattgggcattattggataccacttctcagcaataccattcattgtatgtgcctgctatttccagaggactatttagatttaggatgaatgttggatgccgacttttaaagacaccattgtgtataattggaaatgtatttgctcaagtaatgcatcatggcttaattttagattttaatattgtgatgcacaggacagctgtggaataatagcaagtcttttgttgttgttgtttgcttttgatggcacaggcactgtcactcctctgaagaaataaatcgtccagaacataccaatcttcagaaatgaaaagggaggccaggcgtgcagtggctcatgcctgtaatcccagcactttgggaggctgaggcgggcggatyacttggggtcaggagttcaaaaccagcctggccaacgtggtgaaatccygtctctactggaaattaaaaaattagctgggaggggtggtgtgcacctgtagtcccagctacttgggaggctgaggcaggagaatcgcttgaacccgggagatggaggtttcagtgagccaagatcgygccattgcactccagcctgggtgacagagtgagattctgtctcaacaaaaaaaaaaaagaaatgaaaagagaaccccatatggagtaggcaaatcagatcatggcacagaccaattttagtctttttagaaattaatattacttactacatttaatttaagcatgtagttctctttggtagcatataaaggtgtctcatatttatttttcccacaaaagcatttgtaggctgggtgcagtgtctcacacctgtaatcccagcactttgggaggccaaggcaagaggatcacttgaaccagcagtttgagacaaagctgggcaagatagcaagatcccaaatctattttaaaaatttaaaaattagccaggcatgtttttgtgagcctgtagtcccagctacttcaggaagctgaggcaggaggatctcttgagcccaggagttcaaagatgcatgagctgcgatcgtgccactgcattccagcctgagtgagagagcaacaccgtatctctaataaattaattagatgaaatgaaattaagcattgtaaagtcttaagctaccactttgcaagttttttggtttgttttgtttttgttttttgtttttgagacagagtcttgctctgtcgcccaggctggagtacagtggtgcaatcttggctcactgaaacctccgcttcctgggttcaagcgattctcctgcctcagcctcccaagtagctgggactagaggcacacgccaccacacctggctactttttgtgtttttagtagagatggggtttcaccatgttggtcaggctggtcttgaactcctgacctcgtgatccgcccacctcagcctcccgaagtgctgggattacaggcatgagccaccatgcccgacctgcaagtttttaatgaraaaagagaactgggtaactgatgtattatttctggagtattttctttgctatatatgttttatataggtctggatgttttatgagtatrtaagtgttttgtaaatgtttcttcatttaaacagtttcatgtacatttcttcatttaaatattactcgttaawttttttttttttttttttttttttttgagacggagttttgctctgtcacccaggctggagtgcagtggcatgatctcggctcactgcaacctccgcctcctgggttcaagcrattctcctgcctcagcctcccgagtagctgggattacaggcatgtgccaccacacctggctaattttgtatttttagtagagatgggatttccccatgttggtcaggctggtctcgaactcccaacctcaggtgatccacccacctcggccttccaaagttctgggattgyaggcatgagccactgcgcctggccacttgttaatgtttatgaagtaactcrtgcatatagtttaaagttgtatttctcaactatttctgtgcatcagaaactttcagagcccttttcgaaccacttgtagctgggtcccatccacctcctgtgattctgatcacttcacctggggtgggtctcagctacagtatttatgaagactagctgtattgtgctgtcctggtgagagaactactcactcagaaatccctccagatttgctactaaaaacagcagtctcccactttttgttgcaacccctatttgcctcttcccagaggccgctcttcaaatagtttttggctattttgttttttaaccaccatttttcttttttcttttttccttccttctctcccctaaccactatttttctaaataatatactggcattgataattcttgattcttcagttttagcgttatgtattaatttcccactatgaaagagaaatttatctccctttcctctttctgtccccaactcacatttctaccctttccatcattttatccacaccatagataattttgatagataatttgttttgttttgttttgttttagagggaggctcgctgtgtcacccaggctagagtgcaatggtgcgatcttggctcactgcaacttccgcctcctgggttcaagcgattctcctgcctcagcctctctagtagctgggattataagcacgtgccaccacacctggctgatttttgtgtttttagtagagacggggtttcaccatgttgcccagactggtcttgaactcctgacttgaggtgatccgcctacctcggcctcccagagtgctagaattacaggcgtgaaccaccgctcccagcctagcttccagtatttctttttttttcttttttgagacagagtttcactcttgttgcccaggctggagtgcaatggcgtgatctyggctcactgtaacctctgctccccaagttcaggccattctcctgccttagcctcctgagtagctcggattacaggtgcacgccaccacacctggctaattttgtatttttagtagaaacagggtttctccatgttggtcaggctggtctcgaactcctgagctcagatgattcacccaccttggcctcccaacgtgctgggattacaggcgtgagccatcgtgcctggccttttttgtgtgtgtgtgagatgcagtctgtcagccagactggagtgcagtgatgtaatctcagctcactgcagcctctgctccccaagttcaggccattctcctgccttagcctgctgagtagcttggattacaggcacgcgccaccatacctggctaattttgtatttttagtagaaacggggtttctccatgttggtctggctggtctcaaactcctgacctcagatgatttacccaccttggccttccaaagtgctggaattacaggcatgagccatcgtgcctggacttttttatttttatttttttgagatgcagtctcactcttgtcacccaggctggagtgcagtgatgtgatatcggctcactgcaacctccgcctcccaggttcaagtgattctcctctctcaacgtcctgagtagctgggattacaggcgcacaccaccacgcctggctaattttttgtatttttagtagaggtggggtttcaccatgttggccaggttggtcttgaatgcctktctgggcctcccaaagtgctagggttacagacgtgagccaccatgctcagcctgagccacggcgccgagcccaatatttcttaagaagcatgaagcattctaattctgttttcttttttatgcaacacattttcagtgtctggaaacgtatagaatcttctctttcttcttagtgatttttcagtttctcaatatcgtttcctggtttgactttacttttttattttttaagatggagtttcactcttgccaaccaggctggagtgcagtggcacgatcttggctctctgcaacatccaccacccaggttcaggagattctcctgcctcagcctcccgagtagctgggattacaggcatgcgctaccacacccagctaattttgtatttttttagtagagatggggtttcaccatcttggccaggctgttctcgaactcctgacctcgtgatccacccgcctcagcctcccaaagttctgggattacaggcgtgagccactgtgcctggctggtctggatttacttttaactatggtgcttaacatgtacttggtgaattatttcagtctggaaactgctcattttctagagttagtccatttatttttctctctgcattttcttttttcctgttctgtcttttaagaacttttttcgttattgcacattctggtctggttgtcttttatttgtttgtctgtcctttgctctttaatacattttttctttaggaaatcccctcatctttatcttctaagccttttattgagatttttcatttgtctattttcctttcatatatatagaaatagatgcatgtgtgtttatgtaacacatacatacatatgcacatatatatataattattttgggtttttttaaatcatggttgaaatatatcactttcctttgagaatatcagtgatcatttaaaatttctccctgcctcgtatctgcttcctctttcttcatttgtttctgcttgtttttgcctctgtctttctcattagagacttccctgagagtatcataatccctgcttgtttgctcatacttaagattggagcctagcaaactgatcagaagctctgaggggtgattccaactgagctctgggactggttccaactgagctggaccttatagttgggtaatccctaatgccagtatctttaggtcttccttcatggcctggtcatgtatatcagagaagatgcaactattccacctggaatatmaaggtctagtgaccagcatgatgccatgttttccctgaagcgtgtgtgtatgtgtgtgcatgtgtgtaggtgttgtgtgtgtgtgtgtgtgtgtttatagatacatatatccttacccagtgcctcacacttaaaagagtgtttgtttgtttgtttgtttgttttttgagaagaagtctcgctctgttacccaggctctagtgcagtggcatgatcttggctcactacaacctctgcctcccgggttcaagcgattctcctgccttagcctcccaagtagctgggactacaggtgtgtgccaccacacccggctaatttttgtattttttagtagagacagggtttccccatgttggccaggctggtctcaaattcccgacctcaagtgatccactcagctcggcctcccaaagtgttgggattacaggtgtgagccaccatgcccggccaaaagagtcttaatcagtgcatgttgaatgatgaaatgagggagctattgtccttattttgtacttgaggaaactttgcctctgaggttcaggatcttgtctaatatttccaacaccagtctttctcattgcagtgcccatgctctttcccacgtagrgaaagagtagcttttcaggcttgtctgagcctcatattagaggaatactgtgattgaaataccaatatttgtgtaacaagtatggcccatattttggctcttagattgccagtaggggcaaactaagcaagttgattggccttgtctgtggtaatgtagtatttagtaggagtttaaaataataataataaaaaaaagccatccaggtgcagtggcttacacttgtaatcccagcactttgggaggccgaggcaggcggatcacaaggtcaggagtttgaaaccagcctgaccaacatggtgaaaccccatctctactaaaaatacaaaaattagctaggcatggtggcacatgcctgtaatcccagctattcaggaggccgaggcaggagaatctcttgaaccygggaggcagtgagccgagatcgcaccactgcactccagcctgggcgacagagcgagactccatctcaaaaaaaaggccctcagtcattttgggcaatacttctttttcttttttcccctggaagaagaaaatccttttgcacatttaagtatttatgacagagctagctggatccctgcctgtgaaaatgacttacagatttgtcaaaacaggagtatttatctaaacagcctcatcctaaagtatttgactgatgtctacagcaatcagtttcttaaggcattcacaacaggattcagttatgtaagagctcttctgccagtcagcctcaccytcattccatttctctcttgctgctttgaaagacctttttgtttttgctgtcctgcagttatatggtgatatatctaggtttggcttaaatctattgggatttgttggacttcctgaggtggtaggttggagttttttgttactgctgggaaattctcattttctcttcacatatcgatggtatctaagcttctctctcctcaccttatggagctccaattaaatatgtgtattagacattcacactgtgtcctccacatttcttaacctctcttctgtctgtattttccatcattttgtttctttggttgagatttgtatagtttcttctgatctagctcttagttcaaaaattttctcttcagctgtgtgtaacttgctctcaaacccatctattgagttttttgttggttatggtatttttcatgttgataaattatatgtcattcttttttaagtattccattgcccttttctattttattttatttttgagacggagtctcgatctgttgcccaggctggagtgcagtggcgtgatctcggctcactgcaatctccgcctcccgggttcaaacgattctcctgcttcagcctcccaagtagctgggactgcaggtgcccgccaccacacccagctaattttttgtatttttagtagagatggggtttcaccatgttagccaggatggtctctatctcctgacgtcgtgatctgcctgccttggcctcccaaagtactgggattacaggcatgagccaccgcgcccggacactccattgccctttttatagtttcttattttcaagtttatttcttatttcttcaaacttaataagcatacttattatttgttgtctgtgtgatattttctataatcatatatgaaattggaatttcttttttttttttttttattgagacagagtttcactcttgttgcccaggctggagtgcaatggtgcgatctcacctcactgcaacctccgcctccccggttcaagcaattctcctcagcctcccaagtagctaggattacaggcatgtgccaccacgcctggctaattttgwatttttagtagagacggggtttctccatgttggtcagggtggcctcaaactcccaacctcaggtgatctgcccgcctctgcctcccaaagttctgggattacaggtgtgagccaccgtgcccagctgaaattggattttctatatgaaatctgattttgctgtttgagacatcctttgctgtttttgtgcccctgtatgcttgattatttttgactatgtttcttcttcttcttcttaaaaattacttgtatgaagttcatagagccctaggatgaggatacctttattcagagagggtctgcatttgcttatgccagacacccagaggcactaccagtttgggatcacctagttgatagaaatctgggctgcaaatatgcaggagggctgacttacactgacaaccctcaggaactaatttttgttttcttttgttttctgctcagcatcaagaaaaaatgttttgcagtcccatgtggagtgatcatggaagggagaggaagtgtcaagtttggttttggttaatccttatactgacagtatagccctttaggattccaggttaaagggtgtacccttttaggattccaatttaaaggctgtagccctgaggattccagtttaatgcagggcgagttttctattagattcccatcttggacagatgctgagctgtgacatttgtccccttttccagatgagatcttcaaaacccaaattcaagttgctagattgattcagggcaagagttctggaatctgcatatcctttcagtctcctctacagatttttctgtatctctctgcccttttatcagtgaagtgcccttgagttcagtccttgttcttttccacctacagctgacttcctgatgttcttagctgattttatggctttgctgtttctgtgttgacaacctccaagccagacctctctctcaaactcaacttgaatattatctacctactccatatctttagttataatttagttggtagagtttgcaaactgaacatgcccaaggcggaattcctaggctcttccatatacagctttccccattttagttcatggctactatgctattatagttgccccggccataatccttgatttcgtacttgactactcctcccctcacatccaacatccattttaggaaatcctgttgactcgaactaatatgtatatccaagatcctattacctcctctgcctcatcctggctcataccaccatcatcattcacctgaattactgcagtagccttctaatgagtcttcctccttcctcgctctcctgtaagtgtgcctataagacagatatgccacctttctactcaraatcaccaatggcctgtcatctcactcagaagaaaggctttattttttctgcttacatatacccctccctccccagtcttccaaaaacatctctgatcttctctcttccctggcccctgattgctcagttctcttcagccacactgacccccttgctgttcctgaaacatatcaggcagtcatctgccctagatctttacattcttttccctctgccttgaatgctcttccaaagatacctacattattctttaggtgtttgagcaaataaagccttttaaaaggtcttccctaattgtcctacttaaaattatatgcctccccagtactcctcatccacctttctttttcttaataatcataacagttaacttttctgtagtgactagcaatatgcactgttctaagcattttatgtgtatacgtttaattcctgcacaacacagtgtgttgcttttattgttcccattttactgataagaaaaccaaggcacagataaaggttaagtaatttgcccaagatcacacagatagtaggtagccaagttggaatgtaaaacaatggactgtaaaacctgtgctattaactatgtgctgtgcttccatatgtagcacttgtcaccttctgtgatattatataacttatttatttagttggttagtttactgtgggtcacaatctaccatttctccatcccccatccaactcagctctaggccgggcacggtggctcacgcctgtaatcccagcactttgggaggctgaggcgggtggattgcctgaggtcaggagttcgagaccagccttgccaacatggtgaaaccctgtctctactaaaaatacaaaaattagccgggtgtggtggcacatgcctgtaatcccagctagtagggaggctgaggcagggagagttgcttgaacccgggaggtggtggttgcagtgagctgagatcgccactgcactccagcctgggcaacagagtgagacatcatctcaaaaaataaaaataaaaataaaaaaatacttacataaatgtcagctccagaagatagagttttttctgttttgtttactgttgtatctctagcacctgtagcagtgtctagtccttaggtccatgagttatttgttgaagaagagaagaagagatctttaaaaagaacattatatactgttttaagtgaatgcttttttttttttttttaagagacaggttttcattctgtcacccaggctggagtgcatggagtgcagtggtacagtcatagctcactgcagcctcatactcctgggctcaagagatcctcctatgtcagcctcccgagtactaggactacagaaacatgccaccacacctggctaatttttaaattttgtgtagagatagggtcttgctatgttctccaggctgatcttgagctccctgctgtaagcgattctcccaccttggtcttccaaagtgctgggattatgagccaccacacccagctagtgaatatattttaaaccccagttaaagaaataatttcctaggcaaaagattgaatggctatatgaaagaaatcagaacagccccatcactggctagaaatgtaggaaagttatcaaaattatttccttttccccmcaagaaaggcttctagcccttctgggtttaccaataatttttttttttttttttttttttgagacagagtcgcactctgttgcccaggctgggatgcagtgacatgttctcagctcactgcaacctctgcctcccgggttcaagtgagtctcctgcctcagcctcccaaataactgggattacaggtgcatgttaccatacccggctaatttttttatttttttatttttagtagagatggggtttcaccatgttggccaggctggtgtcgaactcctgacctcagatgaaccacccccctcggcctcccaaaatgctgcgattacagacgtgagccaccrtgcccggcccaataatactttgaaacctttagagtcagatatacaatttagggcaatgaaaaaggtcagaactatccaattcattctgtagcagttaggccacaaaatacttgtatggctttgatcatgtctttgatcttttctgagctgctttttccttctcaaataagttgtgaatgctgatctcacaggattgtcgtgattgcagattaagatctatgaagcctagcgtagtttctggaaaatagcactcagtaaatgataggaattattatgataatgatactgtttccagacaaaattagcacacatgaaagaaaactttaccccaaagtagtttatcaatatagaatagaagaatttaaataaaatactagccaataggctattaatagaatcatctatcaaaagagtttatctgaatcatgcatgaagattaggtaaaggaaaatcaggccaggtgcagtatctcacgtctgtaatcccagcactttgggagcataaggcacgaggattgctagaggccaagagttcaagactagcctgagcaatatagcaagaccccatctataaaataaaaaactagctgagtgtggtgccacgtctgtgcagtgctagctacttaggaggctggggcaggaggattgcttgagttcagaagataaagactgcggtgagctatgatcacaccactgtactcctgcctgggttacagagcaagaccttgactaaaaaaaaaaaaaatttaatactataaactatgtcgataggataaataagacaatcacatgctttcgtaacagtcatttagtaaaatctaataacactcatcacgtgttcttaactaaagcactgaacctatgatgaagagcttctttattaaatagccaacgttgtacttagagaaacactaaaagtatgttcaattaaaataagaaaaagagaatgcctgttactatcattatgatacactattacttttgtcccaactagaaattcataacattccccaaataaaacaataacaagagttgttcggattagtagaagaggacacaaaacagtaaatattggaaagaatgagatgaaaaccactagttgcagacggtatgattttatatttggaaaatcaagagaatcacagaaaagctactaatatgaatataaattcatcaaagtggttagatataggacaaacatacaaaattcaatagcaactttatatatgagctatgtctggttcaaatttattcatttgtatatatttgctataatttttcttaaacttaatagctttgaatcgtacacttcatctgtgtgggcagttatgatatattctgcaaaaacttgcaaataaagattataagattatcctatgggagttaaactataaaattaattaatgaatagatcagaacagagtaaagccacatgtaaagcaccttaaagaaactatttctcaggcctaaaatttaattataatctgatagaaggtattcatgtatttatgtcagaggtctccaagatgattcccaggttcagtgatttcctaggaagattcacaggactcggcatatagtcgtactcactgctaagatttagtacagtaaaaggatacagagcaaaaccagcaaaagaaaaagataagtggggtgagtttggagaaaaccaagtacaaacttccaggggccctcttccagcggagtcacacaggatacacttaattacccaaccaacaagttgtgacaacatggattaaatattatctaccagcaaagctcattaggaactcagcaaccagggtttttattgggaactggtcttgtgggcactctctgcctggctcttaacaaaatgctacactcccagaaggaaagcaggtgttcagtataaaccatcttgtttgcacattctagggacagcgagccactctttatcagttctgctaatggtaggaattttcaccaaaactaagttcccagaagccagccaggggccaacccaataagcaaaactttcgaaggatggcagtctggcttgctatgctaactcttctctgcacagtattattgggggaaaaaaaaaaaagtcaggagagaagttcgttagcaaggagtgcaaagaaaaaggagacctttagaaataaataatagcaatgtccattttagcactatctaagaggaaaagcgacatggctaagatccctaaagccatctttagggatctgtagtgcagaaaatgcctcaatctgccttatcaaaagaatcattcaatttactccctgtgtttggattacaaaatatttctaatatatctgaattacttgcttaattttttttttttttttttgagacggagtcttgctctgtcacccaggctggagtgcagtggtccgatctcagctcactgcaacctctgcctcccaggttcatgccattctcctgcctcagcctcccgagtagctgggactacaggcacctgccaccatgcccggctaatttttttgtgtttttagtagagatggggtttcaccgtgttagccaggatggtctcgatcacccgacctcgtgatccgcccgcctgggcctcccagagtgctgggattacaggcgtgagccaccgcgcccagcctatttgcttaatatttttagtactggtattacattcacaaagtcacagaatcaaaaatttcaagaagtcatattgtgaaatctcttcctcccgcctagtcccaatgcactaaattcctatctctccctatagataatcactgttacctgtttcttatccttttagaaaaaaagttgtaaatggatatacaaactaaaacaaatagtcttttttttatttttattttttgagatggagtcttcatctgttgcccaggctagggtacagtgacatgatcttggctcactgcaacctccgcctcctgggttctagcaattctcctgcctcagcctacctagtagctgggattacaagcacacgccaccatgcccggctaatttttgtatttttagtagagatgggctttcaccatgttggtcaggtcggtctcaaattcctgactcaaatgatctgcctgcccttggcctctcaaagtgctgggattacaggcatgagacacaccatgcccagccaagaaatagtctktagttttcttagttatataaatagtagtaacatcttgtaccacattgcaccatatcttttttcatttaataagaagtattgaggctgggcatggtggctcacacttgtaatcccagcactttgggaggctgaggcaggcagatcacttgaggtcaggagttcaagaccagcctggtcaacatggcgaaaccccgtctctactaaaaacacaaaaattagccaggcacagtggcattcccctgtaatcccagctactcaggaggctgaggcacaagaatcacttgaacctgggcagcggaggttacagtgagctgagaggtggaggttgcactccagcctgggcgacagagcgaaactgtttcaaaaaaaaaagaaaaaaagtattggtgacccttcatacctgttcataaagaacttctttgttcttttttatagctgtttattattccattgtattattgtagcataatttattgtaccaatcctgtatttctggtcatttggttgtgttatttccattccttcactatcactaacaaggcttcaaggaataatttaatacttacgttattttattagttgcatagtgtatctatagggaaaatttctagtttgggaatttctgtgttaatatgcatttgagtgtaatagatgctgccaagttaaattgtcttctaaagtgtttatatcaatttatactcctattacctacatatgartatttccccacattcttgccaamagtgtatattctcaaacttttagaaattttgcttaactgatagggtaaaaatggaattttgagatggagtctcgctctgtcatccaggctggagtgcagtggtgcgatcttggctccctgcagcctccgcttcccgggttcaagtgactctcctgcctcagcttcctgagtagctggaattacaggcatgcgctaccacgcccagctaatttttgtatttttagtggaaacggggtttcattatgttggccaggctggtctccactcctgacctcaggtgatctgcccacctctgcctcccaaagtgctgggattacaggtgtgagccaacgcgcctggctragaggctctttcaatattatgagattaatcctttgtaatgtgagttccagatattttcttcagttcattatttgacttttgattttgtttatgctatattttaccattcataagcttttgatttttatgtaactaggtttatcaatcatagttaatcataacaggagagtctaggtaaaaaaaataattatttttttcaccacttttattatttaattttttacatttacatctttgatatatttggaatttgtcctagtgtgtggtatgaagtatggaaccaactttcttttagatggctattcagtttttccagccaatctgaggtgtcattattatgtgtacataagtcctaaatgttttggagtctaattctggacttttcattctgttccattggtttcctgcctactcttgtaccagcaccactttaattactgacgtttttcttytgttatgttttgttttgttttgttttttgttttgagacagggtctcgctctgttgcgcagggtggagtgcagtggcacaatcagagctcattgtagccttgacctccctggtgcaagtgatcctaccacctcagcctcccaagcagctgggactgcaagcatgtaccaccacatttggctaatttttctattctttgtagagtcggggtctcactattttgcccaggctggtctcaaactcctgggctcaggtgattctcccacctcccaaagagctgggattacagtcgtgagccactgtgccgggsctcactgaggtgtaaagtatgtttcaatatctgatgagtctagttccccctctgctctttttcagagttctcttggggaatccagtttttccatatgaactttagaattwcttttttcaattgtaggaaaaaaagtctgtggttatttttattgaggttggtttaaattttaataagttagtgtaatgacattttagaattgttttatctctaagaacatagtatgttttggctgggcgtgctggctcatgcctgtaatcccagcattttgggaggccgaggtgggtggatcgcttgagctcatgaatttaagaccagcctgggcaacatggcaaaatcccatctctactaaaaatataaaaattagccaggtgtggtggcatgcacctgtagtcctagctactggggaggctgaggcaggagaatcgcttgaaccagggagacggaggtttcagtgaaccgagatcgtgccattgcactccagcctgggcaacaagagcacgactcaaaaaaaaaaagaacatggtatgtctttacatttgttcaagtcttcattcaagagtattttaaaaaatgtttttgttgtttgattttttatttctttttaagtttactcctaggagttttatttttcttgttgctttaccacacagcttatgattttacttcccttgtagatataccttcagggaaaggatatgattaattatgtagagtactttagtttgagtgtcagcttgttactgtaaatcacagattcacattctggtcttttatgtcattccatgagagcagttattatgacccacaataagagatgactccaggaatcaggttttggagctgaaagccagatcctggatcttggaaagttcacctttatatatataagtgtgtgttgctcgatggattggcctcttggtatacagccagatgacttctccgtgcaaaactacaatcatgtttatgccttgtgtttaaaaaatcagtagttcactcagtaaactatttcaattgagagcctttaagaaagcctattatgcatggtacttatatatgaatggcagtctccttagctgttgctgatgtttctgcatctatttatgagtttaagggcccaatctatacactaaaaatatgctttggaaaattactaagtaactatctttggtcaaatctttaatgcaagttttaaattcttatatattacagaatttcacaaacttgtttggacagccactagtctgcttgctttctcctacagcatatccaaaagctttacaaggtatgtaccctcattgcctggtatagccataggttgcaaataaacactatctatattatgaatagtactgatctttgttttttcctcccataatgatcgcgtgtggatttatggtgtttaatatggcaggtgtcgctctgaaatatacccagaagccttgccaacaaccaggatcccttaatgtgctaccgttaggccttgaaataattcatccctgagaaagaagtggttttgttccttgctgatggggaactcatgatttgtaaattttaaaatttgttttataggtgtttgttttgatttgctggtcatatccatatagcatggttttcctatacctttgcaggcatgttttaaaagatccaaggcatcttttaagactttaagattgctggtctaggaaacttctcagtctatgccacagagttaggataacctaactggcacaacttaaagygtttcttttattcacatttttaccttgttgtgatttaaaaataaaagaacctcttctaagtctgccagagagacaggttagtgttttggccatttcttcaatggctgagaatcaaaagactttttgtccttaataatttgtctttaattagtgacamataaaatctaattctaactcccagtcatttagtaggtaaaatactaaacaaccttaacactgttttagcagtacttgtcactgtttcactatctccctaactgtgaatagtgctgatgtctctctgtgggagatggcattttactgctacttcccagccagaagtcctgtctgctgacatagtttgacacaggaagtgatggtcagcatttgaatgcctgagagaagctggaggctttcaccgttgttttaaggtaagttctgctgtttaacagggaaaaacatgtagaaatattaacttcatgtatccaaaagtaaaattactaagggatagaacttaccttcaaacaacggtaaaattctcctgctttgaagattttgttatcctgtttcttatcatttctggaggaatgtaatctctttcagttactgagcagtactttttgctatcaatctgtcctatcattatgtagttttatttaaatttacatggtcaaataggttaataccaagattattcggtctgaaagacttcattgtatagaggagaaaaacagactttggaggcaaactgactgaatttgaatcccgactcagccacttacttgctgtgtgaccttgggaaattattcagccattctgtgcctcagtttcttcatctatcaaatggaaawaataatagtatctacctcatagaataatgctgggtatgtagtaactactcaatatgtgctgtcattattattattatgcttagttgtaatacatgtccttcacacattttatccggtttcctatcttcatgctacaaagcttagacctctaacaccttaaattaattgttcarttacaaaagcagattcaaaattcttctgtgagaaatgttttggatttatccataggcataattgctactcacctctgcaaaaggggagagccttccatgtgggtgcaaaactagctgatcagtaagcacttctgagatctaaagcctatagttttctcattagccaagagttacttcatttattcaatttttttttttttttttttgagatggggtctcactctgtcactcaggctggagtacagttgtgtgatcatagctcacttcagcctctacctcctgggctcaggtgatcctcccacttcagcctctcaagtagctgggaccacaggtatacactaccacacccagctaatttttgtattttttttttgtagggactgggtctcaccatgttgcctaggctggtctcaaactcctgggctcaagagatctgcctgccttggcctcccaaagtgctattcaacatttattatcaggtactgtgctgggcactggagatagcactatgacctgacaagcacagttacattcttcacagagccaaatgtcttgtggcagatagacagagcctgatgggcggttattataagtgattcacaagaggatgcctgcaaatggacgaggaactcctgactagcagcacaatgaagacgagggaaggggatgagataatgtctaacgtggacgttaagaacatggagaactagatgggggtgggaaatgaccgagcaagagtgttccagctgagaatttgcatgtgctgtggccatgagataagacagcttagggagcatgtagagaaatttattttattgtatttttttgagatggagtcttgcactgtcgcccaggctagatgcagtggcgcagtctcagctcactacaacctctgcctcccaagttcaagcgattctccttgcctcagcgtcccgagaagctgggattacaggcgctcgccaccactcccagctaatttttttgtatttttatgagagactaaaaatgttggccaggctggtctcaaactcctgacctcgtgatctgcccgcctccgcctccaaaagtgctgggattacaggcgtgagccaccgtgcctggcctaattttgtattttcactagagacagggttttgccatgttggccaggctggccttgaacacttgacctcaagtgatccacccaccttggcctcccaaagtgctgggattacaggcgtgagccaccacacctggccaagcacatagagaaattagtcattccttctagctaaagggtagagtttgagattgtgtgattgaattgtgaaagaatttctaagatttgttaagtaatttaagtggaagacaatggggtacaggttgagcattcttagtcctaaaatctgaaatgctccaaaattcaaaagtttgagtatcaacacgatactgaaagtgaaaaattccacatatcagtacttagcacaaggtttgtttcatgtacaaaattatttaaaatattatgtaaagttacctttaggttatgtgtatacggtacatatgaaacattaataaacttcgtgtttagacttgggacctgtcccsaggacatctcattatgtatatgcaaatattgcaaatcccaaaaaacccaaaatccaaacacttgtggccccaagcattttggataagggatactcaacttgtaccatcaaaagatttaaacaggagagtagcatgaaagagcattcagttaatgtcctagagaatgaacttgggaggggcatggatgaaaatagggagatggctggagatagcacaatgactagtagccagctgcaaagatactaagcccatagaaccatagaaccaacaggactttgtgatggactaggtgtggggagggaaggcaggaatagacttccaggtttctggctgagatgctggtagaaatgataatacctgatgagaagcatatttgtagagaacaaaaggggaaataatttgctttgagttgttgacatgttgagtttgaggtgcctttgagaattaggttgaatagagtagcctagagcagcagtacttaaaagaagtaagagtgtgagtcattaaattttctattacctatatcaaaaacagtaaaaagaaacaggtgaaattagtgttaacaatgacattttgtactaaagctttgaaatcatctagtcacattttactcatctagtcacatttttagtgtccagtattttactcatctagtcacgtttttagtgtccagtatctaccgcaagacagagcagtgccagacctaaggaattcaatttaggctgctgatagagaattagaaatttgtaggcatataaatggtaactaaaatcatgggagtgagagcagtcagcaatgtatggggccaaagaaagaaactactcatatttaagagataggaagggaaagagcagctcatagagagcaactcagaagagaatgaaaaagactggcgtttgtagcactcatcagagaattctatcaagataacccataatccaacacttgccatatttggatgaaatttgttaattgagagcaaaaaatagtaagaaatatcattttccatttctcttaagttttctaggctctttctgaagtttgttcagcagaaagcaacatagcaaagtttttgtagtttcgtgaagaatctgctttgatgaattatgatttaatgagatagstttaattttatatattatcagtatattaaaatgttcctcatatgtatctcttatcttttgcaaaactattgtctatatatataacatgtttgttattacagatcaatctcagcgaggtagcctcttcactctctttttgaacaatcctctaatggccttcctatttgtctctggattgtcaagcatgcgcagaggcctatgggaaaagtgtcaagaatatcttcgaaaaatcaaccgtgatattgcccagctactgactcattcacgttcaataggtaccctcctaatctaactgcacrtttaacagaatgtactataatggcttaaaatggttacttattttaaattgtttgaatttttaaaggtatgtgtcccaggcaggaaagttgagaacgctttcctgaagtttccttcccctttgaaacataatttccatttaagcatctttttactgtcacttttctcctctttgcagatcaggcatttctccagttttttggagatgaatttcttcgcttgctcctcacaagatttatcttttgttcagccaccatgaggatgcacaagatttttcgggtaggcaaagaacattattaaagacgaattttatcattttaggtatttaagaaccatgtattatattttacctgtataaaataaggttataataaaataatattattttggataaattcaaaataatatttacaaatgtaccgtcacactggtctgctaagtaaaaaaatacatttgaatacgtaaagtataaagattaacaatattaaggcacatttgagtacctatcgtttgtttaaaagtagaacattttctggctggccgtggtggctcccgcctgtaatctcagcactttgggaggtcgaagctggtggaacacttgaggtcatgagttggagaccagcctggccaacatgctgaaactccttctctactaaaaataaaaaaattagccaggtrtggtggcacgcgcctgtaatcccagctactctggaggctgaggcaggagaattgcttgaacccaggaggcggaggttgtggtgagcagagattgcatcactgcactccagcctggacgacaagaacgaaactccaactcaaaaaattaaaaaaaataaaagtagaacattttcaatacatccctgatcctatctccctctcaaatgaaacttacatcctgaattttatttatttatttatttatttagagatggagtttcactcatgttgcccaggctggagtgcaatgactcgatctcagctcactgcaacctctgcctcctgggttcaagtgattctcctggctcagactcccaagtagtagctgggattataggcgcccaccaccacacctggctaattttttgtatttttagtagatacagggtttcaycatrttggccagsctggtctcgatctcctgacctcaggtgatccacccgccttggccttccaaagcgctgggattattggcatgagccactgcacccggccctgaaattttttttttaatcattcatttttctttgtagttttgcagcatgtatttctattcctacacaacatatttatgaatccatattgtatgtattctgcagcttccttttttccagttattcctgagattgagccatgttgattgactatagctttcactcattcattttgtttgactgtgcaacactaggcagtgtttgactatatattgcaaatcacttattcttctgataatggacatttgggttgcttccaagtttttattattatataaatgatactggccaggcgcagtggctcacacctgtaatcccagcactttgggaggcagaggcaggcagatcacaagctcaggagttcaagaccaggctggccaacatgatgaaatcctgtctctactaaaaatacaaaaattagccagacatggtggcatgcacctgtaatcccagctactcgggaggctgaggaaggagaattgcctgaacccaggaggcggaggttgcagtgagcagagatcatgccgctgcactccagcctgkgcaacagagcaatactcagtcttggaaaaaaaaaaatgatgttactgtgaaattcttgtatcagtttcctggtacacatatgtaagattttctctgaggaatatacctaatagtagaattgcaagatcagaggatataagcatatttaattttactaggtaatgccagactgtgttccaaagcggttgtatcagtttacacttataccagcaggatataagagttgctatttctgtaatccttcctttccaacacttgttgcaatcatactttatagcttttgtgaatctgctgaatgtaaagtggtaggacattgtggttttaatttttatttcgaggattactgttaaggttgagcaacttctcatatgtgttctgtttttctctttgtaaagaatgtgttcaagtcttttgcttgacttgatagtccagttttctagctgttgcttttttgtgtatggatgtacctatacaacacttcattgaggttttaaatattttagccattatatttttcacttctgtaaggaaaatttttttttcaaatatgcctgaacagttaaaaaaatattttgcagcttttggtttcagaatattatttctttctgttttattatgataattttgaaatgtaaaagaactgtgcaatgggccaggcgcagtggctcacacctgtaatctcagcactttgggaggccgagacaggagcatcacttcaggctaggaatttgagaccagcctgggtaacatagtgagacctcatttctacaaagaaatttttaaaattagccaggagtagtgatgtgtgcctatagtcccagctcttcaggaggctaaggtgggagaattgcttgagcccaggggtttgaggctgcagtgagctctgattgtaccactgcatgggccaactgtgcagttccacttaagacacagcctttttttttttttttccaaaaaataaattggaaaaattttggagatttcctacagtttggaaaacagatgaactacatagcctaggaatattgaaaacattgctcacctgggccctgcggccagcagaattggccccgctctatggctgctggggcctgcgcactggaatcgccgtggcctgcgcaccccaccatgccagtttgaacctccatggcctcaaccagattcggaatgtcaaaaagcagagtgtctatttgatgaatttgaggaaatcgggaactttgggccacccaggctctgtagatgagaccacctatgaaagactagcggaggaatcactggactctttagcagagttttttgaagaccttgcagacaagccatacacgtttgagkactatgatgtttcctttgggagtggtgtcttaactggtaaactgggtagagatctagcaacctacgtgatcaacaagcagacaccaaacaagcaaatctggttatcttctccatccagtggactcaagcgttatgactggactgagaaaaactgggtgtactcccacgattgcgtgtccctccatgatgtgctcgctgcagagctcactaaagccttaaaaaccaaactggrcttgtcttccttggcctattctggagaagacgcttgatgcccagcccggttttaaggatattaaaagctgtcaggccaagaccccagcttcattatgcagctgaggtctgtttttttgtttttcgttttttgtttttcattcctgcttttgargaacagctctgtggaaagaacgtgttgcctcctaccttgcccacaagttttgatttttaatttctacagaagatttttttggattaattgtctgatttcctccctcatatgatatcctttatcttttataatgtcttatccctatacctgaatataacaacctttaaaaaagcaaaagaataagaaggaaaaattccagcaggagaaatgaattgtcttcactcttcattctttgaaggacttactgcaagaagtacatgaagagcaactggttaacctgctcactgttctgtctcaaaatgagacacattaacgggtaggctacaatgttcctggrcttctttcaaagtggaagcacttctgagctctttagcattgaagtgtcaaaagcaattcacatgggaagacaatttcttatatgtgctttgtgactgccagggtgtggcctgcactgggttgtcctgggagacctagtgctgtttcttccacatattcacgtgtgtgtgtgtgtgtgtatttttttattattttttcattttaagggttagtatggaatcagctgctacaagaatgcaaaaaacttccaatgacaagaaaggaggaaaaaaaagccattttcatgagctgagtgatgtagcataataaacaaaatcatggagctgaggaggtgctttgtaaacgtgaaggggcataaaaaggaaagagatacttgtgtcaataaagagagcctggtcctagacgtagttcagccacaaagtagttgtgcctttgtggacaagtttcccaaactccctgagcctctgctttcccatctgttaaatgaggggatagaatatggttgatttccagcattcagtggtcctgtcaagcagcctaacaggctagctctaattcccattgggtagatgaggggatgacaaagaacaatttgtgagctatataggaaacattgttattggtgttgccctatcaggatttcagttgaattcatgttaaaattacagccgtcctttattgtacacttattgggttaagcctattataccatattacctcattttaatttttactgacctgcactttatacatgaagcaacaaggctccaggacattaaaactcacacaaagttatgctcatgttatattattttcttacttaaagaaggatttattagtgacaagtttgtattaatatgtagcaaaggcttttccaatgggtgaataaaaacacattccattatagtaaaaaaaaaaaaaaaaagtcaagctgggagaagtggcatatacctatagtcccagctactcaggaggctgaggcaggaggactgcttgaagccaggaattggagatcagcctgggcaacataggaagatcctatctcttagaaaaaaaaaactcttaataatgaaacagtataaacagaagctaagtaaaatattttctttctcctgaaataaaattattttttgagtctgatggaagtgtttaagtgcagtaggtcagtgccagtgagaaaaaaaataaaatcatacaaaaaaagaaatattgaataaattaagaaaaaggtatatcatraatacataaaatatatgtagacactagtctattttatcatttactactataagatatatacaaatctattatgaatgattaaaatttatgcacacacttacagaccatatatggtaccattcacagtccagagaagtgtaaacaaaagtaatgatgcaatattaaatcataactgtccttgtgatagtttgctgagaatgatggtttccagcttcatccatgtccctacaaaggacatgaactcatcattttttatggaaggacaaaaaaccaaacaccgcatgttctcactcataggtgggaattgaacaatgagagcacatggacacaggaaggggaacatcacacaccggggcctgttgtggggtcgggggaggggggagggatagcattaggagatatacctaatgtaaatgacaagttaatgggtgcagcacaccaacatggcacatgtatacatatgtaacaaacctgcacgtgtgcacatgtaccctagaacttaaagtataattttaaaaaatcataactgcataaaatcactgtagtgcctactgtactactgtaataatttggtagccacatcctgttgctctggcagtaagctcaagtgttgcaagtactgcttagaatgcctgtcatttccgtgagcagtttgtctctccagtaaattgtgtattgtaataaaaaatgatctctagyggttctcacatattttttattgtgtttagtgcagtactgtagtaaaccttgcataacaccatgggatccatatgaagtgatgcttcaagtgctcccaagaagcaatgaaaagtcatgacattacaagaaaaagttgaattgcttgatatgtaccatagatcaaggtttgccattgtggttgcctgccatttcaagataaattaatccagtaaggagtgttgtaaaaaaagaaaagaaaatttgtgaagccatcactgtagctacgttagcaggcatgaaaaccttacactttttgtgaaatacctttttatctcataatgaaaatgtagcgtttatgtaggtgcaaggttgctataagacatacttacaggccgggcacagtagctcacgcctgtaatcccagcactttgggaggccacagagggtggatcaccttaggtcaagatttcaagaccagcctgaccaatatggtgaaaccctcgtctctactaaaaatataaaaattagctgggcgtcgtggcgtgagcctgtagtctcagctactcgggaggctgagacaggagaactgcttgaaaccagaaggcggaggttgcagtgagctgagatcacaccactggactccagcctgggcgacagagcaagactccattcccccccgacatacacacaaaaaaaagacatatattatgatttgagaaaaagcaaactcattatataacaaagcaaaaggaaagtgaaggatctacagctagagaattaaattctggcaagaaagggtttgataattttcgaaagagctttggctttaaaaatgttaagataacacgagaagcagcttctgccaaccaagaggcagcagacaagttcccagaaagtaccttttctggaaaaaaaaaaaaaacctgccacaaaagacatttattagtaaggaagagaagtgaacaccaggatttaaacaggaagggatagacaactctgttattttgtgcaaatgcacttgggtttatgatcaggagagtctttatctataaagctgctaatgcaccttgacagaaaagataaacaccagctgccagtacaacaagaaggtctggacaacaggaactttcttccagattagtttcgttgatgctgtgtccttgaaatcaggaagtaccttgccagtaagggactaccttttaaagtttttttgatatttggcaatgccgtggctgtccagaaccccattaattctatactgaaggtatcaaagtggcctacttgccccagaacacaatgtcagcctctagatggggggtcctaaggacctttaaggttcattacacagagtatgtattatcaaaactatggaagagaacccccaatggagagaacatcatgaaagcctgaaaggattccaccattggaaatgccatcattattacagaaaaaggcttgaaagccatcaagcctggaatcattcctgctggagaaaactgtgtctagatgttgtgcatgacttcagaggatttgtgacaatcaaggaaatcatgaaagagattgtggatgtggcaaaaagggtggggagtgaagggtttcgagatacagatcttggagaaattcaagagctaatagacaccacaccagaagaattaacagaagatgacgtggggtggacatgaatgtttctgaaccagtgccaggaagcagacatagaagaagcagtggcagaaaacaaatggacattagacaacccagcagaagggtttagattattcaggattgggcttttgacttctatgagatggatgcttctatgataatggacactgaaatgaaagcaaatagtggaaggattggtgccatatagaaacattttagagaaatgaaaaagcagaaatgtcagacacaaattatgacatatttgcataaaattatacccagttgcctgtctctcctgcctccccttccatctccttcacctctcctctctctgccacccctgagacagcaagaccaacccctcctcctcctccacagcctactcaatgtgaaggcaatgaggatgaagacctttatgataatccacttccatttaatgaatagtaaatatatttctcttccttatgattttctttttcctttttttttttttttttttttttttgagacagattctcactctgttgcccaggttggaaggctggagcacagtggcgcgatctcagctcactgcaacctgcacctccggggttcaagagattattctgcctcagcatcctgagtagctgggattacaggcatgttccmccatgcccgcctaatttttgtatttttagtagaggtgggatttcgccatgttggccaacctggtctcgaactcctggcctcaagtgatcctcctgcctcagcctcctaaagtgctaggattacaggtgtgagccaccgtgctcagccctggccaattttyttagtaacattttcttttctcagccsggcgctgtggctcacgcctgtaatcccagcactttgggaggccraggtgggcagatcatgaggtcaggagttcaagaccagcctggccaacatggtgaaaccccgtctctactaaaaatacaaaaattagccgagcatggtgtgagcacctgtaatcccagctgctcgggaggctgagacaggagaatcgcttgaacctgggaggcagaggttgcagtgagccaagattgcaccattgtactccagcctgggtaacaaaagcaaaactccgtctcgggggggaaaaaattcttttctctagctaactgtattgtaagaatacagtatataggctgggtgtggtggctcacgcctgtaatcccagcactatgggaggctgaggagggtacatcacctgaggtcaggagttcaagaccagcctggccaacatggtgaaaccccatctctactaaaaatacaaaaattagccatctgtggtggcatgcacctgtaatcccggctactcaggaggctgagacacgagaatcacttgaacctgggaggtggaggttgcagtgagccaagatcgcgcgactgcactccagcctgggtgacagagcaagactgtctcaaaaaaaaaaaagaaaaagaaagaaaaagaaaaaacaatatataatacatataatatacaaagtatttgttaattgactgtttatgttatctgtaaggtttctagttactggtaggctataagttgaattgcttgatatgtaccatagatcaaggtttgccattgtggttgcrtgccattttaagataattaatccagtaaggagtgttgtaaaaaaagaaaagaaaatctgtgaagccatcactgtagctacgttagcagccatgaaaaccttacactttttgtgaaatacctttttatctcataatgaaaatgtagcatttatgtaggtgcaaggttgctataagacatacttacagaccgggcacagtagctcacrcctgtaatcccagcactttggcaggccacagcgggttggtcaccttaggtcaagaattcaagaccagcctgaccaatatggtgaaactctcgtctctactaaaaatacaaaaattagctgggcgtcgtggcgtgagcctgtagtctcagctactcgggaggctgagacaggagaactgcttgaacccagaaggtsgaggttgcagtgagctgagatcacaccactgcactccagcctgggcgacagagcaagactccatccccccccscmaaaaaaaaaaaaaaaaaaagacatatattatgatttgagaaaaagcaaactcattatataacaaagcaaaaggaaagtgaaggatctacagctagagaattaaattctggcaaaaaaagggtttgataattttcaaaagagctttggctttaaaaatgttaacacgagaagcagcttctgccaaccaagaggcagcagacaagttcccaggtgccactgaggggaaaggatacctgcctgaacaggtttttagtgcagaagaaagtaccttttytggaaaaaaaaaaaaaaaaactgccacaaaggacatttattagttaaatttcaggtagttaaaagttatacatggatttttcagggagttgaaagttatacwtggatttttaactgtgttagggagggggctcagcatccctaacccctgcattgttcaggggtcagctatatttgagttctgacatatttgtccatttatggattcgtcttaccattcatcagtagatcttttttttttttttttgaratggagtcttgctctgttgcctaggctggagtacaatggcgtgatcactgctcactgcaacttctgcctcctgggttcaagcaattctcctgcctcagcctcccgagtagctgggattacaggtgtgtgccaccacgcccagctaatttttgtatttttagtagagatggagtttcaccatattggccaggctggtctcgaactcctggcctcaggtgatccaaccgcctcagcctcccaaagttctaggattacagggatgagccaccacgcctgacaccatcttattttttaatgcattttgaagtaaattgcggacgtcacccacaaacacttcatcatgcatatatgtaatatgtttactttttttttttttaatgagatgagatcttcctatgttgcctaggctgatcttgaacttctggattcaagctatcctcctgcctcagcatcaaacatagctggaactataggcacattgccactgcccaactactaatttttttttttttttttttaatttgagacagagtctctgtctgtcatgcagtttggagtacagggatgcaattgtagcttactgcagcctcagtctcctgggctcaagcagtcctcctgcttctagcctcctgaatagctgggaccacctgagtacggtgcaccaacatgcccagctaatttttaaatttttttgtagagatggggttttgctgcattgcccagggtggcctcaaacttctggcctcaagcaatcctcccaccttggcctcccaaagtggggtaataggcatgagccactgtgacccacctactaattcttttttatgtaaagtttacatacagtgaaatgcacaaaattaaagtttaccattaagtgagttttgaggaaatacatctgtgtaacctaaacctttgtcaatttgtacaagatagcatcattccagattgttccttctatcctcctttttagtcagtccagtacccattaccccagaggctgtcactcttgtgattgttttcactcgagattacttgcatctgttcgtgaacttgactcacacagtatggactcttgtgtaaaccttctgtgactaagcattgcattgtgcttgagattcattccagttgtttcagatatcagtagctcattcctttttgttactgagtagtattccattgtctgagcataccacagttcaggcattctcctcctgatgaatacatggcagttgtacagtgttggctattacgggccagggcatggtggctcctgtctgtaatctgaatacttcaggaggccaaagctggggygtcgcttgagccccagcagttccatgttacagtgaattatgatcacgccactgcattccagcctgggtgagagagggagttcctgtctttaaataaataaatagttggctaatagaaataaaaccgctttttattataaaaaggcttgtacaagcctttgcacagacatttgttttgaatttttttggtcatagtattggtatgtgtttagttttataagaaattgcagtgattcctcagggatctagaactagaaataccgtttgaccyagcaatcccattactgggtatatacccaaaggattataaatcatgctgctataaagacacatgcacatatatgtttattgcggcactattcacagtagcaaagacttggaaccaacccaaatgtccatcaatgatagactggattaagcaaatgtggcacatatacaccatggaatactatgcatccataaaaaaggatgagttcatgtcctttgtggggacattgatgaaggtggaaaccatcattctcagcaaactgtcgcaaggacaaaaaaccaaacaccacatcttctcactcataggtgggaactgaacaatgagaacacttggacacaggaaggggaacatcacacatcggggcctattgtggggtgggggggatgggggagggatagcgttaggagatatacctaatgtaaatgacgagttaatgggtgcagcacaccaacatggcacatgtgtacatatgtaacaaacctgcatggcacatgtaccctagaacttaaagtattttatatatatatatatrtgtgtrtatatatrtgtgtrtatatatatatrtgtrtatatatrtgtgtgtgtatatatatatatatatatatgaaattgctaggccttatctcaaagtggttgtaccatagttacattcccaccagtagcttttgaaggttgcttttcattcttgccaacattgttgtcagacttttaaatctgaccattctgatggatatgtaggggtatttaaaatttcatcaaaattcttttttttttttcatttgaaatgcttttttttttaaattttattattattatactttaagttttagggtacatgtgcacaacatgcaggtttgttacatatgtatacatgtgccatgttggtgtgctgcacccattaactcgtcatttagcattaggtatatctcctaatgctatccctcccattgaacaatgagaacacatggacacaggaaggggaacaaaattcttaaaaaataaaatttcatcaaaattaaaagtttagttcaatgcaaattgaagctacgatgaaaaatctgagttttttcttctctgatttgtgtttttgtgtattatcccagaaatctttacttaaagttacagagattttgtttttttgtttgttcttttttttttttttttgagactgagtctcactctcacccaggctggagtgcagtggcacaatcttggctcactgcaacctctgcctcccggattcaagcaattctccttcctcagcctcccgagtagctggtattacaggtgcccaccaccacacccagctaatttttttgtttttagtagagaggggttttcactatgttggccaggctgatctcgaattcctgacctcaagtgatccctctgccttcacctcccaaagtgctgggattacaggcgtgagccaccacgcctggccttctcctattttcttctaggaattctatagtttcagcttttacatgtaggtctatggtttattttgagttaatttttgtttaaagtgtgagataaaggttaaagttttttaatatgcatatgcagttgtcctagtaccatatgttgaaaagatttttcttttcccattgagttactttggtaactttgttgaaaatcaattaagcatatatgtataaggatatttctgaactctaaattctcttccattgacctacaggatttgtctcaaatacactactgcctttactattgtagctttaaaaaagtcttaaaatctgatagggagagtccccttccccaaaagatttttaggtattttggttgttttagttcctttgtacgtctatataaattttagcatccatgtcacattttgcttggaattgtattaaaaatctatatataattcacctgtggggaattactattttaataatattgaaccttccagtcaataataatggtrtatatcctcatttacttatatgtttagtttctttcaccaggattttatagtttttatcatacaggtcttgcatgtgtttcataatttattccaaaatattttatgttccagtatgctttaaaaattgaattatttggctggacatggtggctcatacctgtaatcccagcactttgggaggccaaggtgggcaggtcacctgaggtcaggagttaaagaccagcctggccaacaaggcaaaaccatatctctactaaaaatacaaaaattagctgtgtgtggtggcgggtgcctgtaatcccagctacttgggaggctgaggcagggagaatcacttgatcccgggaggcggaggttgtggtgagccgaggtcgtgccattgcactccggcctgggcaacagagtgagactccgtctttttaaaaaaaaaaaaaaaattgtattatttggccaggcgcggtacctcacacctctaatctcagcactttgggaggcagaggcgggcggatcacaaggtcaggagttggagaccagcctggccaaggtggtgaaacctcatctttactaaaaatacaaaaaaaaaaaaaattagccgggtgtggtggcgtatgcctgtagtcccagctacttgggaggctgaggcaagagaatcacttgaacctgggaggcggaggttgcaatgagccgagattgcaccactgcactccagcctgggcaacagagtgagactccatctcaaaaaaaaaaaattgaattatttttatttcatttttcagttgcttgttgctaatacatagaaatgcacttttaaaacactggccttgtggctgggtatgctggctcactcctttaatgccagcactttgggaagctgaggcaggcagatcacttgatcccaggagttggagaccagctgggyaacatggtgaaaccctgtctctacaaaaaatacaaaaaattacttgggctgtggtggcacatgcccatagccccagttacctgggaggccgaggtaacaggatcacttgagcctgggaggtcaaggctaccctgagtcatgatcatgccactgctctccatcctgggtgaaagaatgagaaaccctttsttaaaaaaaaaaaaaaaaaatacagttgaccttgtgtcctgcagtcttgctaaattttgttagttcttttagcttttttacatgttccttaaaattttctatatacaagatcatgtcatccatccttaaacaaaaaacagctttacttctttttttccaatctatatgccttttcttgttattagtgctttatatcagggctaggtcttctagtaaaatgttgaataaaagtagtgaaaatggacatccttgccttcttcctgattttaggggaaagatgttagtctttaaccataaattatgatgtaaattgttggttattcatagataccctttctcagattgactgagctcccttccattcttaatttactaagagtttgtatcaggaatgggtatggatgattcgcaaaacttttttctgcatctactgatctaatatattctgttaatggagtgaataacattaattgatcttttaatgttaaatcagccaggcgcggtggctcacgcctgtaatcccagcactttgggaggtcgaggtgggcagatcacctgaggttgggagttcgagaccaacctgaccaacatggagaaaccctgtctctactaaaaatacaaaaattagccaggcgtggtggcgcwtgcctgtaatcccagctactagggtggctgaggcaggaaaatctcttgaacccagcaggcggaagttgtggtgagccaagattgtgccattgcactccagcctgggcaacaagagcgaaactccatctcaaaaaataaaaaaaaaagttaaatcaaccttgcatagctattaaacccattttgtggtcatatattgtcctttttgcattgctgggttgaatttgctaatatttcattatggatttttatatctgttttatgaatgattttggtttttatttttctcgtaatgtcttcatgtggttttgttatcaggatagcgctgacctcataaattgagttgatatgttcttcattctcttctatttcttaaaaagtttgtttagattagaattatttcttccttgaagccacctgggcctggaattttcttttttagatttaaaattatgaatccactttcaaagggctgtttatgcattctgttacttcttagtcaattttgataatttgtgccttgaaaggcatttatctaatttgttggcataatattgtttataattttccattgtccttttattcctgtaggcactgtagtgatctttcatatcccttattagtaatttgttttttctttctttttctgtcttggtaaacttccattaactttcgtttttttcactaccgtttgtttctttttttttcacttatgtatgtatttatttatttaaaaaawttttttttgagacagagtctcactctgttgcccagtcaggagggcagtggcgtgctctcagctcactgcaacctctgcctcccgggttcaagcaattctcatgcctcagcctcccaagtagctgggattacaggcacccgccaccatgcccagctaatttttgtattttttggtagaaactaaaaaacgaataaggccatcacacccggccttatttattttaaatttttgagacagtgtcttgctatgttgtcgaggctggcctggaactcctgggctcaagagatcctcccatctccatcccctgagtagctgtttctcttttctgtttcatttatttccattcatactttattattctttcctttttactttaatatatattatagtgttttaagcttagatctgaaaccttctcttctaacacaagcatttatctttaatttttttttttttttttttagacggagtctcgctctgtcgcctaggctggagtgcagtggcgcgatcttggctcactgcaacctccgcctcttgggctcaagcaattctcctgcctcaccctctcaagtagctgggtactacagatgtgcaccaccacacccagctaattttttgtatttttagtagagatgaggtttcaccatgttggccaggctggtcttaaattcctgacctcagataatccgcctgctttggcctcccagtgtgctgggattacaagggtgagccaccacacccggccaccttttatttttgaccacatattatatgacttatttatatggaatgtccagaataagcaaattttttgataccagaagcacatgcgtggttatccagggctgagggaggggactggggcgaatgggggagggatctgctagagaataaagagcttcttttgggggtgacgaaatgctctaaaattggttgtggtgatagttaaacaactttctggatatattaaatgccactgaattgtatactttaaatgggtgaattgtatggtatgttaattgtatcttaataaaaccgttactaaaaaaatacaaggtgcctctcactagctgtgtgacattgaagagtgatctcacctttcttagccttagtttacttatctgtaaaatgataacagaagctacctcatgagattgctgtgatgtttcagtgggaggattgtgtaactattgagcatagaagtacttaccttttaagcattgctttaactgtatagtttcagttttaaaatttattcagtttgttttttaacccaagcatgtgaattatcttggcagtggttttatctgcacttgaaaagaattcagtgtattctgctattactagatggaatgatataaaaatgtcagtttgttccatttgatattaaactaaattgaagagtgttctttgtatcttctgtatttttgttgattttctgtctgctttttcaatttctgaaacagtagtatttaaacctctaattagggctgggtgcagtggctcacgcctgtaatcccagyacttggggaggcccgaggcgtgtagattggttgagctcaggagttcaagaccaacatggcaagaccctgtctctacaaaaaataccaaaattagctgcgcatggttgtgcacacctgtggtgccagcttcttgggagactgaggtgggaggattgcttgagctcattgcaaggctgcagtaagccagcctgggcaacacagtgagattttatctcaaaaaaaaaaatttatttttgtaatgtgtgagtgagtcctataggtagagagaagttaacatttgtatgtatgaactgttgcatgaaatgtacagaaaagtagcaacttsttcaggaaattttaaatgtatggcaggattatagtttatagaacttaccaaatgaagaagaatttctaggccgggcacggtggctcacgcctgtaatcccaacactttgggaggctgaggcgggcagatcacctgagttcaggagttcgagaccaggctggccaacatggtgaaacacctgggctggagtgcaatggcgtgatctcaactcactgcaacctccgcctcccgggttcaagcagttctcctgcctcagcctcctgaatagctgagattacaggtgcccaccaccatgcccggctaatttttgtattttagtagagatggggtttcagcatgttggccaggctggtctcaaactcctgacctcatgatctgcccgcttcggcctcccaaagtgctgggattacaggcgtgagccatggtgcccggctgccccagcctcattttaatttccaaagcaatatctttttatttatttaacatatacttgttgaaattctatatgtgttaggattttccccccagtagcatgaattatatggtttccacgtgatacagagcatagtgtctagcaacaataggcctcagtaaacatttgtggaataactcactaaatgaatatattacattgattcatctgaaactgtcatttttagaggtcaaaatggttaaatatcagcaattcaatattcaacaaatatattaataagaatcattccagtataaaagtgaaaatacatattactccttgacactgttatcaatgtgtataattttctttcattagactacaaaacttgacttttctcttctttgcctaccaggaaacacgaaattatccagaatcatatccacaactgccaagggatgaaacagtggagaatcctcatctccagaagcacattttggaattagcatccattctggatgttcgaaacgtgttctttgagaataccattgatgactattaaaacaaaaaccctgttgtcgaaacaagttttcattttccacaaattttaaatggtgcagttttctaacgtgataagacacatagtggtgttacttagtttttattttttaatttagggccaccattttaaaaacaaacaaaaaaatgttcacacttttagggtaactgttttaaaatgcaacctttcaggtcttttaaaatcttaaccttggaatttttattttttgattttgagggatggatatttacctccaacttctaatcctacactcaaatagtcactattctcaccctgagaagagtaaatcatttatttttgtataatgaggtaaatccaactcttatacttggacctaagttaaatgtctggatttggaaatatgtaatggttcataatgatgaagctagccaccatggactactgaaaatcaagaacagagtccctccataatatattttttctcattccaacttagctggtagaaaaatgtttgatcctttgaaacatgatcaagccagttttttgaaatcatttaatttctttcaatactgtcataatttcagaaattggattgaattgcatctgaaagctacatcttgattgaggacttgaggtggtaatattacttggaatgtatgagtattatgagatttatttgcatattttctttgtagtctgtgaatgctggaaatgaaaaaggaaacaactttgaaatattttagtcaaaaaaccatgtcattggtttcataatacaatgtctccaataggaattctatttaaactcttggtttatgagatcacatttaaagactggattgatgtctgtgacataaagttttaattttttgcctcattcaaatttatgagacttcaaagtcatagatgttttaaattttggtaaggggtaactgggtgttatgaaacctaaaatgtaagttgattttgcattggtaatttggaaataagatttattaacattccctgtatttagtattttatattcatgcacaaaatttttattatcttaaataggactcagtgtatattataaagatttttcttttttgtgttttccttccctgtcattccctttataatttcacagtcacttgctatgaagtcctccctcctttttgattatgcagcattcaatttcagaaatctatgaatgagaaggccttatacctaattttctgtacaggatcacatctggcagtcccaggagaagtgagctgattgcttttgatatctctttcccatggccctaggtaaattatactctaaatttatttattttttttgaaacagagtcttgcttttgttgcccaggttggagtgcagtggsgctatctcggctcactgcaacctccgcctcccaggttcaagcaattttcctgcctcagcctcccgagtagctgggattacaggtgcccgccaccatgcctggctaatttttgtatttttagtagagacggggtttcaccatgttggtcaggctggtctcaaactcctgaccttgtgatctgcctgcctcagcctcccaaagtgctgggattacaggcgtgagccaccgcacctggctattatttttaacttggttttcatttmtggcatagagactaatttgggtctaagttattcccattcctgctttgatttgctgatttttcaaacctgaagtccaaagttactgtttttggggtttggggacttggggagtattttacttttttttttttttttttttaagagacagagtcttgctttgttgcccaggttggggtgcagcggtacattcatggctcactgcagcctcaaattcctggattcaggcaatcttctcacctcagcctcccaagtagctgggactacaggcatgcgccaccatgcctggctaattttctttattttttaattttttgtagagacatggtctcactttgttgagcaggctggcctcaaactcctgggctcaagtgatcctcctgcctcaacctcccaaagtgctaggattacaggtgtgmgccactgtacctggcctgtttactttttaaaaatttttttgtttgttctttcaaacagtatttcagaaagcttgggaaaagttaccctggaaagatttcctttgctagtgggttttcattttcaggtaaagactgctttccttttttttcagtatcttaataaacttcatagctttcctttagtaacagtgttcattgaactacagcaatagactatcttcggttttctgacctcttgtttcaattccccttaagtcctgtgccagttatgctcctaccaacacagagtttcctgtcctctaatgtttaaaatagtatttactgttctgagctttatcctcccccgttaagcataaagaacactggtctgagaactaggagacctaagttctagtcctggctttcctggtaacttaagcgttatgccctttgacaactgtcttcatgtctctgcttgttagcactctcatctgtaaaatgaagaggttggcccaggtcttctccaactctgattctgtaatttggactcttggttccaaaaatattgatttccccactccaaccaccaagagaactatttaccctgtttgtagtgtacacaaccttttcttttgtaagtcatatttacctagattttgttcaagaaaatctgggtcccacttagctgttttagaaactagtacagacagagactctcctgaggaaattagagcttttatgattagaaacatgcttgtctaaaaatgagggtcttagaaatcacaacattgacccttatgatgttgccccttaagctaatagtgtaattccttactggtagttaaaaatctaaagtggactgaagtgatcttgaatcttcaaagagaggaaaactgtgctggaaaatgttattgtttcattgatgccttcaaaaaaatgcgtattaaacaaagactatactccagattttcttctgggcattggggaagcaaacaaaatagacttaaaaatcctcatgttcatgaagcttacattctagtagaaggagtaaggcaataaacataagtaatttatgttagaaaatgttaagtaggatggaaaagtgtagattatggtaaggtaaatcttttgtttgttttcttaagagaagaacaatgtttaaaagagtgatcaagcagggcatggtggcatgaccctattagtcccagctacctgggaggccgaggtgggagggtcacttgagcccaggagtttgtggctgcagtgagctgtgattgcaccactgcactccagcctggatggcaaagcaagacctcgtctctggaaaaaaagaaaagaaaaagtgatgatcagggtaggcttcattaggaaggtcacatttgcatgaacactttgccttttctttctttttatgaaagttttaaacatagtttttttgttttttgtttttgagacggagtttcactcttgttactcaggctgcagtgtggtggcaggatctcagctcactgcaacctccaccttccagtttcaagtgattctcctgcctcagcctccccagtagctgggattacaggcatgtgccaccacacccagctaattttgtgttttgagatggggtttcaccatgttggtcaggctggtctcgaactcctgatttgaggtgatccgttggcctcggcctcccaaagtgctgggattacaggcatgagccaccacgcccagcctaaacatacagtttaataaatcctccttgtacctyacccagcttctgtatttctttaatcaagggagaagaattatctaaaaggacagttgcccaatgggcttgagctgatgatagtggcaaagaatttcattttttaaaaatgcataccacctgccctttataaaaaaatttaaaccctaatgtatttaattttataattcataaaaatttaaatattggaactaagaacagagcaaagcaaagggaaaaagcactcctttgttttcaaattgcacaaactgtccctggagattctgatagtctctcatctctcttaactatcactgtaaacaacatagaaagcataagactgcaagaagtcagttatacacaaaacaaaatgaagcacagtggaattttctctttctttatctgtatatttctgaagttggtaaagcaactatcttctctattttacagaagagaaagctgagacccaaaaagctattcatagtgatagagctagaactaaaactcagatctcctcatctcagcccagtcttctcagtagctcagactgctttctataatgaacaagaaagaataattagggatttgtattttggcacaaaacagtatcaaatttttattgtaaaaatccacaaatctgacattttatcttttattctagccaggatgtattcttcatttgcatgtgtgtgtttctcttagaaagtggtgctctcaaacctttcaaagcacagaatttattgtaccctctttatttttaccaaattgaaacgtttcaggatttcagaagcaaagtgcaatccaattgtggctggagttttcctgatagaggatccgggtggttccctcccctccaacttctggctactgccctttatttcctttgtgcaatagaattccctgaaacagattatgtcgtaattatactgatttagtcaggataatgggaaaagcgacaaatcggatttatgtattaggtattatggagctttctttagcactctcctccaagtttaatctctgacatgtgtgrtatagtaactttctgtctctgagaagcagtttggacccagctgaaaaattttatttatggagacttgtaatcagcctgatatacagagaacactctggactggaaatatagtcaggtaccaaggtctgctaatttggccattgccagtgattcaaaaccacctccccaccctgagtaaaagatttgatatgaatatgaatgctatgagtctcctggtgatgttttgggtgtatatgttcctgtgwgtgtttggaaatcatagagggtatttaccttgagggctcttttgttgaccttatttatttgaaattcttattttatttgtaatggcatatgtatatttttgtgatgctacatgcaatctctgtgtatactttttgtatatatgtatacatatttgtaaatatattggtatgcagtgatacagtatgtgtatattatgtacccatacccattgtgggctgaatttatttaagttctgtgaggacatcctagtggcattgttcatgctgctgtaattaggttgtggctgtatctcattcataagcctctattttgagaggcttgtgtttggataaaatgggctaatttggagttgaaattaggatatgaagatcttaacagaaagctagatatttattcttagctttaaaatcacctgcaaatttttatttaaactgatgataaattagtgatataacctgaaaaacctaagtatgtgaaactgagacaccagcagattcttaggctgtagtagtcctttattttcttgatccatatttaagtattattactgagtagtaaattatgtatattggggcttaatagagaggctgtggaaaaaaattgctttaatcacatttaaaaacataggaaaatgtccattaaataggggaaatatattcccagttgtcatttttatgcctcatactgaattttgattttggaacaattcttttttcatcagtgttttatgtgtctctatgaggcagaaaagggggcattagctaagggatggcctaacctaagtaggataggatttagtgaggaacgggaggttgttaatttgtatatttgcagcagctatgattaatttagtcctgtcttggcatttccggctacagattttttcttactggacttgcatatcaaaggtgagtaggctcatctgagaaaatgcttccactgaataaaatgccttcactcgtattgctgtgtctctatgagaccacttgtgttctgcaagttgatgatatattcgcacatgaagtagagtttttaatattagatgcatggtgtgctataaaaatctgggccttcaaacctctcccaaggatgatagggttggggaggataagagga

SEQ ID NO: 9948 - DNA, 21211 bp, Homo sapiens
agctcctctggggtgggcacaccctcagccttggcagctgcaaaaatgctgaccagctgtcctgccccccaatgaatggtgggttgtggccaggcccccggcactgcgctccatccggctggctggggctgaaaaccctgcctatctgaaaccactgaaagatgagggggtgccaggaggggggcttctgggggatccatagatgacatgctcatttcctgggttcatctgctgaggagggctggcaggacctgggctgatgtcatccaaatagctcagctcattctctctaattctggagacaattatttgctcagagaaccacctgcccctctctcggtgcctccagcctctctccacccccaccaaccctgtccacatagcacctggattctgctgcctcaaacatggattgctcakgccctccctggctcagtagccctcaatggctccccatyatgtgcacagcctggcatccagagtcccycccccgcaaagtcgtmctttattcatgattgctccagcctggtgggtcttttcctcacaaatgacctgccttctgccacccagggcagttttcctcattcctccatgcctgtccatccaagccttcttcccttaagagactgggatccaaactccatcctccaggcagcccttgtaggtttagtgtccccacatctatgcattcccctttcctctcacccagcaactaccctcttatattgtactcggttgtcttgccctgctcttggaggtcttctctctccagacttatccgacccaagagtgctgagaggaaagagcaagatacaaattagagccatgggttcacacacaaatgtgtcaaactggtcatgatcacagacacagaaacaacaatacaaagacacttacaaattatacatgtaagccaaataaaacatgtggctataaaaccaagagccacacaaatgtaatgtaacatgccatttaatttttttcttgaatgtccaagccagatgttcctggtatcttaggggtttgatcctctgatatgacgcattcccccgactgtttcacagatgggtataactggcccagagatgtccacgcctgcccaaacattgctcagaattcaattctcatgtggaaagctagacccctcccatggagggcatgaaagaaaaacagagccagacgggcagctcagatcctgcctccccaccaggccagagggctccccaagcaggggtgctggctcctcccacccctaaatcttcccagatctcagttaaagcgggactggggggattgggggtttagtccccctagtgagctgtggccctgtcctggtttccttcagtctstccttttttccctcccgaaaaacacagrcacctcaggagccccacctaggccctcccttcctgtgggaggtccccaactctccttcctcctctatcactggcctcatcaacaacactgggtgtctcatgcctaatggccagtgtctgactaactaattcatgctaaggtgttaaccacttgttaatagcttgatgagcttcttctcccaggggtgcttgcatttggagggacccagagactaaatcctttgagggcaggaaactttttatggcccccctcagcacttggtaggtacccaataaatatttgataaaagatcaataccaaaaaatctgagataatgttygtaaagtgcctcctactgagttttgtacttggctagcacttattagatggtggctgttatttttatttatttatttatttatttttgagatggggtctcactctgtcgtccaggctggastgcagcggtgcgatctcggctcactgcaagctccacctcctgggttaacgccactctcctgcctcagtctcccgagtagytgggactacagacacgagccaccatacccggctatttctttttttgtatttttagtagrgatggggtttcaccatgttggccaggctggtcttgaactcctgatctcaagtgatcctcctgccttggcctcccaaagtgctgagattacaggcatgagccaccacacccggcctacaatttttatttttaatggcaaattttccaatatcaaggagggtctgagttggcagattctttgagcctggggcctgagggaaccccactccctccctttcytacaacatcagatgacactgcgtgggaacgtgctggtccagaggagagaaaggagagaggggaggacaggccaattccccaattctactgagctctctgcttttagttgttgataacatttattatgtattttataaagcaggcactttctatggattaacakgttatcatcacaactatctcaccaggagtttatttcccatttacagctggggaagttgaggcttagagagaccgagcaaactgtgcggctgagtggtggcatggaattcagatccctgcagcagcctaggctccaacctggtgccactccaggtggacaacaggcctagaagccccctaaagatgccctgactccgctctgttttgttgcttctccaacaaggggctattcactgattctcccatacctgggaggggatgttcagaggctggtcctgggctctcagggaaggcacagaaggaggaattgactgggacatgggaccctccccaggacccaggacccaggacccaggccctaggaaacagcaacctgcacatgggtgtcaagggacrgaggagtcgggacgctggggaggggagactgcaaaatccagggttttaagcaggagttcagaagagcagtgggattggggtcagaggagatcgggagataaggggttccaggctgaataagaatagcttggcaaaattttggaggtagtcgaagatggggccagtgggtgagatgtccttggctggggcatcgaggaaggaggttgtgggatgggttggggtggctgcagcagcggcagggacactaaaggctgggctagggctctgccatgcatgtcaagaaatgcagctttcagagccagagatggaggaccacaagcaagagctctagaaaaccttcaaatcttcagtgtacaccaccaactcctgtgtccccagcactgagcatggtgccagcatacagcaggcactcagtagaagtccaccaaaggaagaaaggaagggtgggagggaggcaagrgttctagaaccaaactggagtccacttgcycggcccaggaagaccagatatctacaccgaggtttgcagcagtggaaaggaaggcgtttatttgcagggcaccaagcaagagggaccaggcagctaatgctgaagtcccaacctccctgatggtgtgaagattagaggctttaaaggcggggtaaatttcagcagagcagaagttacaggcgaaattcaatacatgaaggctacacattggctttggcctaaaagggcaggatgtctttcttttttttctttatttcttcttaaaaaaagtaggatacctgtacagaacgtgcaggtttgtttcataggtacacatgtgccatggtggtttgctgcacctattgacccatcctctaagttccctcccctcacccctcaccccccaacaggccctggtgtgtgttgtttccctctctgtgtccatgtgttctcaatgttcaactcccacttatgagtgagaacatgcggtgtttggtcaggatgtttttaagtgggagctcacaggtcataaacagattcaaagattttatgatttgcaattggttaaggaagagaaactttgtttaaaaatttggggtcagcagaaaagagtgttagctctggcttgtaggtgtgacattcttcaggcccctcaggaagaaatttagaacaaagagtggtggtcagagctcagtgcccagtgtcccttyatctgaggtctatgtgcccaggcatcccttttggtggggtttgggtttctgacaaacaactctgggacatatgttaaggtgctatctttagtttctatggcggaaccaaacatcccacrattccagctttcgtggctgttgttttgggctactgttatcttcttgcttgtcaggttgcttatttatttctccaggctagcaaggtgcccagaatttcccttgaaggaactcaagattgtcctttatttccatgcttgaggggacctgaaggcccctacgagggcgtccctgctccatctcagagtgcactaggtggtctctaatctggagaagactctgctagccttacaaagaaaaactaagatgacatgtgacatggcttcagaggatccccatgggagctgtcacagagttgcagccccwccagcacatgctaaggatgtgttcagagcggagggaggtaaggagagctcagacctggcctgtgtgggtgcaggaagacctcctggaggagagcaggatggggaagtgacagaacaagagatggcgaaaggctgagagggaaggatggagggaagatggatgggagggatgaggagggatggagagagaaggtgagaaagagagaaggcagggataggaaaattcgggtagtttcagtaagagcaaagaagacaaaatggcaggggcaagagtagaggaaggaatkcagaggattgggagggactggagtccaggctcttcccctaaacaatatgagagagagccccaaaccagcctgtctccagattttcttccctcctgtgccccacccagcaaagagctgctgttcacccatggggctccagcagggatctctgggcaagggtgatcttcagggacagagctgccttgggttgaatagggccacagtggcaatggcgatcatgggagtagctggggcccaacacaggagccagtggctaggaagcaggggctgcagccagagtctctggggctggcatcaaaggactgtttggagtagaatgacatcgtgcttactgggtcgcccccattgggtctttctggtctgagcctgcctggaggcttgcactcctggggagggctcagccagccttgttcttggctcacttgggcctggacagaggcaataggagttaagtttcatgttgataacagcttctttatttgaactctaaacagatgattactgtcctcaagttgttcctagtcttattagcagatacacattggaggagagacagaaatgaggaagtggaccacccaggaatctccataaccctccaggccatgggccagcctctgtctttgtcttctctgtacctccttccagtcaagtcccygaatttctcagccacctgccccaactccatcytccttttctcgtcctcattttctccagtgtttgaagcctccagcctgctttattatgggtgtttgaggggggwgaagtgaggatagtgcccgtggttggctctggcctgggctgcttctgtcccatgctagcgagagggtcactccacctcctaataccccatgagtgagagcagctgccctctatgggttatgtttccaggaggcctggggagaggtaatgcctgatcagtccctttccaggaaggaggagaacagaagttggaggcccyagtactctacccagtgtcctgaactatccaggaaagtccatcctgtcttcacctgctgcatccccaggaggaagccaacaacccagagaagattaatcagratagggatggtgcagtgccagtgacatccccctggagaggccagggcctrgggcaaattaccctataacagcaggttaattagataagacccaaattacatgagcaaagcttgcaagcccagcaatttgaaggtttcatgttgtttcagagrtggagagggcttgatctctagctcagcatagagaaaatgacttcttgctcccaggcaagccaaacccacgaattaagctcttgactgcccatccacaagmcccagtgccaagcacatataaaggcacctgccagtcctcactacaaccagcagaaccttttgggattttgccttcctccctccygcatctgagctttgtctccaccagcaacatgagccgccaattcacctgcaagtcgggagctgccrccaaggggggcttcagtggctgctcagctgtgctctcagggggcagctcatcctccttccgggcagggagcaaagggctcagtgggggctttggcagccggagcctctacagcctggggggtgtccggagcctcaatgtggccagtggcagcgggaagagtggaggctatggatttggccggggccgggccagtggctttgctggaagcatgtttggcagtgtggccctgrggcctgtgtgcccaactgtatgcccacctggaggcatccaccaggttaccrtcaatgagagcctcctggcccccctcaacgtgragctggaccccragatccagaaagtgcgtgcccaggagcgagagcagatcaaggctctgaacaacaagttcgcctccttcatcgayaaggtgggtcttctagggcctggggaacttgtgaacagmcctcctcttctcttcttggaacatacgattttgttacascaggagagaytgaggttagatgtgaggaagactttactgtggacaaggtaggtacatcccatcaacagggtgacctgtgtaaggttctctgtgttgtctttccagagagaaaacagaggcaggtcaatttctactggcagaggcttctcagggctcccagcaagagatgtggtccttcctcttgagggctagcttggtgccattgctaggcctgcaggccgtgtgcagaaaaggcctgtgagagmcagtctcgcccagagtaagcagggaagctgtcctcctcccctggcatgctgccctgcccactggtcacttgcccagcggatcaggagcagcaggaaggggccgcttcaggccctctgattgggcatttgctccagtcagttgaagactttcttgagaggcagaagagggcactggggaaggggactccacggtgctcttgtgctcactgctggccacagctgagtggctctgggaaggtgatctgcctgtctgtgttgccatctcctcatctctaaaatggagataataacttctgtcttggggttgttgtcaggcttataaaagaaaatgcaggtgaagatcttgtcacaagcctgacgcacactaaatactccaaaaatgattgtgattgtgactctcatttcttatctctggaatgtgggggagggaagctcaggggaggaatcaaaggtgtctagagacctgaagagatgacacagtccagataggcccctgacttctggcagaraagaaatgattatccctatcgtatgagtcactgaaggcatggaggtaaatggcattcccagggtcatttggggaaagggaagggtgaggctggaccctcagccttttgcctccagacccagaggaggagactggagggtkctgttggctctgtggcagtcaggcaccaaggacgggtcaacccaggacaaagtctatgggtgagacggtcatgtggccatcagagcttarccagctcctgcagctcagacttcctgcctggaggagtccctgctgccctcggctcagcctcaggggctaggactggctctgyggcttcttattcttctaagccttttcatatctgcaagatcaaagtgttctgagatggggtctgggtgatgggagtggactgattgattcttggctcggctggtcaaaacctacagaaggataaagtctggagacatgggaagaaagatgaacatgaggagggtcacatcctgtttataaagatggtctgcccmgagggaggggaaggaggctgaaaggcttggacagttcccaaataatttcagtctccagagatcagtcccttaacctcaggcagccagagaagaygggtaaatcctttcggcatccagatgtgttcagtagtgcaggtgtgtattgtggtgtctcaratgcaggatttactctgtggttaatgctcagcctcgtagatcacatgaaaaattcaggattggttaaaccagaccaaatgctggaagacgggctagagacaaattttcggggaataattctatcttgacactgaatcttagatagttttcccatgtcttrtgtttctgatgttggggaagacaaccttatwcaagcagtagctgtgctcatgtagattaagggaagtcacattttaaaaactgtgctccccatccscaaaaaccaaacaagaggtgtgtatggacatctccttctggccagtttcctgcctcagtgaggggctacaatgggatcaggagctccatctgtccatcatgttccatgtgccatgcttgttgcagagaagatggttctggggagcaggaccaaggagggagaggaggggctataagcaaagatgaagctggtgcctgctccaggcatttaaaatacctagaagcccttggcccaagccttactgagctctgacatgccctgaaatgaagagcagacttttcttcaggatggtcaacctgtccaaaatggtggacccatcctggcttctctgctggtattttcaatcacagccaagccctgagttggtgcaaccatggagggtgctgggtgattgcatgcacgggttacagggacatgtgtctagattcagttccgggctccaccgcttcttaaactgttgggccttggaaacagccgaagttgctctgtgtctcagttttctctccatagcagagggtaatgatttgcccacctctttcagctctattgaggagaaaatgcagatagaagctttacacaatgccctgtgagagrcacgtgtgactattactgcargggttcagcagtttctgggatctgggttccaggtgcggttcctggagcagcagaaccaggtactggagaccaagtgggagctgctgcagcagctggacctgaacaactgcaagaacaacctggagcccatcctcgagggctacatcagcaacctgcggaagcagctggagacgctgtctggggacagggtgaggctggactcggagctgaggaatgtgcgggacgtagtggaggactacaagaagaggtgagcaggaggagtccccctgtaactggacaactgcccttgtccctccaagggacccctggcagtcaccccagcttaaatgctttggaggtcagtggagggcattgttcttggtcatatcaagcagartcaccccaacaaaactctggaacttgctctctgctcctccagcctctggcctgactcttaggacaaatgcccagtgagctgggcagtgggcagagggttatctctggctctgggtttagggaatgtttggggaaaccactcacgttctcctcccatgtaagaggagggttaagtgcatctggctccaagactgctctcaagggtaactgaggaaatgcagattggagcgctttgtcatttgtaaagctgtactcaaatttggggagggcagttcacatcctggttcctctgagagtcccacagggcattcgctccatgtgctccttcctcgtttgccaagctggatctttaacagtctcattcttccaaactggttagcatgttccctcctccaggaagccttcccccacttacccctgcccagtactctgcggcccccagcacctgtatcttctgatggacacgctgctccttgctcaacgctgccctgtgaaagcaagggctttcagtgagatattaaccaatgagccctcgccattyccacaggtatgaggaggaaatcaacaagcggacagcagcagagaacgagtttgtgctgctcaagaaggtgaggggaaggcaggccctgagtcccgggggctggcctgggacctggaggaacagagcctgccaaggtgctctgttarcccccctcaaggtgaactgattcaggaagagcaaggtgaaggcagagaaaacttgatgaaagactatccagaaaaaagaatgaaaaggcagggagggtgccagtgagaggacacctgactgcatgtccaatgcagctgtggtttgaacacggagaagaatacagaggacaacactgaggggctcccctgcagccccgggacccagctcagacaccacaggcgcttcattcctgccgagggaacagattcccagggtggggtggggtagggctgggcctttgctcctttgtctcctttcccaagrcaaagtgaagagaagagagtgactccttcttcactcagggaacccaggcagggatggctgctgcctytttggctgtaccagcagtgacaggggatggtgggggcatctttcaggatgtggatgctgcttacgccaataaggtggaactgcaggccaaggtggaatccatggaccaggagatcaagttcttcaggtgtctctttgaagccgtaagtctgtctgcccacttggttcatctaggggaggctggtgggttaaactctattctaggggctgcaggagacatggaggccccagccctcagtgagacccctcagttagccaaccatctyccgcatcagacttgcgaggctcctaggtctgcacactctgagtgggaagggaatcggccargcccttgctccacggcagtgggaatctctctgggcccagcagggaacttgctttgccgcaaagcamacagccctggatggcagcagccttgggttccagcctccaagatggcatcaccagaatttgctcatcttgtttgggggtggtggttggcttccgacagcagttgagccgagagaccatttctgtgtcccctgcaggagatcactcagatccagtcccacatcagtgacatgtctgtcatcctgtccatggacaacaaccggaacctagacctggacagcatcattgacgaagtcygcacccagtatgaggagattgccttgaagagtaaggccgaggctgaggccctgtaccagaccaaggtgagctgggctgaggtggggccagggagggtgatgccagcrggcagcagatggagacagatcgtgcccagaatagaagcagtgtcccagtaagtgtctgttgtgttctgatcccaagatacatgcactcccacgacacactcatgactctgtgctttggggtccccagttccaagagcttcagctggcagctggcaggcatggggacgacctcaaaaacaccaagaatgaaatctcggagctcactcggctcwtccagagaatccgctcagagatcgagaacgtgaagaagcaggtgagagcacgttggccttggcctgtggtcaagtgcaggggagcatgagtagaggggagatgagctgctgagaacatgggcctcccagatcgctgcctgggagaagagagarggccagtgaggtcgctgcctcaaacacctggagcaggacgtccctgggggctactcatctctgactcactccaaggacctcagcctcgaagcccctccttagaaagcctcctcggcactgggctaagaccttcccccagcgatgtaccctcctggcacctgtgcttccctgtatttgtcacacttcctgttattactgacactgccactagactgaaagggggcagggagctggctgctttgtaccctgtttccccagcatctagcacagtgcctggcacatagttgcagcttgataaacatctgtggagttaatgactgagatggagaaatgggctcagggagcacccattaaggtgcattgttaaggattgactagggactactcccaggaatataggatgcagcctcggcttgtaggtgagacacaagatgtacatatacgatagcaatggcagcggcacctattcttctatcgcacttcatcctcaccaagaccctgagaggcaacagttgccctcgctgttgttacagatgaggaaactgaggctcagagaggataagggggttayacagctggtaagtggcagagctgtgatctgaaccaaggtctcctgactcctagtccagtgctccttctattcttttgtgggctttaacacttagttgctttgtgatcttggacaggttacttctgctcacttcacagggtgttgcaaggactaaatgcgttaagttatgtcaatggtatgtacagtattgagcctggtgctggcawacactaagtgcttggcaaataayggttgctcccggggtgtgtccttccctgtccccctcgactgtggtgccctgttcctgggcagctgctgcctttgcrtctgccacagcatattcgaccatctctcctcccagacctaaacaactcaagagtaytgctgtcattcatttcgtgcccttggcacaatatggctgaataaatgtctctatgctgaactaaagtggcgctcaggagggcatggctgcatgatttccatcacccacacatccaacacagggaatggggctagagctaaggagggaggtgccagccccagaaggggctctgctgcaaggaagtgtgatggtgtgtgtagggtggaggcgggccactctgccccactctaaggacccagagggattggatgtggatggttgcagtggctcctccaaatttttcgacttcaccaattccttccttaggcttccaacctggagacagccatcgctgatgctgagcagcggggagacaacgccctgaaggatgcccgggccaagctggacgagctggagggcgccctgcaccaggccaaggaggagctggcrcggatgctgcgcgagtaccaggagctcatgagcctgaagctggccctggacatggagatcgccacctatcgcaagctactggagagcgaggagtgcaggtgggcggggcgtgcccagacaggagggccccaggggtttgggaagacccaaaggagaaagcctaacacatctcartccagaagagatgagttcttaggaagtgatggggtgatgaggatagaaataatcacagtaattaacaatactaccatgagtggacatgagtatccactcagtagactgtgagagcttgcttcatggcaggcactatgctatgtagtaagctatgcagatttgctcrttcttcctgggcatactagaaacaaccaccgccctgctccctgcaaaaccccattactctatyaggcattcttgttccctcttcctgatctgtccatgtgcagcttgttgggggtgtgccggggcagccaccccagcttccccagggctctacagggatggcaggctggtgtgtggacctgacacgtgggaggtagatacactgcccctacgtgtgcaccttttgtaaactattgtttgactagggttgttgtctggttaccccaaagatttgggggtagtctccaaaacttctcaggctctgcttgcatcagagaagctttggaatttccacaggtgcctgttgggtccaaaaacccacataaggctgatggtggcagtagctttaaagagactgagctggatgacttctcttctcctcttattttatttctctccttaataggatgtcaggagaatttccctcccctgtcagcatctgtaagtatttgtatactttcacctaaaattgtaaaatctgcagcctggaaaggaccttagtgacaccctctgtgtgcagatgagggatctaagaaccagagagggaaaagctttgcctgagatyacaaagccagatggcagagccatggccaaaatcggctttcctgactcccaggccaggcctcctttattcttatccctctgactttctgttcctaggggatggcagcaatggaaagctattgtcatgggaaagcaagggttatgttgtagaaaaatgatgcatgggtctgtgtgaggcttagggagtcaggtttgcaaactgcaaccagacttgggcttgggaagtagggagggctgagggaatgagagaatgagggatcttagaggtcaagctggcagtatcagatcactgcattgcttagcagggctaaaagagttaaaccagagcttgggaaagatgcctgctgtgggacagctagcaggaggaagaggttagaggctgggaagtttagcaaaaaggctaatagaaagggcaatgggtgggtgtccaggaggacaggtaggggtattggtacctggaccaaggagtagggcctctgagcattaatggggcaagactcagccagattggatataagccraacaagccaaggacagagcattagggaagctgtctttggtacattctccccagggagagggagcgggtgtgcacctccccactcagcttctccaagaaaagccctgtctgccctggggaaaaggaggcctccccagctctctgcctgagtgggtgttggcttcggctccycctgcagccatcatcagcagcaccagtggcggcagtgkctatggcttccggcccagcatggtcagcggtggctatgtggccaacagcagcaactgcatctctggagtgtgcagcgtgagaggcggggagggcaggagccggggcagtgccaacgattacaaagacaccctrgggaagggttccagcctgagtgcaccctccaagaaaaccagtcrgtagagaagactgccccgggccccgcctcattccatgacccggctctggatcccacactgtacttcccacagcccactctcagctccatctccaccctgctggtcctgctcccatacacctggcactggccttggccacccacttctcccagcctgtgtcttcctgatcctgggaaggcctggatgacmaagcttggtgaaattcctccctgtacacaccctattaactccttggctgtggtcccccagctacaccaccagcccaggtcctggctgccagctttcctcctctgcccggcctctagcgcagtcgctaactactctgctgggctccctgggtctctgcccaaggccccgcacacactgggrcctagcatagttcctgcctatgccaggagctggctctgtgtttaagaaaaggaggactgaaggacaaacaaccaagagtggcccagtccccacccccacatctagctcagtctcaaatctgagtgggaccaagtgcaattcagggcctttttctccactcacctgcacccagaagcagagaaaagcaggcactgttcacttttcctttattcttaatggccttcctctgttgcaacctcaataaacagcacaatctcatggcttggtctctgagtattcaaagtatgcacatgcacctcaattcactcacatgagcgcgcaccatgtacattcatgaatgcatgaagcacaaacacacacacacaagtacatcactgtgtattgcccatgcagcctatatgtctgtgttaattttcaggaggcaaatggggtgtggagcagggtctgggaggaggggcagggagggaggaaaggagaagcccagaaagcgtgtgcatgtactggctggaggcttcagcagatggacatgcacaaactgtgtccagtgacagagaaatggtcgtgttcctgacctgaccttgcctctttctgagactgcacctttcctcgttggaaggtgggcttagtgcacaggtatttgcatttgtccagcccttttctcacygctcagaggcctggcctcctgcgggggtcagcaggtgggagtcccacactcttggcttctcagatggaaagataagtaacaagtcttggaagttggggctggtgtagggaggagtgagctggggtcccaccatggggtgggggtgggctatgaatttcagtgactggggggttggcactgccccagacatactcctatcccaccttccagaaccactatggtgatggccagtcctgccttggtaaggggtgtaaggagagtgaacagacagattccctaggccagctctgtgtcttgggtggggaggggaggtgtaggaggctcagggcatttgcaggtgggtgggaagccaacgtctttgcagtgagtgggcagcgacctagtctcacagtagccacactaatgacgtcatctgggggaaggaagagggtttcagtttcataaaggagcagggaggcctggtattggggctgggctggagggggatcagaggatgaaggtttggggcaagaagaccaagtataatggaagaggaagacagagggtccggaggaagggacggatggtctgagttgacatctaggacatttagagtagtgactggggcttagggcaaggctcaaaagcccctgcccaggagatggtcagagccggagactcctggctgtcatcaacctgtcagcaccgtcatctagcaggtgggtaagtggaataagactcaacaacatgtttgcgtccttgattgataagatgaggcatgtgtgtgtgtgcatgcatgtgtgtgtgtgtgtgtgtgttcagtactgggcacagacattgccatttcctcagygaaggcaccatgcacacctgctgcctttgctagcctcctgcctttgcaacagtagggaccgaggttggatagcagaaagaactttccagttgagaggctaaaagaaatggctagattctcaaatgtgaaggtggaggcttctctagatgatgctggtttatctcacagatttgaggagggagggaagaactccctttatgccccagggctcacagagttctcctgagtgggcagggttatcctgggttctgagtctgttttctagagccacaaaaccaagtgctggagactggagcctcctgcaggagactcagaaacccagcactggggcccatggcaggggcctgagctatcagcttgacaggttccagcatgagaaggcagggcttgatggacaattttgggagcaagtgagggctctgaggaaaggaaataatgwcaatgactagcaggcaaggtgkccaccatgtgaatctacatggtaatttggttatggctgccaagagtagtagttctttaaacaggctgaaaaataacccaggaacttagaaaaatattgctgtctaagtctctactccaaaccaattaagtaaggctaccagaagtagggcctaagcactgactggtgtattttaaaagtcagcaacggagttctaatgagcagccagaaccgggagccatcagcctaaactgtgatttgggggatgctatggtggcatccagatacagatggaaagaatggtttgatcgattagtaatgtctgccacggtcaccagtggaggaagtgatagtgcatatttttcttctgatgggtgcctacctgttgctttacagtttaaaaagcattttcatgcccattgcctaagaacagctctgggagtgaaggactgttgttacggccattatacagatgaaaaaattgaggatcagagccccagcctatttatagccaccctgggctagacctcaaggataccctgtgtattgtctgccttttagggggccacggggagaacagtgggtgcaggcctccggctcgcaagtctggacaggagtttgttcttggcagtgctgccacctgcctgcttcccccagctggaaggttccaggaagaggccatcgcagggtaaatgtggaagaggactagtgctgcagggactcttcacaaggccctggtgtcctgatggggggtggcttctgtactrtatagcaggaattgctccgtttagtttaccagtgggaacaaaatgtcagtgggtcaatcccaaggtgagatggagatgctggaggrtctcttgggctggagacagagactggcccaagacagcactacaagcaactggacagcttcattgagcaggagcgctttgtgcaagagggagcctgggggcggggctgcatggctggggcvgggtgaagaaggcatccaaagacagagggggctgtgattgcaggactatgggagatgaggagaggagtcatagtttgttcgctatggagtctgtttcctcaagtgcagacagtgaaggcccaawgcttgacaattgccacttgggagagagcccttctctcttccagttactcccacagaaaggacttactggycctttctggcaactmtcctagtgccagtgaccagagactggattgccttcaccttcatattcccagcacatgcctggcacccatttgcactcagcatgagctgatggcstatctctcctccccatggggctttgactccaggctttccctgcrgacactgacaggagccggtcctcaggacacccaactggagggtgcctgcagcagtccaagccagatacagcagcccagagagggaaccaccaggggctgctgggggtyaagccggctgtagacatggaggttggcaccctcaggacacctctggggctgaggagagcagcaggttcccatggcacctgggcgtcttgcckaggtggcggaggcctcccagccttggccactgctcagctccttctctccatctgcagagcctcgcccccatggcttgtcctgcacttcaaacccagagtactgggcaggggaaacggaagctgatgtttgtggagcaccttccwtgggccaggctctggaggctgggcacagctccttcatcatccctctgaggtgggtgttattattcccaaggcagagacataccaatcccagggctgcagagccagaatccggtgaggtctgtctctccataacccacactctttccacaccactgccctgcctcccgggatgggaactctgtgcccctgcggctgcacctttccaccctcccctgatgtcctgcaggctccctgcccattttctgttggcacttctatcatattccatcagccaaagcctgatgtctctgggtcccaggcactggctgggtcccttttccctgggctttcctactgcatgctgcccgcagaggctgtggcctgttgtcacttccaggccgtggaggtggatcctctcagtgttgggggtgtctggacagtgcctaggactcrgctccacttttgccttccttgaagccctggtccagaggtggctagagcaatgsaggaggtgtgggacccacaggaagcaatggggacagggaggagttgggagagggaggaggtggtggactgaggtggaactggggtgtggagggtgggcgtgactttggagggagagaggttggagcagactggggtggacagcttatcctgagctgagttaactgggagcagaaccatcagaatgaaacctgagaccagcaagaaggctctggagagggagagaggagatggggcyggccgtgcaagtggcctcttccgggcacgggcctttcttcagacattggtgtggtggtccagcaggctggagatggccatcttgtctcccatcctggctttagaaaagttctaccttacatctgacctycaccctccagccacacgggcccttgctcccaacagctcactccctccatggccagcaatgaggactgtctcttcccagctggctctacccttggccttcccaggcctgcagcctgacctgaggctcactctctaatgtcccttcattcagttgtggccttctcaaagtgccagctcaaggagagatgcattttcaagcccaggtttctgccataactatttcttattccctccatacttgactagagtacaattgcagtccacagctggtgctagtgaaagcggtagagaaatccactgatgatscagaaatgaaggctacaccataacacagaaacttcaggatcacagctgagccaaatgggaaccagctgccctcactcgatccagatttttttgtttgtttgtttgaatagatctttaatggtcttggaatccagccaaatgggaagagaggggcctctgagatgccatggaaaatccttgaagcaaataaaaggtggatgaatcataacactggactgctttagggatggctgggacaagggagggtagagggaagattctttctcgattttctccccaaagcaaacaaagtgagtaccagggaaaggggccccatgcaggctgaggcaggtttggaaagagagttggtggggacactgcaccctctgaagccagaaaggctggggcattccctctgcacatcctcccaggcaagtccagctcagcctcagggctctctggatctgagaccccttaatccatggtcaggggtaatggaaggcattttcccaactcagatggaggtggcagggccaccacctttgagcatccttcatgtttgtgagcagcgtaggtgtccctgggtaaatgctttggctggaagagatgtgcagtgagggagcmctgagccaggcccagagcctccagaccactacagtcagacgttaggagtcaaccatcatcaaacagcatttcacatcagctgctggggctgatttggagctccagagagccagccttttattttgccaaaattggacattaagagtgcaacaatcaccacccactaccgtcatcatttcataaaagaaaaggacaatttaacagtaggaaggacattctctcagactaagctcagccctttagataaagtcaagctagccccatgaaagatttactgcattgcacttacttttctcaattgcttcagactactgagaaacacatcaaacctgcgccctgtctcagcatttcccatgtcacctctttgtacctcagggtcctcatctacacgatgggaatatgaccacactgtcaactgcacaatgttcagaaaatcaccaaaagggatggagaaggggaagcacacagaaaaataccaggatctcctgcctgtcaggaacaaggatggcgatgatgagggtgacgacgatcctgcaggagcgatgccttgcaggggtgagrggcctggctctgggcccagcctccagcagggctgccacacttagcaagttctttaatcttcttgagtctcttttcgcttctgtagaagtgaggataataataacaataacagtaataataataataataactacttctttgcatctttttgtttgagacataaaatcccaggcccatagtaagagctcaataaatgttagctatagcaataaatgattrctattattagatacaataatacctaccctagaaactgtgggtaatttttaggggttcactggggactctagtcctaaatcgatttcccagcagcgggagtacttgtctcctcctccttctt

SEQ ID NO: 9949 - DNA, 14304 bp, Homo sapiens
ctccctttaggctgatttctatgtcctttctgttacagcaagcttgggattatatccaagatttgtaattccaatgtacttacttctgtcagtgtaaacaaagtacgatttctggactagatgacttgggcattgtgggggaggtggaaattagaggtattctctgtttttcctgtaggatcttgcatttcttcctcttgctgcttgtctctttgtgtcgggaacaggccccccaaaatctggccataaactggccccaaaactggccataaacaaaatctctgcagcactgtgacatgttcatgatggccgtaatgcccatgctggaaggtagtgggtttaccggaatgagggcaaggaacacctggcccgcccagggcagaaaactgcttaaaggtgttcttaaaccacaaayaatagcatgagtgatctgtgccttaaggacatgcccctgctgcagataactacctcaatccatccctttatttccgcccatctcttcgtttcccataagggatacttttagttaatctaatatctatagaaatgatgctaatgactggcttgctgttaataaatatgtgggtaaatctctgttcagggctctcagctctgaaggctatgagacccctgattccccacttcacacytctaaaaaaaaaaaaatttttttttctgagcttggagaaatatatcccttagtacacttggmatttataaagcagacatcaataaatttatatatatgtgacagataccaacaacaatccagtccccttccctcataccttatttatgtacatatattttatataatagatataatttattaacaatttataaaattactttgttaatactctatatcattttctagctgaatttatcaatgataatgctcttttcccacttttatttttttcccattgaccatgcagcagttttgtgtagaccgtctgataacaactgatctgtttatctaggggggagaaatctaattcaatggaaaatataaataaaattgtgataaacttttgtaaatagagtggcttttaactacacttgagatggctagcaaattcataaagtgaatttastttctttcaaagttcagtaattctttctggccattagggatatgtccatttatactttctcagtatcccaagtcatttcatggttttaaatcattcatgaacttccaaatatagtgaatttatttcttctgcatttaaaattttatcacttaaatatacaatataccgtattgccatgacgaaaaatggtaaagactatttttcacttctgttatgcatttcattaatacgatatctgtatgtgtttccaagttagacatttcttttgcccatttcctacactaatgatactaatgatgactttgtggaatattcagaattaacaaaatgtgttttgagtgctttttttagtactggggcaaatttgcagtaatatcgcctgctttttacattaaattccccataacttttacaactatgggaaaatttctgaaacgtgcacagattccaagtgttttctgagaactttatgcttattgtagagtggttacagacactgaatgctaaagtgtattactctttgaaaakcattgcttgatttcttttggtgaattctgtaaaggtgyagggaaacataacgtcccaattattttttctttcttctttgtttgctgcctatctactttgaaagatacaatagttaaaacccagaaaagagattggaaaccccttagagaatgaaagacatccaagggctctaaaatgcggcagttgctgcttctgagaccaaaaaagggggcaaaatatagagtgtgtggttctacttgtgtgattttttgaaagaaagtatttgaatttatctaaaaatactaaatttgtatttacattagttttcaaatagaatttaataagtacagtgttctataggtaatattgagagaaatagaggacaatgaaacctctctcctccatcatcttgtatgaactaccaaaatgtttatcatatggacagttctcatatatagtcaaatagaaagaaagacataataggaaaayaaatgacttgggaaactaagctaacatggtctaattattctgacctctgctcacctaacttgatttaggaacaaatcattgagagttagagcatgaatagtcaagactgttagaccatatctcaaatatcagtgacttcaatcaactatgtttccagtttaagctgaataggctttattaaatagttgttgaatgaatggataaacaaataatgtactctggggattacctgataccaggattctgaattttcagatgtatcatagaaggatagcagctttgcaattaggtaaattgttaactgtgtcacctttagcaagttatttaatctctttgagcttcagcaaagtaggaataatcatatctaatttgaaaggtcgtggtgatggctagggctaacaaaaatctgattcacaacatgcaattaattaacagtagccatttttagtggttgaccaaaaaaaggatttatattttcaatgccagcacactcgatgttctgttgggaaaaataataatgatttttgtgtgcttctccatatggtataatggaatgatttgtggatggaaataaaactgttctaaaatttttgtgacagctggtttaaaaatcttaagtgcctaggcacattcttgattgagaagccacagttttaggccataaaagatgggggaaagatttttatatgagacaattttgtgagtgttactttttctttgtctgaaccatagtgaaatctaaacaaggatcttgtgaaacttattttaaagaagcagtttacttcaatgggatcttagataatttcaccagaaaatggatcaccgaaaccagaaggctggtgatcattatttggtttgggccatataagaattgaaactaacggcttagctttaggatttttaggacacttgttgataatttaggattcataattaacatatgtgttgattgttttctgagactaactgggcaatgggtttggatgtgtttacatttattctgattccagtcataaaattatgtcaaggactttccttgtctttttatgtgtatgacagatgtgtatgtatccatttcatctaacaagttaaagcgttcagctataatttaaaatttgtagcttcactgttttatagtacctaaaattggaatgtaatcagtcagaagacattcatccactgctttcattccagaagtattatgctttttgaagcagcaatagcataggaatgttgaggagactatactatacttttatagcatatttaatctcgtagatcacttttcaatgaattataaggctgatgacaaatgagcaaattgtatcagttttctttatgacatgtaacagagtatagctgtgatcatgaattggatagttctggtgtaaaaatctgctttatccccatataagatgtcaggttcagaaaagcaaacacatagtttcgaagrgatgttgatcaaactgatgaggctaaatctcaagaaagagacacagttaccctctaatgttacactttgagttcacctttttttttttttttgagacagagtctcaatctgtcgccaagctggagtgcagtggcactatcttggctcactgcaacctctgcctcctgggttcatgctattctcctgccttagcctcccgagtagctgggactacaggcacacgccaccacacccagctaatttttgtatttttagtagagatggggtttcaccatattggccagaatggtcttgatctcttgatcttgggatgcacccaccccacctcagcctcccaaatagctgagattacaggtgtgagccaccatgcccgaccactttgagttcacttttaagaaaccatacttaatggaaaattaccagtaacagggcatactgtttaggatgcattcctaaaatattaatggcaaaagatagccagcctatggcaaagctaattggaaaaaatattttataaaggatgagacttctggataccatatgggaagggctctggttcaggaaaatgtttttaaaaaactgtcattgaagagaccatagaatcaaacaaaataatttaatctgtatgtaaaagaagttggtaccaccataatttttcttatacatgtcatataaggatctactctgtgtattgtcattgagggcagatataatttcttagttcatcattaactctctgaagtatttcacacagtagtttgtacaccttctaagtactcaatacaatgcttgagttcaattattggaaagtggtctcttggagaaaaaagaatcatagtgcaaaaccaattattttacatggacttttcctctatatctaagccctaataagaggcagctgtctgatatacatacatacatacatayatatatatatatatatatatatatatatatatatatatatatacacacacacacacatatatgtatatatatatttggagtaggggatggagtcttgctctgtcacccaggctggagtgcaagtggtgtgatctcagctcactgcaacctctgcctcctgggttcaagcgattctcctgcctcagcctctccagtagctgggattacaggcgcctgtcaccatgcccagctaattttttaaaatatttttagtagagacagagtttcatcaagttgkccaggctgctcttgaactcctgacctcaggtgatccacctgccttggcctcccaaagtgctgggattataggcatgagccaccgcaccctgccaactgtctgacttatcttaaaaggctaaggacctggtttgtttgtcaaattttgaaaatagatgcctcagttcataagatttccatattgtgtggcaggcgcctgtaatcccagctactcaggaggctgaggcaagagaatcacttgaacccgggagacagaggttgcagtgagctgagatcacgccactgcactccagcctgggcgacatagtgagactctgacaaaaaaaaaaaaaaatccatatgtgaaaattcttagaagcttcctatacaatttcagctgaagattcagccaacagttcattctgagactgtgttccatggaaaaagtaaagcccaggcatggaagtgggaatggaaagaaagattctaagcctacaaatactcaaacatcaagaagaaataaaaataagtcatcacttcracttcatgtgctaacatcactgaggttataaattcccaggaatattttattgcgggagcaagactgcactgctgcctttcagcttgcaaattccartgagaaacgtctttctctctgctctcaactaactctacagaacgctgtcctctcatttcttcaggctgcagttctagagtagggactcagagtgccactgttggccagtctggaaacagagataaatgagccaatccccagacattccggcttggtggcttttctaatttcatggaatgcaaatccaagagcagacccacaacattcctattatggctcctagttctacaaattataagcaggaacggaacggatttacaggcaatgagttcagctccttcttggctggagattctataatccaagaagagtttgaaaaggggcttatttgggctggagcagcagcaactctaactgtggaaaaggtggggaatggtgctggactgacagtctgggtagaaccaaggcgactactgcctcctttcctgctatttctatcctgctgggcattctctatgatgcagatccgttattcagtcctagaggagctggccaagagtttggtggtgggaaaccttgccaaggatctgggactcagtgtcgaggacatgcccacttgaaagcttcgggttaatgctgaggaataatacttcattctaagtggggaaagtggagacttacttgtgaatgactgaatggatcaggagcagatacgccccccaattatagcttgggccataacgctttgaaatagttgaaggccaggcatggtggctcacacctgtaatcccagcactttgggaggccgaggcgagcagattacgaggtcaggagttcgagaccagcctgaccaacatagtgaaaccctgtctctactaaaaatacaaaaattactgggcatggtggtgcaggcctataatcctagctactcggggggccgaggcaggagaatcgcttgaacccgagaggcaatcgcaccactgcactccagcctgggtgacagagcaaggcgccatctcaaaaaaaatgaacaaacrgtagttgaaaattctttaaatgtttttcacattaatatggagattcaggatatgaagaatcatgcaccacggttcagcaggaatgttattaagttacgtatctctgagtttacccagctggaacaagatttgcaacagaacctgcagaagatcctgatgttgagagaaattccttacaaaattatcaccttagcagcaactctatatttctctttgaagtaaaagtgaccaacagtggaaagacatatgttgatcctgtgttagagaagctgcttgactaggaaaagcagagctcccatcccttagtgctagcagccttagacggccccccaacaaagcagcatcactcaactcctgatcctattggttgaagccaatgacaaccctgtgttcatctaggatgtgtacagcgtcggccttcaggaagatgtgcatccgggcactcctgtgctgagagtgagggccaccaaccaggactagagtgtcaaggcagagatcacatatggcttcacaacccagagtacccatatctagtttggccttgatcaaatagtggagaaatgaaaactttaagtacattggacttttaaagatttttaatttccatggttttggtagcaagtgacagagagggactcattgtccagtgtacagttgagaccgaatttctagaagataatgacaatatcctagaggcgatttttacttctaattccacaatgattcccaaagattctgcaccttggacagtaatcactgtccaggatttaaatcacaagatctttaaatcacaagatctggattcgggagaaaaygaggtcacatgtctgatataagaaaatgcrccttgagaaaaatcttcctccaataattaactacatgcttgtaacaaatggggccgtggaccaggaacagacccaaggtataacatcagcatcactgccactgacagaggcaaaccaaccctctcgtccagcccaagcatcaccctactcattggcgatgccaacgacaatgctctggttttctaccaggcctcctacgtcgtccacgtggccaagaacaatcttcccaaagcctccatagtgtkcaagtagacacctccaacctagacttgggacccaacagccaagttccctattccatcgtggccagtgacctggagccacaggcgctgtgattctaggtgtccttgagcgcacagtgcgccttcgaccaagagcagccgcgagccttcaagctcacgctgcaggcccgcgaccaggactagctcgcgctcggcgtcaacgtgagcctgygcgtgttggtggacgacctgaatgacaacgcaccgcgggtgctgtaccccagctctggagcgcaatggcttcgcgctcttggatatggtgctgcacgcygcggagcctggctacctggtcaccaaggtggtggctgtagacgcagatgtgagacacaatgcgtggctgtcctaccacgtgctgcaggccagcaagcccaggctcttcagcctggaatgcgcaccgacgaggtgctgacagctcgcacgatgggccacaggaaagcgactcgccagcgcctactggtcgcggtgcactgcggtggacagccgctcctctcgctaccgccacgtcaccaccactaccgcccctcgtcgccgacagcctgcaggagactctgccagacctcagcgatcactctgcaaagctacagcctgaatccaaaattaatttatatctggtgattgccttagctttaatttcctttttattcttcctgattgcattgtttgtgctggttttaaagtgccgaagaccccaaaatgatcctgtctgagtctttcccacggatgtctatcccgcgctaagccccaggtttctgggtaactgtagctctatgatgccatattcctaccaggtgtgtgcttctcctacgaatccagggctgagtgaacttcttttttgaatccctacccctcaggactcaatagcagtttcactgcagaaagccccttggggaaggggatgattgtgattattctaattgcttgggcagaatccactctccaaggtgaaaaattcttgatgaaactaagttcagtcacaagcaggttttcttctagcattaaatattttcagagatctcagtaaaaagcatttctagcagcaagaccaaaggcctaagatgagaaatatttggcatggtgagcttgagggacagtagtcaggcagacaagagtatcagacatgccagagcatttggggcctgtaggtaaggagcatgttttgattatatatatttgtatgtgtttgattatattttataattttactttgatattcaaattgtactgatccaaaaataagggagggacaaatcttggccattgtagtatgagagatgtaaatttacaactcagaatccctgcttatcacttctccttcagcacacaactgtttcattttctatttaagaaacttcctctcactgcaaaaagacattctggctgataaagttagcctataatttcagtaaatctaagaatatgactaatggaagttgccagacctaaactttgaaaattattgttccactgaagagcgtcttatgactgagtgttccagtctccttctcaagctgaaccttgcttttcaaaccagattaagaacactatcataagttatactgcattttrtttccctacccatgtccactgcatcattctctatagtacaaagagcttgtctcgccaggcgcatctataatcttagcactttggggcgccaaggcgggtggatcacttgagcccaggagtttgagaccagcctggacagcatggcaaaaacccatctctacaaaaaaaaaaaacaaaaattaacaaggtttagtggtccatgcctgtggtctcagctacttgggaggctgaggtgtgaggatcacctgagtctggggagattgaagctgcagtgagctgtggttgcgctcctgtactccagtctgggtgacagaattagaccctgtcccaaaacaaacaaacaaataaagagcttctctccttatgacttatttaaagcttgggaaattgttccaattcaaatgctttaaatggacttgagctaaaacagaatgtggtatatgaaatgttcttataatcaggtgattgtaaaaattgatccagataatgttagcatagcattttactgaactagtagtttacaaacacttcaaaaattatagaataacatttgcatataaaattcctcatacatttycctatcagtgaattggaagcttacaatatacaatattaccaaaaagacaaaaaaaatgaaaaggaaacagttacctttggaaaacataattaggtaaaatgggtaatatggaaagtctgaaaactgaaaaaattactgataagtcaagagaaaaggaatattagtaggaaaattcataaaagtgtgtctgactactcacagcaggtttccttattggtatgtattctgtggtccatctaagctatgttaattttattttaaatgctacctgggtattggcttytaaaaggaattcagtaaatcagataatttggcatcttcaatctagattctgatgctcacctgaaaagtctgctaaggattggaaaccaagaaaagtgaagtatctcaacagatatgtgtcacttgtgtgtactggattttttttttttttttttttttttttttttttttttgagatggagtttcactcttgttgcccaggctggagtgcaatggcatgctctcggctcactgcaacctccgcctcccaggttcaagtgattctcctgcctcagcctccctagtagctaggattacaggcatgtgccaccacgcccagctaattttgtatttttagtagagacggggtttctccatgttggtcaggctagtcttgaactcccaacctcaggtgatcttccctccttggcctcccaaagtgctgggattacaggcatgagtcactgcgcccggtcgcgtactggatttatattgtgtaatactttgctctagcagtatagtaggtgagacagtgactgtgtctagtgagcaaaaggcacttatttgacacttttgactcttcctttctacttaccttatttaaaattgatttttgcatgtggcatgatgcaccagttcattgaggtaggggttgaagttatttcccatttttttcaataccatttattaaaaatattttcctctttctgttgaatttgcttggtgcctttgttgaaagtcatttcactgatatatgtagttctatttctatattcttgatcatgtttcatttgtctattcttttactaatagcacactgtctcaattattgtagctttatagtaagtcttgctacaaagtcttactacaggacaaagcttgtaggatttttgaatgggatggcattgcatctatacctttatcagggaaagagggaaggagggaggaggatcatcttaacaatattgacacttcaaatccatgaacrtggtatatatttccatttaattaggtctttaatttctctcagctatgttgtatagttttcagtgtagagaggtcatgtatatttctcattaaattgtccctacatatttgatgttttctaatgttattgtaaatagtatttttaaaattgtatcttctaattgttcatttctagtttacagaaaaatgaaaaactatgtttttatgtattctatatgcttttgaaaagtaagaggtgcaaagtgctctattcttacactatattgtgtgagaatataagtcgaaaccactctgcataagttcaggcttccattctcttcagtttgtaggttgagagaacccatccagaaacagtaaacattggtgtctgcccaagtctggtcctgggtggttcattcattcatttacataacaaatatttattaactgtctgctatatgcaaggcactgacctatggactaaggatgcagcaatgaacaaggcatatatgattcctgagttaatgggccctattctaatacatgatattttacaggtctgataaaagccaacaaggagaaatacaaaagcactaagagaaagcttatagtagggaagcttcgcctaatctgaaggtcaaggaaggctttctttttttcggaaagtgatatttagagagatgaatagattaataggatgagtagaagttatctaggtaacaaggaaagtaaaaaagaaattgtcaggcagaggaaatagcatgtgtaaagatctttttaaaaaataaaaggtgtgactcaagcaatttaaaagggctagggaggctagaaacagaaaataaatagatgaaactaataaggcagggagagccttgtaaatcacacttaaaattctggattttgttctaaatacccttgtacttaggagctattaaaatattttaaacaaggcagtgacaagatatttgaattattaagcttactctggctgctatatggagaattgatttatgagggttataaatagaaataggaagataagataggagactatggcaatattcctggtaagaaatggaagaagagctggcttggattaaaggggaggcagtggatgtagaaataaatggatgaattatagatatatttaggaaatgggttcaataagacttaataatggaataggtggaatataaatttcatgagggcagggggtgttttgtttattattatattcctaggtgtctgaaaatattgttgtgttgcctggcaagtggtagatcttcagtgaaatattattaactgaataaatacaatggataaatggggagcagggattaagagtgattcctgggtttccacattaaggaactggatggacaaagctaccatttgatgagaatggaagactaaagaatgatagatttaagagaaatcgagttgagttccagccatgttcatttgaaggatctgagaaacagtgcagatattcagtgtgtgattagacatatggtcatcattcttttttttttttgagatggagtctcgctctgtcacccaggctggagtgcagtggccctatctctgctcactgcaatctctgcctcccaggttcaagtgattcttctgcctcagcctcctgagtagctgggactacaggcgtgcaccaccacgcctggctaatttttgtatttttagtacaagacagcatttcaccatattggccaggctggtctcgaactctgatctgcccgcctcggcctcccaaagtgtggggattacaggcgtgagccaccgcgcccagccggttaccattcttttactctgagttcttccattgtgatcatctagtcagatgggtagatccttataaggctgagcataataagcttcctgatagctctacactggtatgttttggggttcatggctgagctacttttgtgttttatttatcttcctgatctctttttcactgtaagaaacatccagcacccagggaaatttgctgtctaattcatactccactcttcagactagtcctagtgttcagttttgttttgttttttttctgtgtctggaattctattaaaatgtgtcaggctgttttaatttttgttgtttaattttctttcacatgattatatgtgctccatggatttttttgtttgtttgttttttgtttttgtttttgtttaagcgkggtcttgctcttgtcgcscaggctggagtgcaatggcttgatctcggctcactgcaacctccgcctcccgggttcaagtgattcttctgtctcagcctcccaagtagctgggactacaggcacatgccaccacacccggctaatttttgtatttttagtagagacgggtttcatcatattggtcaggctggtctcaaactcctgaccctggtgatctgcccacctcggccycccaaagtgctgggattacaggcgtgagccaccgcacccggaggaaatttttaacctcagtttttcttcaccatctgtaaaactgcatagaaggaatgtttaggataaaagatgcataacaatcataacaaaattgttgggttttaatgttatgagtacacttggaggattctatgtccacacataccttaaacatcctatagagtccttagcattttaaagttgaaaccaacagtatgaatgatggtagaattttcccccccaggaagttagaactgttccatatcttgatagagggatgggttataaggatgtacacattttccaaaactcattgaacttaagagtcttgcatgtgactgtatataaattatactttaattgaaaataaatttaagaaaataaaattggctgggcgtggtggctcacgcctgtaatcccagtgctttgggaggccgaggtgggtgaatcatctgaggtcaggagttcgagaccagcctggccaacatggygaaactctgtctccactaaaaatacaaaaattagctgggcatggtggcggacacctataatcccagctactcgggaggctgaggcatgagaatcgcttgaacccaggaggtggaggttgcagtgagccaagatcatgccattgctctccagcctgggcaacatgaacgaaatgccatcttaaaaaaaaaaaattaaaagaaaagaaaattagcctcccccaccctcactatacctcagactcacccctgaaagatcactactattcatccctggttatgtacacttacaaacattttctgtgtgtatgcgaatgtatgtgtggggttttctttgcacaacaggatcattttacagtatatatactgttgtgcaacttgctctttccacttaatatctcaaggaatcttttctttgaatctttatagccatgtacctcaatcttagtagttttctttattttatttttgaataggaaatacatttacatggttttaaaaatcaaaacaatatactatgtat

SEQ ID NO: 9950 - DNA, 29387 bp, Homo sapiens
aaatgaggacaatgatatctacgtcttagctttgttggaagattaaatggaacaatgtatattttagaggccaacacacagagcctgtcattgatagtgctggtaaatagtatttctcctcctgtcctagaggtcactcaaggacttagtgatgtgaggccatacataacygcctaagccaaaaaggctttggaatgtgggcctaaaagaagacacggaagttggggcccagcccttatttgcatagtgttttctactacgtccttatgcacctgaagagcagccctgagaagaactttggtttagcaaactcccaacaaggccaactctgtaattccagaagagcaattaactaccttagctatgaactctgtacagacctattattcgagtaatttgtgaatgtgcaaaggggattcctattatcatttgctcatatgatgatcctattacttatgtacagatagcggacttccagatttcttaagcaaataaataattctatggttgcaaaaaatgtgaaaattttgaagacyaggttgggaagtgattaatgcaagattccaaaactgaaaattaaaagaaaaagtattctttctctctgaaaacaaaattaataaggataaaataggtctggactatttttagacttagaaatgatagttgacccctttaattgtggatattttagaacctaggcttcagtttctcaattaactcaaagtttaatctatagatcttatatgcaagaaggtcttttcttctaagtatctagtcttcctctataccatcagggctacatccatataaactgaggcctccccagccatgcttcatcacttaatcagatggtgaactagctgagcctcactagtgcaacaatagktattaaaaagtcctttcttttaggaaacacacttgggggacattggggttcttaaaatgagtctttccagaaacataccattttgccacagtttcctctttatccccactgataattctattgcatttcagaaaataaatttacagactagaataatctttagctgtgaggaaaaaatattttaatagctctattaaacatcttatggaacttttttggatatatttgttacttttcaataacctcttgttttgatgttagttttcaaagatctgatattttattcctcttaattaacaaagaaatcaaggtctctaaaaattttccttttttcacttttagtgaattatcttttgtactacttttaaagttgartcctttgaattatttaacttaggtaatgttttgatagattgtagaattattgagaaccttaagaaaaacatttattagcattttaacatgacttttttacttttccctttgactcttatggtttgggtctgtgcctccaccaaatctcatgtaaagttgtaatccccatgtgttgaaggtggggcctagtgggaggtgattggatcatggggatagtttctaatgatttagcactatctccctagtgctgtatyatgatagagttctcacaagacctgattgtttaaaagtgtgtagcacctgccccttgttgtgctctctctctctctcagtctttctctcaccatgtaagatgtgccttgcttcccctttgcctttcactgtgattgtaagttttgtgaggcctccccagccacgcagaactgagtcaattaaacctcttttctttgtaaattaccctgtctcagatagttgtttatagcagtgtgaaaatggactaatacaactgtcaaacaaatcgatataagaatattcaaaccaatggcatatagtttctgaacatacttacttgatggcacacatttcattttggaactacaaagtcactaggtcagttcctgaacttctgatttcaatgttacttaagacaatactggaatacatacacattcttttcttaagaacctaaagagaaagttgcagtagtttctccagaagtacatctgagactcacaaattaagaccaattcccctctatctgtaaggatatagcactaccaaatcagctatgcaaagtatttccaaaaagtcattacaagactttttgatttacttatttgttctttagtaaacattaacaaataaatgaataaatgaatgcaagaatgcccattatatgtaagtcactacagcccacatatcttggatatgtagtaagagaaaaagcatggtttctcacctcatgaaacttgtagtctagcaggtaacaaaacatgataaaaagaatcatgaaaataattatctaattacaatttcagtaacaatattgttgatgagttcctgagtcatatgattttttttttctccatatgaagatgaaaacacataggaaatactttttttcttttgctctgtcacccacactggagtgcagtggtgcgatctcagctcacggcaacctccacctcccaggttcaaacgattctcctgcctcagcctcccgagtagctaggactacaggcacatgccaccacgcccggctaattttttgtatttttagtagagatggggtttcaccatgttagccaggatggcctcaatctcctgacctcatgatctacctgcctcagcctcccaaagtgctgggattataggcattagccactgtgcccggctggaaatacttttttaagtgtaaaatctgaaaaataatttctcctcaaaaacgtatctcctatcatgggaggccatttattcattccctaggtggatgtagaaagccgttgtgacatattgactccactttccatctttcacattcaattgtgtgccactgcttactgattttattatcagatgtatcttacattcatcctcctttctccatttccatatccaaacatagtgctacttgatatggtttagatttgtgttctgacccaaatctcatgttgaattgtaatccctaatgaaggaggagggacctggtgggaagtgattggatcatgggggcggatttcacccttgctattctcacgatagtgagttctcatgagatccggttgtttaaaagtgtgttgtacttcctccttctctctcttcctcctgctccagccatgtaagactgtggatccttcctcttcactttctgctatgattgtaagtttcctgaggcctccccaaccatgcttcctgtacagcctgtgtaactgtgagttgattaaatctcttttctttgtaaattacccagtctcaggtatttctttatagcaagatgagaatggactaatacactagtcctttggtcaccttgctcaaattgttttcatagattcccagaatcacaaacaaaataggaggatattaaaggtcggaaaagatcctagagaatattcttcagatgaggaaactgaggctcagaaaggcaaatgtctcacccaggactccacaattcagcctagctacaggcatgtcaagtttttctttagagcagccatggtagacactgttggttatctgctcatagctattcccatccctttcttctttgttagaaaatcccacctcccatgatagcagtcaaaaaagacaaataccattatgcatcacttaatgatggggatatcctctgagaaatgcactattaggcaattttatcactgtgcccacataayagagagtacttacacaaacctagatggcatagtctactacatacctaggtgggctatatggcacagcctatggcttctaggctacaaacctatgcggcatgtactgtactgaatagtgtgggcaattgtagcacatggtaagtatttgtgtaactaaacatatctaaacwtagaaaaggtattgggttgacatcgtgggggctatgacgtcactgggtcataggaatttttcagcttcattatgagatgatgggatcaccatcctgtatgcagtctattgttgactgaaatcttgttatgcagcatatgactgtacttgctttcctagggatgccatatgatccatttatggccactgagatgtaaaggaaagtctgcttgatggtttttgaaaaagatttttcttcctcatgaaaagaaatataaaagagccacctctcctactttctgtctttggatctgaaccacacagcctcaggacaaaaaagccaacatctgaggaaggtagatcagaagaatggaaagcatttgggatctttatctatgagtcctgagctaactcttgggactgcctacctgcagaccttctattacatgagattatttatatctttatgtcatatattctgttacttgcagctgagtgcaccctggatgtatgactgctttatttcttcattttctatctaccccattgagctccatagagcaaggaattggcctattttttcattgccgtatcaccagttcttagaaaagagcctggtacatggtcaattcttaataaatgtctgttgaaggaayaaatgaatgaaagaatgaatgtcaataaccttaattggccctctacttctgtagaataaagtccaaaggcttagctggtatttaaggcccttcatgatctggccccaatctatctttccaggctaatcttttaccttcacataccctacaactcagaaaagctgggctatttcctgtccttccaaatatccggtcttagtccatctgtgccactattacaaaataccacagactgggtcatttataagaaacagaaatgtatttcttacagttctccaggctggcaagttcaagatcaaggcactggcaggttcagctatctggtgagggctgcctcctccggatgggaagaatgttgtgtcttcacataccagaaggcagaagcgcaagtcagccaaacctgcgtgaaggctcttttataagggccttagtcctattcaggatggagtagccctcatggcctactcactttttaagggccccacctctcaatactatcacattgacaacacctgagttttggagggggcccattcataccatagcacagccctcatgcttttttggctccctggactggcatgtgcttctcttccacctctctacttttctctcattcttcaagctccagatcttctctcatagcacgttytccaatacctttcaggtataaatgccttttctattccgtgtttccttctcctttgtgcctttatcactcttacacatttatgataactgtttggtgtactaatctccattagattagaagttccttgaggctaagaaattcaccctcctaatttmtatgctttcccctagtaggtggctaatacatttttgtgagtggaggcataaatactattaaattgagcccattaaaaatttccattttaaaaataatttagacccaggaattggtgcagactgtcatggaagcaaagatcaggaggcgaaggaagggagggaaagagacttgttggaagtgttaggagcaagcacaaatgtcttttctcttgccgatgatagaaaagttcttaatggaagatgatcccaatcaatagagccagacagctgatttatataatggcatcaagctgaaatcgtggtctttgcatagtgttgtgaaaggggaagaggctaccaagactggaatagccaggggactccacaagtagatctatgagtatcagtcggtggtcgtaaatatgtttccctaccagcaagccacagaggagctccagagagcagcctscttgaggctggtcgcggaagactgacggtggggctagtgaggctgctgtattttggctgccgccgccgctgctgccactgggcagataccgcagtgaggggtctgaccgcgctgagtgctctcgggaatctgggctctggctaggaatgagaagttaagagagggagggctgagaggtgggcaggactcaccaaggagctgcaaacccaaacgagaaatctagggagcaaaaggagaggaaagagtgagcttgagccaagacatcaggccaagtggaactggaggaaatgtcatcattggtaaaggaggacttggagaagaaactgtttaagccactctcgcagaatctgtacgagtttattgaaatagagttctccgtccaggacaggtattacctctgtgtgtcaggtaatctgttccttctgttatcatttcaaaaagcaagtcacccaaagatgcttggatgatagagggaattttttttttttgtatttattttcctatatagcacgtgtaccttcttctgataagaacttaactatgccaggtttaagaatttgggttctacagaattttttagagtgttaaaaawgaaagaaaaaaacattgtattagaatactttggttaattgtggagaaatgaaactgatgtgtccttctcctgatttgattattttgtctccaatcgtttgtttaattcatttgcatggcatgcaattttattgtgcaagagctcatttttaaaaatgcaacagagagctctctgtatacttttaaatacattggagaattgagttatacagcaccatttgcaactcgtctggaacactggcattctcccttttcatcctaggaaaaaaacaaagccttagattttcttctgagggctttagacttcttgtggtttatttgaagacagaaattatattttaaaacttctttctcttataggaagtgtgctcacaaaaacaataccttaatggtgaaactagttcatgaaaatggaactttaaggataagaggatgtcctccaaactgtttaactaaaataaagatttttaccctcatgtttccaaaattcataaaaattgtccaaagctaggaacaggcttttgcacttaattatgatttgcctaacctgtgatttctgtgctgaatttagacaggagtgctcatgccattattgaacagaatatacagtattcccttttcttggtccatgccttttaatacttttcaggcgtttaggagaaaagagcttagaaactttgtgttcatcgtggacttgcctatctaaggaacacacctattttcagaaaacaacttcttataattccctttctggtaattgacttagaaggcctttcaaagttgtcaggagggagtgctgtaagggaaatagaatgtctttaaagaacatgccaagaatttttagaattctgtcatttctaataaatatagtaatatttacccaataataacattagaaatatttatctgacactttagcatattttgctatatgactacaaagtatagagggtattctagcgacataaaaaaattaattggcccaggaaaaagaaattaagtattttagaaagtcaattaaaaacaatataagtaagaaactatattgtatcctagccatcaaatcactgtgtcttaaaatatttttactgaatatattagagaagatgcttattccaacattaaaatgtaataattttgtatttgttgtaatttccactttataaagctgatttctcattggtaacattagtatacacatatttttaaagaaaaacatgaaaaattaaataatcacaataatttatatatctaacttaccaaatatatcttagtttctccctccaaattatgtaattaactagacttgttctatctgacatgaaaaaaaagtctcctagatttaaatgtttggaaataattcaataattctgtcatgtaagaaacaaggaaaaaacaagatctcagagatgaggaagagaagacaatattgtgctattctagatacaagttaactttataagccatgtcagttcactaacttttcactactctcttctacatcacatcatcaatttgagagcactttctccaaatgtaacacctttttatggcaattaaaaatacattttgctggaacagtaatttaaaataagtcagcgtgttgyttgaatagtcttggctttgaccatgcttgactcagacaatttccattggtaatgaatcaaagagatcacatcgtaattgttgagatgtgaaactccatactttgaacgatggccaccttcagggagtagagtcacattatgatttcctctttattccctacaatctagcgcttctaaatttgtgagacttgcgagtccagtgtagtcaaattccatcatgtatttttaaaattaacaaaaatatgtttaaatatggttaagctttctctttatatgaccagagtctctcttttgcaggggtcttgcagccaaaggattatgacttactgttaaatcttgatatttacctggttgatgtcaaaattaaatgtcaaaaactcaatttccctttctggtttgctaggatgtacatgggggatttcctgggaccgcagcccactcccaccttagggtttgcatggtcatttctccctggaactagcgtcccctacctagaacattatcactggaagttaaaagtagcatcttcttatgaagcagggaggagctctattatgtgctggcactagaaaggaataagtcacatgtgcaattgtgagagtgcacatgaattaaagaaatgctgaaggacttgacatagcatattaaagcattagccaaaactggatggaaagtaacagggcatagtggaacagaccttcacacacttggaatcaggcaaacttggtgtgaaacctggtgctgctttgccacccaccagctgtgaaatctggggcgagataagtaggctctttggcctcagtggtgacatctctgaaacagaaataaaaacacttatatctgcccacagtgctcccctgttaaattcttactaggataaaaccaaatgtgatacactgtattctaaataaatagaattaaattaaggttataattttcagatatacagaaaaaataatttatcattaaaaatatgctgaaatatatgtgtatatatgtatatactataaatacatatttatagtaaaaacaaaatagtaaacatatgtgtgtatatttaatataaaattaaaaattgatatattgtatattatgttaatttaaaattatatgtatattcagatgttgattatttttcagtattctcatatttctagaaaaacatcttccattcatagctattaatctgaaaataaatggcatttgctagaattataaaaataatatgcataaattctctatacatattgtttttttaagccataccagaacttctctgtgaatcaaagaatctaataatcatttacaataagaatgttaacaataagattgttaaataagaatgagttaatgagaaaaggaggttgctaaaaacaattttaaagacttcatttgggaccactgctgctacatttgtgaattcccaatatcttaacaacagagagcacaatctaaakaatttctttctttaagttgtcatttcaggagatgatagtattgtctggaagaggttartttaatttttcagctgtgaattgagaacaaactatcctaatacatagtgttttgaagaattaaacatggactaatgttttaaaaaattttcatataattaaagatgttattagcagcagtagaataacaattatgcaggccaaaatatatccaaacagctatgcatatgttctgattatagagccaaacatagtttatgtgtatattctttttcaagttgcagttttactcaaggctgttttttgtttgtttgtttgtttgttcgtttgtttgtttgagacggagtcttgctctgtcacccaggctggagtgcagtgtcacgatttcggctcactgcaatctccgcctcctgggctcaaggattctcctgtcaargttgttttgctacgtaataatttaatatcttcccttttatgacctataatacttcctttaataaatatgaatagatttggttctgcgacaacacagaaatcttgtgctcaaaaagagaacacacttgaagaaattctaatttgatggtgtttattattctctaygttaaaaaataatgaaaagaagaaatataggattgatttccaagagatacattttattaaaaaataaaatacatatatcataaaattcccaaaacttactaaytgttactgattgtaacaattaattacaatcacaattgtcaaatggggaacagaccttgaatattaaagtagattttatactttaaaattcttgctctttgtcttctaaaggtagaaaaaaacactttattatttttgttcaagactctatatttttttcaagtctctctctctctctctctcacacacacacacacacacacacacacaaacacaaaatgcatttgtggaatatcactaaatgtctctatggaggaatttatttaaatttaatttaattttattttttgaggcaaggtctcactttgacacccaggctggagtgcagtggyctgatcttggctcactgcagcctcaacctctggggctcaggtgattctcccacctcagcctcctgagtagctgggactacagtcatgcgccactatgcctggctaatttattagtgtttttgtagagatggggtctcgctatattgcccaggctggtctcgaactcctggcatccagccatcctgcctcagcctcccaaagtgctgggattacaagcatgagccaccacacccagccctatgcaggaatttaaataaaatattctgactctccaaatcagggtaattgtaggtgaaggttacaatatggaaatgatgaagctcccatttgagtcctcttgttaccttgcgtttattgtgacttagcatttagttctaaaagggccggtagcttggattttagagtagggatattatcattatctctaaaatgaacaacccacatcaccatcatcagtcagtaacttacgagacagattttcccagtggctaatctattaccttrgagatctaaatgtggaaatcaagatgatctgccaattctaaactccaagccatttgcatcatttgtagaatgaataggagcttgatttcagagctttgaaggggggaagtatttaaaatttttcattattagcatggcattattgatgatgcaataaaagggatagctgtaaggcatgcctgctgagtgtcaggcacaagtccatttagtaccatttatatgctttattccttttaatcttcacaaccagcttatgtgatagataaaattcctgttttacagacgaggaaaccataggtcacaagaagttaagtacctagtccaaggcccacaggtcataaatctgattctaaaacccaggtttttttcgactttaccatattgcttctaaccagtaagagtagatgcttttcttaacacatttgcccggcactatggtaagtccttcacatattttatcttatttgccacatctaggcatgataaaattgaagcatacagtagctaaataacttgcccaagataatcagctgataagtgactaatggaggctttaaatccaggtccacttgtgccaaattactatgcaatattacttttagtaggggtactgagaaatgctagattggagctcataaagccaaaccttgcatatgcctcattggatgtcccttctctcttggtgcttctattcccacaaaatcactttccttctctttcattctatctcccgttctgtaaaaacatcagcaactcatgtccttacttgcttataaccaatctttttcattttaaagacactcagtgtagcccaaaatttgattttaaaaaatatttctaaagaaaaatattatttgaaaattactcttttggccaggcatggtggctcacacttctaatcccagcactttgggaggtcgaggtgagcatccagatcacctgaggtcaggagtttgagacgagcctggccaacatggtgaaactctgtctctactaaaaatacaaaaattagctgggcatggtggtaggcgcctgtaatcccagctactcaggaggctgaggcaggagaatcgcttgaacccaggaggcggaggttgcagtgagtcgagattgtgctgttgcactccagcctgggcgacaagagcgaaactccatctcaaaaaaaaaaaaaaaaagaaagaaaagaaaaaaagaaaattactcttttgatgaaagtaatggtagtcytctcagtgacccaagacaggaccatatatgttgtaacatttcactgatgctgcttttcttcaatatctcatagtaatttctctccattatttaacttaaatgatgaaaacaattgtaaaacaataggatgtaaaagaagagttgtttctttaaagcattctgtgcaacttacttgtgagctactgtttttttctattctgccaaattatattggatcaatcgggcaatgtttcttccatttagcctcatgaataatagtgactattttaccatggtaatagaggcatttattaatgacaaagtttattttaaaatttaaagtgaaaataaatgattggcatgaagttaaaattataattctgaaaatgctgactaaaattaaaactggaacagattaactctgaaattccctgagtctacagatatgctcactaaatcatagtttgataatggaaactctgatgttactgaaaacaactctctaacattttgattatataaacacatttcwgttttaagacaatgtgataggtttccactttgccactgcattaatgtggatacggccatttaattttagctggcagcaaagctgaagtgtggaaattagggattgggttgactccaggctaagtagacttctttggcttgtggctaaagacaattcttggagactccttagctataaaggaagctgttttgtcaaaaggttaacttttaaagaatgctcttttactttcttagtttggtgttaatgggacagtgaccattaatgtaagaaaatgtgatgactcgtaggactcaccttcttcatgtctcttctctccattccccacctccaacctatcctttatggaagatcacaaaataagtttctgaaccttaaaagctcagtctgtccattcactttaaatccttcagtgacaacttctctctcttatacagagaaatgcatggctttcagaataacctttgatcttctcagcctggtattctagacccctcaggaactagtcttgcctaacttgttccctgccacctgtccaccctcacacctcatgccagcaataccagatgcttttaatgacttaaaagtgtcaagtatttcatgcctttgtgtgaatgcttttctagaactacctttacccatcttcattctgctaacttctactgccatttacaactcaggttacctctctcaggaagctctcccagacccccacttggatgaagacatccttcctccacgttcctcaattactttgtctatttcttatttgcagaactgtaagcacaggttttctttctgaagaccccactccctacaatctcagtgacagcaggaatgatgccttatgagatttaatgttttcaattcctaacacagtgcttggtacaaaaagggcactcgaatatttatcaatttaatgagatgaatgtgtggcctacaaatgaccataacatgcttttcataacatgtagatgaggcagtggaatttgctccatgaaaattacatttttcatacctccccaaccccattctctcccaccccctaagcaccatgtgagacatctagctggagcaagaacatagtcctttggttcyggggtacagcttctttctgggcatacaactgcctcctggtggaggaaaatgtctccaagatcttgtccttagtaagcatgacagattcaagtgtgcctccacttcaccacctctgcctaacagcttcacttttaatcctttcgtcttcccaagactaacatctacaccagtggagacggaaactttttagtgctagagaaggataggtgggcagaagcccaccaactttggtacactgtcagagggatcacagactctaaactagctcattgaccccaagttaagatcttctgcttgaggtcctctccagaagatgtgccttagtcactctctctgcctccaaaacgtataatccctcctcttccaaactcctggaatatgtgatctccatcatagcctttagtcttccttcctattacctttgtaaatcctacctaaccttgaggctggcacacaatgtgcactcaaatagtgttagtgcatgaaggagtcctctgcaagttgtcttctgccctcagcattctagagaaactgccctcatggaggaaattcacgatcttcttccaagtcagattcagtgctagggctgaactctgccttacctaataaagggacttaacgggattgtctccaaacctttaaacttcaccatcctcttgattcccatagcattacacagctgggcctgtctctcagaccccttctcagacgtctttcctggcatctatttttcttctcactttctctcacctctttcctctgctcttttctctacaaatgtggtttgggggccaggcatggtgactctcacctataatcccaacattttgagaggccgaggcaggagcatggcttgaggccaggagtttgagaccactatcactatcactgggtaatacagtgagacccgtctctacaaaaaagataaaaaaaattagccaggcatagtggtgcattcctgtagtcccagctactcaggaggctgaggtggaagtatgcttgagcccaggaggttgaggctgcagtgagccatgatcatgccactgtactccagcttgggtaacagagtgagaccctctttcaaaatgaaaaacaaacaaacaaacaaacaaacaaatgacgacaacaaaaaactggccttggaaacctttccacasgaaaaaacccaagtatctccattcctaaactacaaaacttccatctcattctcttttgagataatttgtggctacttcaactgtgtgtcaaaaacaaaactcatttttccacccaaccaactcaccctctctactttcctatttgggtttgtattcagtgtttggttttcatccagtgttgtttccatccagtgctattttaaatcttacttggattttccacgtctttatccatgacccacatcccatgcccaggttactacaacagcctcttaaaacaaacaaaacaaaacaaaacatttttaacagttactgtaaaccaggcactatcctaagttctttatatattttgtctactttagtctttacaccctatgaatttggatcattctgatgtctattttacaacataagaaaagtgaggtttaatctctctagagattaaatcatttacttagaccacactgttgagaggtggtgtcatgatttaactccagaatgtccagtgccaraactcattaagctgcattgcattttccagggtcctccagttcctctttcatttcttcttccatgtatcctgtacataactgctgccagaaaaattcttctttaatagagtaccattttattagtcttttgctaccaaaggagggagactcaacgaacaggtgttgctataagagcttttgctgaacacccgacacagtgccttcttctgagatttgtcagactgcttccactcccttctcccraggactgagctctgtcatcaactcwcagctcaactggctgtcttgattttagtatcactggcaccatcaggcaatggatgctccctttgctagacccaattctagagcccttactatagtaggtcagcctcacatcactccatccagaaaagagaattcagacacaggtccaaagtggtttctgttgcatttcaaatccagagtctttcaaaacattttcacaaccttctgtacctagtgaatcctactgcccacatgtcttaacatcaaccaacccatgcagtccactttctttgattctacctggtgacgttaacttctattgctgatgcatctccacatgctgcccttcacctagaaatgtctgcagtatgacccctgtcttttcaaaatttaagccccatctcaaattctatttcatttgtaattcctgccttaactactccgatcctttcccttctcagaactcctattgaacatgtagtctgctccacattacttatctttcactatgattatactgtgatatattgtttcatgtctacagcrctaggagagcatgtcaaagtgatgctttccagaaccaagggagagtcactcttagragacagaaccagcttgcaactctctaagtaacattactcatcttgaagggaaatcttaggcattcgatccccacctgccacctctttataatatgttattgtatgtgacatgtgtgttagccttgtctccccagtgaaaccataaatttttagagggcagggaccatgtcttttacttgtatcccctgcggcatctattacagttctatcatgcaagtagcaaatactcagtaaatactcctttattataataactcattgataattttcaacttaagagctctatgctcaaatattgattcttctgatgtgtgtatataagaccaaatgattttaagacaaaaaaagcatttccctcattttgttcccacaaaataagcaaaaattttcccatatctttcaaagtatagtactaaaagcttttgtgcaaatagcacattttgaatactagaatttgagagacacacttgagaggattacaatctcgagcaataccaagcgggttaacaatagctgtgatgcaagcatttctacattgtaagtctcagagtgaatttaaaggcaagtgtccacagttactgcggtatttgcttggtcacttactcttcaacactgtgttgctgtaaagcagtactgtttacttccatgacctcatttgcttatattgtcataaattaaaattccaacgtgttctgataaacacttggcactgactgtatgctaaggctaagcctcttatttcctgccccaagatgaaccctattctctaccacaatgctcagagctcaaagcacatagctcaatgttctatttaacagacattactgtggcagtatgtaagcacaactgtagcaaaaataaagttaatacgttgagcaaatttgggggcatactgtgaagattcagatacatcaggactcacaattgaggcgcagctataatgtgggttcaaggtcattttattaaaaggggatacataaataccaaaaagtatgacttgaataatttattagcttctaagaatttatgtaaactaagtatttttctgtcctacagtgaccaaaaaggaagaagtaaaaatagtcatggtgaaacactacagaataggtttagatgaaaaatatgaagtaacaaaaaagtggtctttgaacgawctgcagatgattgatggaaaagaagcagatactgtaagtgttacattttataaggagatgtggaatcaatatgctggagatctttatgttcaatatcctgcttcrtatattcttggcatgtactaagtgttaagatgacattatattgttcgtaagtggcatagtttaatctactgggatgatgtactggtttttttattctgtttttatgagtttcaagtgaaattttgtctrttaaatttaaaagcacctttcccaagggccatttaacaggttaaacacaatctaccagtcaatcctgaaaatttaaatgccacttttccaaatatatgatgcttctaccatcactttctccccaccacaatttcctctataaatttaggggatttcttccctcatcttcaaattttaccatcagcaagcccactttatcctctagaaggatggaaatcctataatcttagagttgaaagtggagaaagagtaaatactacaatctcaccacttgacccctgacaagtgattttcacagtctgtttttgaactctgctgttgatggagaacccttcccccttgaactttctacctccacaatgctcaagtactggctcctgaggcttcaaatgcccaattacctttaactgttacccagatttcccattgagtaaagtcctattgactctctgccctcatacactcattatggcatgggtggaaatgtattataaccataatcctacaaactgcaattgttgggttactctgaattccctctagacggaaagctccttaaaaattaggwccatggttttcatcctttatcataggctgatagatgataggcactcaataagtctttgtagtgttattgttgaatgaattagaactttaagttcatttattcttaatcttaataaatgccatagtcttcatttggcctattgttccaacctttaaaatcttctaatatcgttattttttaatatcactatagtatgattcagatttaatgagcacaacattgaggacttcatccaagtcaataataaaattgatgaggcaggcagggccaagtatgtacctctagatcattgatggttaccattactactgctagtagtactgttacttgctaccaacaatattcagtaaactcttatgaggtgccagaaaccaagctaagctcctttcatgtatatttttacataatcaccataaaacctcttgaattagattctattattccattttacacatgaagaaagtgagacttaaagagattgacttgcccaaggtgacatagctattaagtggtagagctagactttacccagaaatctattaatttgccttctttggattggttgttgaaagcctctacaaattcatatattcatttattccttcattcatttattgagaatttattgtataccaggccccactaggctctgaggatacagtagagaattagccaaaagcacttatctctgccttaattattcatctaatctgaatatctaaaatttgtcatttactaaaatcaacatatactatctgctattacctggatttttcaacttaaaaacctttttaaaaaagttggtgtgtttgacatgacttcttggcaaaagaatgctggatttcattgctgtgtttcctaaatattcatgtaacacctttttgacaatatgttctacctaaatgtttgatgcttaggaaatggttaaatatattattacatatttatatgatagaatattatacagccattataaaatatgcttccaaaagaatatctcagaacacaattgttcagccacttaacaagttttctaaaaatcagctaaatataaaacttttctaaaatattacatcaattttgcatatttagtttgtcatgttattgaaatatgaatcttaatgtttttacaaaaaatatgtcagtatrtgtatatatgtatatacatgtataagtaaaacaaaccagtactttaataagttacctctgtgataagattacaaattttttaattattattttctattttatatttttctgtacttgtcaaatttctataatactgcatttaatttgatcagaagtgcaggtcaagttcactaatctgtagtttcaggaactagccccacaaattaactattcccaccaatctttgacccatttttcttgtcttttttctccagctctcaaatattacygatgttatcattgatttttacaagtttgctcaatgcctaggattatattcaccaggactgtcaatttagattcatttcaaatcaactaactgtgctctattttttcctcacttttgatggcctttaattccatcccaacattgttgattcttcccttttccctttccaatttgaagattattatctttcatagtgaacaagatacaaaatataggttgagtatttctggttttctcatcactttaagacctaaaatactcaattgccagaagaaaaaccataatatctaaagagtagttcttgcaaggtttattttctatagatgaagtaaaaataccctgamtgttctgggaatttctacttctcttttttaaaatcaaatccttgggggtcagcatttattacattttttacatttacatgattgcatttaatttacataaatgtaataatttacattattacatgttttacatttacatatcaataccaatgatacagttttatagagagcaattttgagccaaaaagttgtcaactttaaaatgtaatggaattgaaattgaagtcaatttataaagcagaaatcaaaatgactggggatttggagactggtgcaacaggagacaggatgatgtagcaaaaattgagcttgtgctgattgagatcttgggttytgtcctggctctgccaataactaaatgtgtgacctggacttcatatctctggaaactactgtgttatcccagctaaaaacatatcaataaatgattcctgagatcccttttagttctagcattctatcaaaaaagagagagaaagagacaggcagatttgtatcctatgtgcatgcatactcaggctccaattattacgctaaaggaaaatattgctctgttgcaattatctcaaaggcatgaggggtattttctacctgatgaggagcaaatgtttgcaagagaaaactccctaaggagcatgattggtatctggtgatgcaatggatgtgctttccctttatggagattcttggcagaactgtctttcaagctgtagttatgagcgccagaaaaaaaaaaaattgtgaatgtgactataaaagtgctgcgcttaaaaaccacaccacctttatacattttttaagtatgattatggtttttttaatttttattttatttatatctttttatttcaataggtttttgagaagcaggtggtgtctggttacatgagtaagttatttagtggtgatttctgagattttgatgcacccatcacccaagcagtgtaactgtacccaatgtgtagtcttttatccctcactgctcatcctaccctttccttgagtccccaaagtccattgtgtcattcttatgcttttgcatacgcataacttaactcccacttatgagtgagaatatatgatgtttggttttccattcctgagttacttctcttagaataatggtctccaattccatccaggttgctgtaaatgacattatttcattcctttttatggctgagtagtattccatgatatatatattatataaatcataatatatgttatatatattattatttctttatccacttgttggttgatgggcatttgggctggttccatatttttgcaattgcaaattgtgctactataaacatgcatgtgtaagtatctttttaatataacgacttctttccatctgggtagaaacccaggagttggattgctggatcaaatggtagttctacttttagttctttaaggaatctcccccttcttttccatagtggttgtgctagtttacattcccaccagcagtgtaaaagtgttcccttttcaccacatccatgccaacatctactattttttgattttttgattatgatcattcttgcaggagtaaggtggtattgcatagtggtttttatttgcatttctctgatcattagtgatattgagcattttttcatgtttgttggccatttgtatatcttcttttaagaattgcctattcatgtccttagcccacttyttgatcaaattgtttgtttttttcttgatgacttgtttgagttccttgtagattctggatattagtcctttcttggatgtatacattgcaaagattttctcccactctgtgggttgtctgtttactctgctgattatttcttttgctgtgcagaagtaaaagcatgattatgttttgtttttaactttttaaatggtaatatcacaatctttaggaactatcatttattaagctccacgctcgtttacatgattattcgcatgtaaatttcacagcagcactatctaaaataaggagaaaaatgagagtcagatcagataagcattttgcccatggaacaatcaaaatgttgtctaactttaaaattcatcctctatttcctgcctcctgcaagaattttcctatttaaaaaacaaattgcaaatatgtaagttgcctgtatrtgatgttacatactacatgctggtgaattattaatactcctgtttggttgagtcctctgcctatttgttatttagggcaatgtttgcctccacttctcctttcttaggactacttcaggtcagttcaacacacatttgttgagaaattagtagtcatcacgcataagtactaagaacatgatgataaataatgcgaaatatctgtcttaaagaagagttaggagttaggcagataatgaatgtgaaagcattttgtaaactttttaaatgcaaggcatcattgttactgctattaacagtaacaattattattttaacatgtaggacctagatcaggtttggtttccactttttcttgaaacatttctgctacagatatagtaagagcctagaggcagtctttagtaaatttgtcagtttcagtcaaatgatttgatcgtccttgctattaccttcaaaagtaattccttgctgtaaacttcaaagacagcaaattggtgatctgtagcatgccaatggctagctatcatgtatttcttccttctaccttgaaatagcacaaggaaccaacctcstactaaaaagggagagraaccttttctgttttccagaagtctgtgagtttattctctgctttatttatttattccctactcatcctctccaattcattacattgagaagacttaataaccrcacagtctgaggcacattttatttgtctaattgaaaaaacatagatgcttcaaaaataacctttcttattgttgatttttagaagcaattactttgaagtaggtagctttggaaagcccatttgtagattttagaaatatgtttgatactgatactttacaatcaataaacatatccaagagaatatgagagaatccaggaaacctaactactttcttggctaccaactaaatcatgtctctcattctcttccaggacaatccattttttgatctgcacttcaagaaagtgtacagtttggaagcatatagctgtgcttctaaatatgcctttgctcgaactgtaaataagctgaatcatgcatatcttaaaaaggacttacagatcgtgaactttgattctacatacattaacgatgattccatttggtcctccaacaataaggattgtttggtccttatgagaatatgcttttacgctttcaatcttgtgtgcttgtccctatgtcccttgccactctgaagctgtgtaccacattccttcatcagtgacctatgaaaatggtttcccaagtaaatattsattgtcataattttgtttttccttcatcagtgattattataatttaaataaaaataaagtaatgctttgtgaattgcagtgaaatgcattttaatgtaatcattcaacattgaagacttcttgccaatgtgatccttggtaactttggtaggaactgggtggttttgactaaattagtattctcctaaagagtgtgaagaaaaaccataaaagatctaagtatgtggaaaaacaccttgtgttcatggataagaagacttaatatcttcaagatgtcaatactaccaaaagtgatcagcagattcaatgcaattactatgaaatttccaacagcctttgttgcagaaatggaaaagttgatcctcaaaattcatatggaatttcaaggggtcccaagtagataaagaaaaagaagtacaaagttggagaactcacacttcttgatttcaaaacttattattaaagctatagtaatcaaaacagtgtggtacctatataaggaaaaacctataaaccaatggaatagaattgagagttcagaaataaactcacacatttatggtcaactgatttttgacaagggtrccaagtccattcaaaaaggaaagaataatctcttcaacaaattgtcctgggatgactgtatatctacatataaaagaattaagctggacccctacctcacaccatatacaaaaattaactaaaaacataaaacaagaacaaaacatagaggtaaatgggcaatgggtttttgtgacatcaaaagcacgagcaaaaaaaagagataaattggactttattaaaattaaaatctttttgcatcaaaggacattatcaaaaagtaaaaaataaacctacaaaatgggagagaatatttacaaatcatatattttataaagctttaatatccaaactatataaatatattctacagctcaataacaaaaagacaataacaaaaagacaagcaaagcaatttaaaaatgggcaagagcttgaatagacatttctgcaaagaagatagacaaatggccaataatcacaggaaaagatgtttaatatcattagtcaagagaaaaacgcaaatcaaaaccacaaagagataccatagcactgacaataccacttagatgccactaagaatgactatcattttaaaaatggcaggggtgggagggaataagtattggmaagagtgtggagaattggaaccatcatacattgctggtgggaatgtaaaatggtgcagccactatggaaaagagtttggcagtgtctccaaaagctaaatagagaattaacatatgacccagcagttctactcctaggtatacatacacacacacacaaaatggaaacagggacttgaatagatatctgtacatcagtgtacactgtggcattatttacaacagccaaaaggtggaaacgactcaagtgtccatcaaaaatgaatgaatagacaaaaaaagtggtacagccaaacaatggaatattattctaccttaaaaagaaatgaagttctgatatgtgctacagtatgaatgaaccttgaaaacattattctaggtaaaataagccagacacaacagtatrtatattgtataactctccttatatgaaatatctagaataggcaaattcagagacagaagtagattaaagatttacaggaactgggaggacagaagaatggagagttattgcttatctgttacagagttattccttatcagtttctgtttggggtgatgaaacagttttgaaaatggtgatggttatacaatcttgtgaatgtaattaatcccactcactgaattggacatttaaagtggtaaattagcaaatttaatgttatatataaccacaagtttaaaaaaaaataatgtaataagccaaaaaccattgaactgtacaccttacatggtaaatttgtatgatatgtgaattatatcagtatctacataattatataacctagatctataatctataattmtatctaaggctattaaaaggagaaaaagtggtctttaaaaagaagaaaatcttgtcatttgtgacaacatgaataaccctggaagacattatatgaagtgaaataagccaggtccagaaagataaatacaatatgatctcatttacatgtggaatccaaaaaagtagatttcataggtgagtagggtagtggttaccagcggctagggggttgggagggttagagggattatggagatactgttcaaaggatataaaatgtcagttagacaggtgaaacaagttcaagagatctattgtattatatattatggtaactactgttaataattacatattgtttacttgaaaattgcttaagagaatagatttagcttgatttacccattgtacaatgtatacatatttaaaaatatcatgttgtaccccataaatatatacaattttggccagtgctttgggaagccgtggtgggaagattgcttgagacccaggaaattcaagaccagcccgggcaatgtggcaagaccttgactctagaaaaaaattaaaaattagccaggcacagtgacatgctcctgtaatccccattackcaggaggctgaggcaggagcccaggaagtggagggtgcagtgagctatgatggcaccactgcactccagcctgggcaacagagtgagactctgtctcttaaataaataaataaataaacatgggagtaattgctgcagacgtgaccaacaaattaatgtttaaattagtgggtaaaagtttaggtagagatggaaagttttaatagcctcaaagtgtctcccctaacatatttgttgactaaaaataaaaaaaaatgtaagtttgcaatagtagacatctgctagacatcatcttaaccaggggtcaaggataacattccagtatggggacataacaatattacatgccaccagatatgaggcactaagaaaggcacatcacctctgatattcctcccaaatccataaccctagtctagccatgagacaatatcaggcatacccaaattyagggacattctacaagctaccactcttcgaaagtgtcaaggtcaggaaagacaaggaagaactgagtgtatttgtttgctagggctgccataaccaactatcacaaaccaagtgacttaaatgacagaaatttcttgtctcacagctctggagttcagaagcccaaaattaaggggctgcagggcttgttccttgtgagaactgtgagggaaggatctgttcctggcctctctcttgagcttgtagatggccatcatctctttstcttcacatcatcttcctttatgtttttgtacaaatttccctttttatgaggataccagtcatattggattagtattagattaccactctattgacctcattttaacttgattacctgtataaagaccctatctccaattaaggtcacattctgaggcattggagggtaagatttcaacgtgtgaattggaggtgatgaaacacaattcagtccataaccctgatgcacagattggaaggaagtttaaggagacatgaaaacgatgtacaatgtagattgctagattggatcctgaagcagaaaaaaaaaatatgggtgaagaagctggtgaaatctgataaggtctataatttagttagtggtattatactgaggttaatttcttagttttgatcattgtaccatagttatgtgagatgttagctgtgggggaagctgggtgacaagtgtgtgtgtaggagttctctgtactatctttgcagttgttctgtaaggcctttatttatttatttattttcaaaataaaaaagtaaagatctattcaagtttatttcctatgaaggagctaaaatataaaggccatcattttatagacagcatcaaaatgtggaaaaatgagttagtttaatcttattccctgaaaacaagtcatctagtatctagttgtgttgagaattgtccatattgttgagaattaacaaagagggcaagaggtaaaaacaacttttgatcaaagcagggagtgaaaatgatgatgtgctaaaaaaaaaaatctcatatatcctatgccaagtctttcactgccctctccagtgaataaaaacctatccatatagttcatgtgtttgcttcttaggggaaaagttcagactgtgattaacaraagtgaccacttcctatattagagtgatgtctttataaagagaataaagatagtatctcattcacctttggattatatacaggaggcactcaagatatacgtatttaatttttgacatataatttttataaaggggaagcagccaagatggccacayaggaacagctccggtctacagctccctgcgtgagcgatgcagaagacgggtgatttctgcatttccatctgtggtaccgggttcatctyactagggagtgccagacagtgggcacaggacagtgggtgcagtgcaccgtgcctgagccaaagcagggcgaggcattgcctcactcaggaagtgcaaggtgtcagggagttccctttcctagtcaaagaaaggggtgacagacggcacctggaaaatcgggtcactcccgccctaatactgcgcttttccgacgggctaataaacggcgaaccaggagattatatcccacacctggctcggagggtcctatgcccacggagtctcactgatkgctagcacagcagtctgagatcaaattgcaaggcggcagcgaggctgggggaggggggcscgccattgcccaggcttgcttaggtaaacaaagcagccaggaagctcgaactgggtggagcccaccacagctcaaggaggcctgcctgcctctgtaggctccacctctgggggcagggcacagacaaacaaaaagacagcagtaacctctgcagacttaaatgtccctgtctgacagcttggaagagagcagtggttctcccagcacgcagctggagatctgagaacgggcagactgcctcctcaagtgggttcctgacccctgacccccgagcagcctaactgggaggcacccccgagtaggggcagactgacacctcacacggccgggtactcctctgagacaaaacttccagaggaacgatcaggcagcagcattcgcggttcacaaaaatcagctgttctgcagccaccgctgctgttacccaggcaaacagggtctggagtggacctctagcaaactccaacagacctgcagctgagggtcctgtctgttagaaggraaactaacaaacagaaaggacatccacaccaaaaacccatctgtacgtcacaatcatcaaagaccaaaagtagataaaaccacaaagatggggaaaaaacagagcagaaaaactagaaagtctaaaaagcagagtgcctctcctcctccaaaggaacgcagttcctcaccagcaacgcaacaaagctggatggagaatgactttgatgagttgagagaagaaggcttcagatgatcaaactactccgagctacaggaggaaattcaaactaaaggcaaagaagttgaaaactttgaaaaaaatttagacaaatgtatagctagaatagccaatacagagaagtgcttaaaggagctgatggagctgaaaaccaaggctcgagaactacatgaagaatgcagaagcctcaggagctgatgcgatcaactggaagaaagggtatcagtgatggaagatgaaatgaatgaaatgaagtgagaagggaagtttagagaaaaaagaataaaaagaaatgagcaaagcctccaagaaatatgggactatatgaaaagaccaaatctacgtctgattggtgtacctgaaagtgacggggagaatggaaccaagttggaaaacactctgcaggatattatccaggagaacttccccaatctagcaaggcaggccaacattcaaattcaggaaatacagagaatgccacaaagataatcctcgagaagagcaact

SEQ ID NO: 9951 - DNA, 14166 bp, Homo sapiens
ttcgtttgttttttcagtttttttttttccgagacagagtctcactctgtcgcccaggctggagtgcagcggcaccatcttggctcagcaacctccacctcccaggttcaagcaattctcctgcctcagcctcccaagtaactgggattacaggcgcacgccaccaaacccgrctaatttttgtatttttagtagagacagggtttcactatgtggccaggctggtctcgaactcctaacgtcagatgatccgcccaccttggccttcagagtactgggaaaacaggaatgagccaccgcatccagcctaaaatgtttttcagattccaaattccagtgaaacaagtgaccccaaccagtttgaacagcccagaagaacataatcagcatgagaatacagttttttcatctccctggccccatgacttcactcygcactcttcaacaaatcaacaatctccacactttggcctgctctaaaactcttaagaaccctaaccccaaacttctcggagaragatttgaggttttctcccatcttgtctggcagccctgcgaytaaacctctttcttctgctgcaacccggtgtttcgggtgtatggacttgccctgccatcaggcaagggacctattacagagacactggctctgtgccctctgtgtcccagacatggttcaaaaggcaagtcccacctggccctgccctccagggctcctagtgtcgggggagcagaggcacacaggaacaggcaattgcacagcgccacsggagcaccagctccatggggctggggcaatgtggaaggggctgcattgcagagatggttccatggtaaacctgaaaatgagaactcactgtcatccatcaggagaacaaaaggatggtcctccatgcaatcatttagccagtgctgcctgagcaccgcagaagacacagagcatgcactaaaaagggactggttacagccccatgaaccaccactatggagaagcacacatgaaggctcattgtgactctaaaaaggaggtacagggggtgtgagratgtgtcaccaggggcctgatgcawktgtgtgtgtgtgtgtgtgtgtgtgtgtgtgtcggcacacccaaggccgctgagacctgacgtttggaagagcaataggcaagggtgatttatggagagtatgccaggcagaaaatgccgcaggtgtgaagataccgaggcagcaggagcatgatgggaagktcaaggtggctgagatggaagggagggggtgttgtgggaacaggctggaggtctgggaggctctgccctcatcagcaggtgggcttttccttagacttgttcctcagacttgttcctcctgtggttccaagtggctggttctagggttcctttccagccacaaggtgtccagaggaagatgaagggcggcttttttttttttttctgagacagggtctcactctgttgcccagactgagtgcagcggtcctcgacctcccggtctcaagtcattctcccgcctcagcctcccaaagtgctgggattacaggctgagccaccatgccccgccttcaagacaagaaaagccttttctagaagactcctggcctcaggcctgatctctctccttggccgcacctgggtcgcacttaaggcgatcactcacaaggagaacaagtgaaaartcccttgggattcatccctgagtcataggggaatgatgcacaccagaaggatgctgggctctgccagtccagccccaccagcctcctggagtggccctgaggccggctctccagaccctaggacctgctccyggaggcrggggctcctggaagcgcccctgacactgctccgggtgtctcttcaaggactttcccacattctacaaagaaaccttttggggacagtcagcaacatgtaaccgatagtggaaccagggcagccctgggttaagggtggtagacacgtgccccgcgagggagatctcagactggagaagggaacggcctcytaggcagacctgtactgcagcatctggactggcagccaggttggggacttcgtcccctgctgggaggccggggaaggcagggagcgcgccttgagtccgctgactaaatcgcctcagaactgggaagcaccgcgtagtcggtacctttcaacagaaacgcagaggccactggcgcgcaggaggaggcgaytgcaggtggaggtagtaccggggtaaagacatggagcgggtgsacgggaaccgctaggggcccgctggggcgtgaggggcgcggggaggaaagggccgcagcagcccacgccccgcgccagggccaggcctcatccggcgctcaaccagtgccacgttgagtcacctactggcaaggcatacaccgtaccggggccacacgcgtggacacrtgccgggggggtgctgggaacaccagtccatccggamcccactagacaaaaccttccagggccggaggttaccggtttgtcccgaaaggaagtggtgtggaagggaggggtctcccgcacgcgagcgcgcacgtgcatgscccccccacaaccgtgcttcgttctcacgtgcacggccccgtgccccgaagcccctccccggggagtggcggggcgggaccccgccgggcggcagcgccccactcaacaaagcttcccgcgggccctgccccatgactcaccgctgggtggggcgggcacgcaggcaacccgcgggccgagacggggtagtgagggccggaagcccggctcccgactccgcttcgtccccacaacctccggccgcctgaagtcctgaggggccgtggccctgggtcgtctcccctgttcccagcctccagtcgcagctggcggagagaagttcccgaggcccccccgacttgcaaggtcccttgccccgcccagagctgagccttccgaggatctgaggacsgagtcmagcccagctcccaggaggggccgggatcctggggcagggaataaggggcagggrctggctctaaagtcgggcgggagaggggcactaaccgagatgggggctgagcctccggtctgggagcttcgggaggcgcgtggcgggatggaaaacattcctgagaccgttggattggatttccgaatttgggaggctaggactccggctacggtggctctgctcttgggatgagaggactgggcccagcttgcgaggaatcatgaagtggacacagggtgggaacgtgaattttaatgagggggcagaccgaggaggtggtggctgcccggagatcagggccargctgtgctagatggcgcctggaaggggggtcacccargyctccctkctrtcatttcaggaggccgacccaagtctccctkctgtcattkcaggaggccgaattttttyccratcccagagaaggtgtcagaggcctggttagcagtcttgtcgatggtttcctgggtggtcttggccagctggtccatggctggggaagggcgggagagagggcaggtcaggcagggcccgggaaccacagtgccygtaggcttagcctggcctgggtctcccgggggacctgcttggggcattgtggacagagggctctgcagagragaggatgtgcctgggccccagccgggatggggcggggagtgggaggtgtgctggggttgcccgcctccctccagccccaccagacctttctgccccgcctctgtggcctggtccaccacttgctgagctgccgctccggccgctgacactggaacagagagatgtggcttttagcccctgttgaggcaccaccgactacaggtgccccaccattgccatgcctctgtgtcctccagagtattcggtggtacaggtccaagggatggatgccatggagataaagtccctggcccagggccccccagcccgaggggcaggagacctttccatgcctctgggatgtttttgtttatttctaactctgagctccttctctgtgggggaggagcttccctttccatctccagggctactgagaaaatgttggacagaggaaggaaggcagggcagggccaggctgcagctagcatctggactgttggctaatgctggtgatggcgcagaagacccttgcccccttttacagcttctcccctagaagcctggcccagatgcctgaattcccacctttcatgcacttagccctggggcttgcagttttgccaggtccttactgcctcctccctcctgtggcctgcccggaggggcacacaagcaaagccagtgcctctgtggacaggcagcttaagacattaggagacaaatgaaggaaggaggcaaaacttycaaggccggactatctcctctrgaccagagtttcggcctgctgggaatggagtcaccagccccgrrgggggctgacaggtggctcccgcctacagagctgtaactcatccctgctgctgaacaggaaagggcctgccttacccagatcccatcctccggaaagggttagtcaggcaagtgtgctgagaggcccctgggaacctcgtctcgattaacccatcagaaagcagcccatcctttgcacccagctctcagatggaaaagtgaagcccagaaggaagggacctgacacggaggcttccttggtagcatttcagtctcaagggaagaactgtgggcctcccctggagcactggtgaagtaaggggttggtttggatattgtctcctgactgggatatgggcaggactgacagggagctggagtcctaacgaagcctgggctaggtgcaggaagaaccaacccagtggtctcctgacatctcccacgcccccaccgcagctgggtcacctccagaatacggaggagagagctggaggtggaggaactaaggaccttctttgccaggtggggacttaaaggtaaggcgacgattacttttcggcgatgggggtgggatggaaacaaagccctttgaggtctggggcagcctctggtggcgcgcgcgggtttaagtggtggcgggccgcgcccgatccctgtcctggaccttcaccctctcctgagggcctgggcgggccgcccagcgccagcatggcctccttggaggggctcccgcagtgcccgcagcgcagctccggctcctccggagcctctgttccgctgcctccctgcgggcaccatctgtctgctcgccggggtgggcgttctgcctgccccctgcgtctcagtggaggaccgagccttccgagccaagctgccggtccaggaacttgcggaccgcgccgacccgctgcttctgcctgcgcatccacgcaggtgcccctgcctgagccctaggtcgcgcgctatcctcaccggcttcctgggcggtcccctccacctgttgcttcaggtcctgcaagcccttgcttgccakggcttcggggtatctgtggagtcgtcaagagcagctggagcgacgttggatcctgcccagagtggcgatgccaagcgccagctccggtttttaaggcgccccagggctggcctgccccgcgtaggggagagggckcggggcggttcccgtcatacaggctccggggagtggccgggccctgctccagagtccgcagggcagggagcacatcctggcctaagacgggccgcggtgggaaaggggcagaccgaaccagggaccgaagaggtgccaggacaggggtccagagaggagctggaggcaggagaagggcgcacaccacctcccagctcatcagccccagccctccctttctgatcctgggygtgagcgctgggtcagctccagggcaggagctcagggctggtgttgaccttaatgacagcagtggtcttttactgagcatttgtcttgtgccaggtgctgcctaacgctctgcagtctcttgtataatctttacaaccacctcctgaagtgggtatttttgttgatagcatcagtgtataggaggaaactgaggcagtgaggtcggtctcacccaaacgcatgtggcagsgacttggatcctcgaatctgcctaggtgcctgtaaaccctagggctctggcatcatcggagcccccagccccaaacagctgcaggggcactgctgactggctctctgcctgtagccagagacccagtggatgcasccggagagggcctggtaaatctttcccctgagagggcgagatacaggtgtgtgcacttgcagaccatgcaaccccaagggggagagggcagtgtgcctgtgcagcccaggcarggagattgccgtctgtcaccgaagccttaggaagttgggcaggaagcatggctcagggagggcaggaataagcttgggcctctcaggtcacctttcctgagatggggcaggcaaggcgctagagagtaygacttgtggctgttaggaggggacttagggacctgggcctgagtggagaagrtcatccttgggtgcagcaaaacagcttgcaagatacattcccctggcacacaaggggtgtargtcaggccccacccagctgggtatactcccactccagagtaggccttcaggacctggaggccagtgcacacccaccctgcctttctgggtctctctaccgcttcctgtccggggctgtttcttgcacctctgctggkgtctcccctattctggagcgctgggaagcccctgccacacaggcttggtctgctggcacataccctgcttctagtgctgcggggtcagcccctagagggagttgtttggaagtgcacctgtacacacacacacacacacacacacacacacacacacacacacacacacacggtatggattaatggagatgaggtcaaccctgggcaaagggaagaggcaggtgatgagattaggyggaggaagggggagggagcaggtctcaggcaaaacaaagcggyagcaacagtcctcccagccccccgcccctcctctcccagagcgaggccttgccctgggagyggccatatggatsccttggggactctggggagcccatctcagccatgccctgcctggctggcyacagccctgccagccctcctgaaatcccaccggtagtgcccaatagccaggcaggccttcgagtgttccagtttatcacaggctggtggtgccactgggctccaggccccatgggcaatgagctgtgagctggacaggaagggagcagcctctgtgggaagagacagccagcccccagcagatggtggtagagagagctccacgtggccctagcggcaggcactacagtcaaacctcttgggttcagatattcttagagcaagcccctcacttctctgagcctcaacatccccatcacatcacagcgtctccccaaagtgtgtgtgtgaagattaaattggctgaagggtgcccaggactcagcagtggaccttgtgagagcgtgcagggcaccagggcttctcagacaaggagaggcagaaggagggagcgcattaccgcattaccgtttcccccacccccgccccagtttgctgtggtgtcacttttttttttycctttttttgtttttggagacagagttttgctcttgttgcccaggctggagtgcaatggcgggatcttggctcactgcaacctctgccttccaggttcaagcagttctgcctcagcttcctgagtagctgagattacaggcatgagccaccacccccagctaatttgtgatttcgctttctgcagtttcagttacycattgttggggctcagaaaccaataccccgaaatatagtggtgtgacattctgaactgaagaagccttaaggtctctccgaccagactcccacaggccccccaaccctttgtctcttccaaagcatacagtgaagttgttctctgaagttcctcatstgccttaagtmtggacccaccaaagaagaaaacaatgaccrctggtcccttcccggagttttctctgactgaactgctgtcacaggaagaaagactgaagcctgctcacatacctggacagattttgcaaaccgttgtctgctctgtgagcccaacagactttgtcccaggccactgtatgttcttcaagcccactgaattcccctgaaaatcatttactagccccctgaaattacccacacttccccattgctcatctgtaccccatttcgtggtggggcagtcactctgatttccccttgcatgctaatgaatgtgtattccatttctattctgctttcatgagctgacttttcagtgaaccttcagagggtaaaggggaagttttcccttggcccctgcaccgcaattggtaaggtccaaaatgttaaatggaaaattccagaaatagctggtcgtgatggctcctgcctgtaatcccagcactttgggaggccgaggtaggtggatagcttgargtcaggagttcgagaccagcctggccaacatggtgaaaccctgtctgtactaaaagtaccaaaattagctgggcgtggtggcgcacgcctgtagtccctgctacttgggaggctgaggcaggagaatcacttgaacctgggaggcagaggttgcagtgagcagagatcgcaccaccactccagcctggatgacagagtaagactccgtctcaaaaaaaaaaaaaaaagaaaattctagaaataaacaattcatgttttaaataactttcattacagtatattgttataattgttccgttttcttactggttattgttagtctattackgtgcctaatgtataaacttcatcatagggaggcacatgtgtacgtgtaggaagatacatatgtaggctttggtactatctggggttgcaggcagctggaaacatcttgagtgtatcctggtggataaggggagtcaaccgtgctcctgcagggaggtcagaagcagcctcacagggtgcagagcacatgaggtttcaaaggcaaagagcactgccagtgcccatggctgggaaggggctttctggtgatgtttgtcatttgagtccaggaacaagccctgagtgtatgtgagagggggttgtaggggggctgtggtaggggcagcagggacccctctgggctcctccagcagaggcagaggrccctgaaacctggggcaggttgtcgctgggagccgggcataggtgccctctccctcacccccatcacctgacyagccttgctcctccttgctttctctcacagcccaggggactctcgggcacacccaggccccaggtggcctcctcctgggttcatayaggcctgcttaatgtgtacatgtctgggctggggagcaggaacagccctgactggcctgagctgcttccagacccttcatgcctgcccatggcagtgcttggggatgtggagaccagcagccccctgctccgttctgcctcctcagtggatgcccatggccagacaacagatacagcctggctccgctgtgtctgactgggctcccagcctcctgggctgcccttgaatccactgcagaggctggatggggaggcggtgtggacagggcagtgtctgaagtcacatgtggacggactcaagctctggctccaacacccaggcctgaaggcctggggcaaggcactgagatgctttgagcccaaaccatctgagtatcaaaggggaagccaggatccccagggaaccctggtctgaacaagccygcccggcatgcaaggctttaaaacaacccaggacacgctggccagtggcctacatgatgggtggtttgcgtcgtgcccggcaggcttgttcagagtgggctgggcaaacagcctttcatgtaggccactggccagcaagccctgggttgttttgaaactttgggttgggggcaatccactgtaagcaccttggggtccatgcagccatagcagggctggggagccacctgggcttctgcccagtcctgtgcgtctcagcaaaacctggatctacagctccaacctgagaggtttattctgaggattaaataaggtgaagtgctcagaacagtgcccagtcaacgcctgtgaggacctcagcagctgttgctttttactatttttctgtcaaggtgcggcttcgtgcgtctctgctgttgtgtttttggtggcaactggcaggcttctgggtgcaggaggggtgcaaggggtacccagctccaggtccagcggggagcatgagactggctggggccaggtgggaggcgccgcagggtccacctyctgtctctcctgtgggatgcccttcatcctcactaggtttagacttctccatctttgaaagtcaccatctgccccagggaggatgttaggtggccctgttcctcttgcgacactggagcccagaactcacatggagggaagacccaggagcctatcttcacctcctgctgacagtgggttcctcagggactcagagcaggcaggcgggggctaccttgaggctgagmtaagctatccccgtggatgggactgtgagtcctgtcgaatgtcttggggagccgaaggcagtgctgcctcctccatgttaaaggcaatgggtgggttgggggtgttcctgaaggctcacgcaggtcccatgaatgccctgtgtgtgtccctataggatacctggtcctatcaacaggctgaacccgttcctgttcctgggaggacctggggacccctcctsaagctacacagcacccagaggaagcatggcaggagtgggctcaagttttatttggmatcatttaaaaaaaaaattcacagcagcatawgtggggtcagaaggaccagagggtgggtggggccgagggagggcagtgaggttggtgcagcagcacaggtggacaggccaagggtggccaggragacragggcaggagcgtgggcagccgcatgtcactcaaggcgggcactccttgtgctaggaggggatggtgtccaaggcagaggagcrctcttcaggtcatccacgctggcctgtagccctctagtctcccccactctgggcctgggagagagaatgacctgcacacccagctccaggccccagccttaatgggccaccctgagtkggctgagaaaagttgtcttctgtgccccatgcctgaggggtcatccgtggggggacctcccactcaggttcagggttagccctgyacacagtccctgtaggggctgtggaaggtcaggaggcccctctgggccctgggagcccaggagggaagcagtgcgtctgtgggggatggggtccctaccmaggaacccccmatggtgcaccccaggagcccagctcctacctcctctgccacttcctctttctctttggatgccwcaccctcctgttggggggcagatggcctcaagtcctcctgtaggggacaaaagggggcatgagaccatgtggagaatgcagagacccctagctgccctgcaaccagggccttgtctaccctggcctcaaggaggagcagaggcccctcgtggccttgttgtacttggaggggctggaggtattgggggcgtgcaattcagacaatacccggggctctgatgatgccgaggccttccaggggcaccaagtaccctggagcccagcttcacccctcaagctggtccccagtctctgggaagcccctagttgggcttcactgatgaggaacctgggtggggtagggtggagtgggggttagagtgggcagaggcccctgaagccccaggtctgaccccaccctcagtagccctacaaggaagactgattggggttcacatagggactctgaggccagggaggcttggcatgcagctcagggccttcgagctcaaagtggtggggtgtgttggcatcagatcaggcttgcttcaggcccacttcagtccacaggagcatggctccctctctttgcctcctggacaggctctgggctcaggctggtcagggccagcagaggttacacagtcctctctcacttcccatcttctatctcctgcactccatgccggccagacacttgcgtgagatatcatgacagctgggtgtgtaggaccacactggtgattgccctgcactctggcctcagcacctgcctctggcgggggacgggggggaggcggggatactgtcacctctgtgttgccccagggccatcctgccccttggcggagtggggcataaaagggcagtgctgtgctggcgggagtcggccaggctatccaggggcagggcaggtggccacctgctgagtcctgctgccctaaggctgatgatgaggccaggggtatgagtggtcagatrgtccctgctgaggcctttcacagttcactgggagatgagtcgtgactggttttggggtgtcaccaggaaatgagtctccctcgaggtggctccaagggctcactagccctgctccgggattcacaaggaatgcccgggcaccctcaccccagggcctcttttgctgggggtgaggagggaggagccccctggggctctatgtgttctgcctgggacacakgatgatgatgatgatgatggtcaccttcctctgctgggtgctcacatagaccaggagaattgcttcatggaggtcatggccctgcctcatcacacagcccagggaggccgacactctcacccccatcttgcagatgagaacacggaggcccagagaggttcctttgcttctcaaggtcatacracgagaaaggrgaactaggagagggagcggctgccagytccaaggacatggagaccctgtgctggccctggaagcagacacctgggcatcgccccagagccaagaggagtagggcagcccccacccttccacccacccactcctaacgcagggattctcagtgctcagagcctcagactccaccacctaggaggcctggagcaggtaggagagctggacactgctcccccgccccacccccaggtaggaatcctagcccaggccaccacttacactgccacagggtctctcagagtacaggctgctcaggggaattccaagctcacatgaactagccatgggaccttgggcacattaatctctctgggccttagtttccacaccgtctcatggattttgtgtctattaaatgaactaataagcgtacaatgcgtaaagcagagcttgctgtgtcacaggtgctgggacagctcacccagccaacacccgtccctggggtgcgccccactgctcctgtgctgtctgctattgggccgcacacgcatgtgtacattcacacgcatgtacacccacacattctcacaaatgcacccacatgctcactcaacacacgtgcacacacacacaaaggcagctgcagagggtagggtcagamgcagcactgctttcttaccactaggggacgctacttccctgaggctcccagcaggaggcagctgccccgcccagcccagggagggaggctaggccctgggggcggggctggtgctactcagcccccggcctggtgaccactgcccgggaggctgcctgtcaccgtgtgggatcctgttttcacttataaaatggggtgtctcctaagtgctgagagccgtccggaagatgtggttttgagcctcactttccttgtctatgagatgggctcccaagtcccccgaaggggtggttgtggtgattccagacccgaatgcaggtcgaacagcaagcatggaccccaccccatgccggcgctcagtgggtactgaaactgaagccagccgcagccccccgtgttgtttcctggggtgtggagtggagtgatgccgcctccgcccagcagcctttctgggcccaggagaggactgggcaggtctgagggccggggctcaccttgcgcaccaccccggaggtgaccgcgatgttctccgcctcctccacggtcttggtggccacagtgttgacgctgctcaccacagcctcgctcacsgcgttggcctgctccttggtcttctcggccactatgggaggacactggctggcctccaccccagccccagccccaaggcaggcctgctggagtcaggctcgcagccccttcccaggagctcagagccctggccctgctgggaccctcccctgctccctctgactccagggcacctctgatgctggtgggggtaaggagacgcccaccctagtttagcctcatggtctgcaggggtctgtagggctt

SEQ ID NO: 9952 - DNA, 17700 bp, Homo sapiens
acaaaagcaaggaatggggaaaggatttcctacttaataaatcatgctgggaaaactggctagccatatgtagaaagctgaaactggatcccttccttagaccatatacaaaaattaactcaagatggattgaagacttaaatataagacctaacaccataaaaaccctagaagaaaacctaggcaataccattcaggacataggcatgggcaaagacttcatgactaaaacactaaaagcaatggcaacaaaagctaaaatagacaaatgggatctaattaaattaaagagcttctgcaccrcaaaagaaactatcatcagagtgarcaggcaacctacagaatgggagaaaatctttgcaatctacccatcagacaaacaatcccatcaaaaagtgggcaaaggayatgaacagacacttctcaaaggaagacatttatgccacmaacagacatatgaaacaatgctcatcatcactggtcatcagagaaattcaaatcaaaaccgcaatsagataccatctcacgccagttagaatggcaatcattaaaaagtcaggaaacaacagaagctggagaggatggggagaaacaggaatgyttttacactgttggtgccagtgtaaattagttcaatcattgtggaagacagtatggcaatttctcagggatctagaactagaaataccatttgacccagccatcccattactgggtatatacccaaaggattataaatcatgctactataaagacacatgcatatgtatgtttattgcagcactattcacagtaacaaagacttsgaaccaacccaaatgtccarcaatgatagaatggattaaaaaaatgtggcacatatacaccatggaatactatacaaccaaaaawaaggatgagttcatgtcctttgcaggggcatggatgaagctggaaaccatcattctcagcaaactatcacaaggacagaaaaccaaacacctcatgttctcactcmtaggtgggagttgaacagtgagaacacatggacacagggcgggaaacatcacaccctgaagcgtgttgcgggggtgggagcctgggggagggttagcattaggagaaacacytaatgtaaatgacgagttaatgggtgcagcaaaccaacatggcacatgwatacctatgtaacaaamctgcacgttgcacatgtgtaccctagaacttaatgtataattttwaaaaaatctcaaagaattagatyccctagcatgaggaatttatcttactggattttttttttttttttttttttttttttttgagacggagtctcactstgtygcccaggctggagtgcagtggcgcratctctgctcactgcaagctcygcctcccgggttcacgccattctcctgcctcagcctcccgagtagctgggactacaggsgcccgccaccacgcccggctatttttttttttttgtatttttagtagagacggggtttcaccgtgttagccaggatggtctcgatctcctaacctcgtgatccgcccgcctcrrccacccaaagtgctgggattacaggcgtgagccaccgcgcccggcctcttactggattttttaatgccactatccggcagtgattaaatagcaagttcaagtgattaaatctgatccaatcactacacttttcctttaaaattgctattaggttttgtaagtaaggaagtggaggcatttttgtaagtgcattaactctcaaaggccacaaaagtaygtttttaamcttatggatcaagttgtgtggatacgatttcagacccccagaggttctttcaacgtgtctagtgtccagcacagcgcacctggtcagagtttcgttgtaacttacagcaccatgttttcttyggagtgttgttcaggggtctcttgcatcagaatggcctgaactgcttgttaggaatgcagcttcctgatcttaccgtccagtttctgattcagtaggtctggagtgagccttggaaaactgcattttatttagcataatcccctgggggattgggggctccccaaagtttgagaaccaccrctaagggctattatgtttctgcaggcaaayrtatttttctttttttgttttatgtaatacaaagtaggagtttaaaaatttatttttggtaaaactagaacaytgtcttcaaattagtaagagccttgtgtaggagaaatattctcttcaaaaatccctccacgaaattgatcttaaaaagactagctgagtcaaatcctaacagatctgtcctgtatctggctgccacctttcaaaattgctgaccttaygcttacatattcraatgcttcctggaagtcaaaacatattttcaaaagtttctaatggaaaagaactaagcctgtcacttggttttaaaaggtggaaattgaaataagacaaaatggttgagattaatttcacatcacaagaatacaggtaagaaaagaatacaaatttccataacttctatcaactatcttttaggttgaggatattatgaaataatccttcccttcccaaccaacaatgaagatgattgatacagccatcatactgaaggattcctactgtgtcagcaattatattaatttcttatagaaatataaagagtataaycttcaaaaactgggtattgttaaattatacattggattctgttaaatgataacaaataaatatraatataaatagttaaattaaaaatatatagatattacttaataggtataagayactcaaatttatgaatgtacttaagtttctttgttttacartgagaacacttggacacaagaagggtaacatcacacaccagggcctgttgtgcagtgggggggagggggaagggatagcgttaggagatatacctaatgtaaatgacgagttaatgggtgcagcacaccaacgtggcacatgtatacatatgtaacaaacctgcatgttgtgcacatgtaccctagaacttaaagtataattttaaagaaagtttatttgctttaaaatttcatacattatgaatttactatgtcccctattacaatggtctccrcaatgaagagaccctcactgtcctattatgttcccccaagtagttttataatttctttcatatgagtcctctatctttcttcagtctacattccactgttactattgttactctygtrtataactctattgctaytgattaacttgttttggtgraagtgtttccctgttgtattagatagggttctccagagagataaaaccaatagaatggatggatggatggatggatggatggatggatggatggatggatggacagatgaatggacatacagacagacagttcagaaggaatttrttagaggaattggctcactgggttatggaaactgagaaggtccaggacagggcaattgtaagctggagaccctgggatkccattggtgttgytcagcccaaatctgaaagcttcagaatcagggaatctgatggcataattctcartaygaggccaaaagcctaggaacctggggaccactggtgttaagtcctggagtccaaaggccagagagcctggagttctgatgtccaagggcaggagaagaagaatgttccagctccaggagagagagagaaatcacctttcctctgcctttttcattcaatctagcccccaccacacacacacttacagctgtttggctgacgcccacccaagttgagaacagatcttcataactcactccaccaactcgcatgccaacctcctctagaaacaccctcacagacacacccatgataatgctttaccagttttcwtrggtattccttaattcaatcaagttgacacctaaaattaaagataacacctgtgctatgataaattggcaacattgattaaatgtccatgaacaccaagtactaagataaaaattgcagtgtccaatgaagcataaatgaaggtcatctaatccaggcaagaaaatggcatgcaaattgttgaaagaatgcctagaaacacacacacacacacacagtcacacacacataggtaagtccaactatccacaagcaatctctctgtatgtgttttgtatcccaagtcagacaagtctaagctcttctggtttgaggaggtagctagtgtgggtcaatgtacctwtttctatgaagcccatggtcyacgcttgcctgtcacacttcctcacttagcatactgggagccagagccctgatattttgaaatgctgtttattaataacaagtccatgggtctagctagaaattcgtgagattatttgcattaaggaatttggggcctgggagtttacttcatgtctttgtcacttcttgtaagacagcaccatttcttggtaacaatggacactatgagttggacactaaaaaggctctggttacattagtaactttatttcaactgtagcacttactctatgcttttttttcttctacctagtgttttaaaatgtatatctatatcttctctttaaggatatgtaacttagtgaacactcatcttctttctcactactttcagcctaccgtgtttatctaattcctatttcatttcgatcagggctttayacatttttataagttgaaagacttaatcraattacttctttactcttactttttagactgtatttttaaaaaaaatctcatgtgtttatttgattttggaatactctttttccaaaagagggctggtaggtgtctttgtgttgcaaatattctgattgttaattgcctgagtcaatatcaaggaattgtctataggccatcacatttaaatgccagtttggctagatataaaatttcagtttcaaaattatcttttcttcaagttagattggcggcacctctctgaaacccttggagtcacataaagtttcagaatctgaatgacttaagaaagsctccttaatacacacaccatatgtagagtgttacatagctagaccaattaggtccaggttatgactctcaaatcaaatacaccaatatatctgcagcaagacatataaacattcttgctaaaatggggtttttcaaagattatagacttttgccacctcacattagatatttttctaacaaattttgttrccaaattttcacaaatgcacaagcttttatttcmatttggagggtgtttcaaaagtatatatataagatttagcgtgaacagtataaaattacttcaggtatttttatttgattttgatccctccttcttttctttaactgtttatgttaacaaattctaaacttacagaaaagctactgtatcctcaactatattttctaaatggacttatttttttctcctttctcaggtatgccaatgagtcacagatttgatctctttgcataatcccatatttcaaagaagttttgttcatttttaaaattcttttctctttacttctgtctgactgagttaattggaagactctcaasctctgagagtctttcctcaatttggtctattctgttgttaatgcttctgagtgtacgatgaaattcttaaagtaaatttttcaattctagaagttcagtttttttctttcttaaaatggctattttgtctttcagctcctggattattttattgaattcattgtrttgggttttgactttctcctaaatcttgatgagcttccttacctccagagtctgaattctatgtcagtcatttccgtctgcttaattatcattactgtggggttggggtattygtttggagataaggcgacattctatctttctgaattgccagagttcttatgctgattctttctcatgtgtgagggctggtgttcctttaactgtaatgtaagtttastatagacagttggcttcatttctaggtgctttcttagggccaacactctgcattgataaaagaaaaacttcagccaaattaaatttaaatgagtttaattgagcaatgaatgatcgtgaatyggggagccctcagaatcacagcagtttcagagatactccaggggtgccttgtgatcagaacgaatttatagacaaaaaaggtaaagtgaggtacaagaatcggaagtgmggtacagaaagagtgagattggttacagctcggcgtttgccttrttttaacacaatttgaacattccgcagtctacgagtagttgaagtatggctgctgggactagccaacactcagccattgttacaggtgcataccattaagttaggttttcaattttgtctcacaaggttagggttcatccacaaggactcaaatatagaagtatggagtatggagttcttctaaggccrtgtttagtttgctttaacagtacagaatctttatttgtggctgaaatttttgccttaggtttcacaggcactgtatactggcaaaatatttttggtgttgtaatttgggtacaatatagtaagagtggtggtcagcagacagacttactcagctgcacagctctcgcattttggcatgttcacagtagtgctctgttggggcggaggggaagagaactaaccccctcaccagatccactcctgaatcttggaggatccccctcaaatcactggcaccatgctctcattttccttactcgggtgttctgggccacagggctccctcaggcaggggacatggctgacaagctgtactctttccagactagccytgcagaaagagcaacattctgctcctccaccagcccagatgtctcatccttctcagtgttctgagaktgtggatttttttttttccagatggagttttcgctcttgttgcccaggctagaatccaatggcgtgatctcagctccccgcaacctgtgcctcccgggttcaakcaattctgcctcagcctcctgagtagctgattacaggcatgcgccaccatgcscagctaattttctatttttagtagagatggggtttctccacrttggtcaggctggtcttgaactcctgacctgaggtgatctgcccacctcagcctcccagagtgccrggattacaggtgtgagccaccacacccggtcgaatgtgggtgttttaagagtgtgggctcccccaactgcttgaatgctttccaagctggcaaatctgccaggctaggagcagcagggatgggttgagttgcccaatctgccatccaggtgcttttcaggggaacatggagatgtatascctagcagaggtcaggtaggggtagagctggaagctggtactgagcctggtctggtagagaggagtgtagcaatttgacttctccccagcaccatgactgcaggctctattgggactatggcagctggtactgggctgctctggggttcaagacctgtgaggctccctgtggagtaaagtgttgcctccatcaaaacttctgggggctctctgaattcatctagaggcctgggagggccaagggaattctcctcttcycaggattgcaaaggtcccttttagaaactgtgtatcctcttggggggtctcactcaccctttctccttgttagagagctcctgctggctccaggccagrcctcagtgggcygttgcttggcttcactctcctctgttctccatgtccctttattcccttgatggatctcaacctggtttcttagataatcttcctgtacagtcagtttactcaccactttgtttcctctccatgagagcagcacacacttgctgcttctagtctgccatcttgactccatcctcctatatttccaattttttagttccaccctaactccttatgaggaagttttctatcagatcctatctcattctataactagaataatttatattattattatatagcaaactattatgtgtggagccaggtcttttgaactccaaaacttaagctcttaacactcatgttctctttcttgtatcaacatgttaaaggaaaatattggagagaaaaagaagtgtcatttttcacaaatagtgtttctcatatgctatattatattcagagttttggacattatatataaatatatccaatgtaaggtattccatatagttggtttcaaattgagtatatcaacataattgtataattttgtataatcttaatttaaacttcattaattttatgaagttcatatattctttatatctacctttcaagaagaaaggcaggaaaatatttgatgcagaaagctttaaaaggcaagatatgctatataattctgggtcttaaatatgcaaaataaaaaaaaaacgaggtaaaacagagaaattattgagggctttccatgccagagtgaggagyaatgcacttttcccaaagaaaatggagaagtattcaatgatttcaagtagggtagaaatatgaattatagagagagctggctcaatgaaaacaactgattagagaaattaacctggaaaggggaagatcaagcaatttttgaaaatatcccagtcagtaaatgctttgattctacattttggaggaagttgatttccagcaaagggacaatgatatggccacagaggacacagagaatatggtccaacaataattgagagagcatcttaatgagagctgattagggaaaagccaaatgagcaagtcagtacctcaacaagactttcttgtgctgtggcagaacrtttcttctaaaatgtaagaagctacagccyattttgtgcataggccacataaatcatagtaggtggaggaagagtcaggtatcaatatgcagatatccagaaaaaggttccagcctcctaaaagatggcaagaataaccagagttcgacaccacacacagcacatactctaaacactggaacagttacctatttccagacacacttccaccacatccaccctaacccaactcaactatcataatatagggaaaaaaatttttagatcrtcttgatgcaacaattcataatcaataytccaaatgatgtaactggtgattacagtccatcttcatcacacacacccaagagcaacactttgacatcggccactcactcacataggcatagccagtctttccaattgtctgtataaatgtgtgacactgtacgccacttttctcttgtaggttctacccrtcacctacagataatggtgagtaaatacaagaacaatgttctgctgaaaggattagaarccatcaatgactatcacttcagcataattaattccttactgatcaatgatttaaaacttaattcaacaaggagagacgaatatgacaaaattcagattgccgacttgatggaagaaaagttcccaggtgatgctggtttkggcaaactgagaactcttcaaagaaataccaacactgggagaggagaccttgctgaaactcttagaaaagtcaaaaggtaattgggaaaagggaattctcccctccctgccactgtccctaaacccttcccaaccttgaatagaacctcakcttcattatggttaatatatccatttcccaatttatgcctcagcggtcatgatattgttggtactttgcatgtcaacaagttgacagcatagagcattcccattccagtggattcatatgttttgaagggtgtatctggggtatggagtaaaagcaatagataaaagttgtcgatgaaagaccgaggcttctggtatgataaaaaggttagaaggtggtgaatcaagccgggtgcagtggcttacagcactttgggaggctgaggcgggcagatcccttgaggtcaggagtttgagaaagtggtgaatctaaatttaaaaatgatgttttatatgttaaatatatcaattaacctattgtttcacttgctctattaaggctatttacactatcaccattatcctctgtagtaacaaagaggagacaatacttcaatgaaagcctacctgtcagagagacaaactacctttttaaaaaaacacagatttaattttttttcaaaaggcaaagttyagaatcaccatatagtcacytcataaacctatatcatatttcatttcactggtttctgtaatttgaatagattatctctggagcatgtccaagaagttagacttgtgaaaatatgacagttttacaagtaaatgataggagaaccgggattgggaaacatctgactgaggcacatggagttcgcaggacagaaaggatgttctccgtgaacaggggaggagtaatgaaagcactgaggagcatgagactttgcctgtgcctgtgcctgtgcctgtgcctgtgttatgactatcgacctcattgaggccaggctggattaatacagttgagtacactaaagcacacctgaatgcttaagcaggaactgagacaaaacagcatagagattgtttcacctcccatagatcatctgctctgggtttagatgtcctccttttttctttattggttgtgaataaaattaaatccattccagcaaaaggaaaaacctcatcaaagaagaggaagcagagaaaagtaggtccaactacacctttagcaaccacagacaagaagttcacagctgaagraggagaggagactcctatagctcaggtaagcttgagtaagaggagcaggcttcaattcccacagaagaaactgccatggctcttccactctgtctctccagcaggcagtttttcttcattagtttctcatcaagcttcagatttatcaaattgcataataattaatcttgtttgtaaaaagcaatgagctaaacamtttagtaaatatatatcgcacaaatatagtatcttcaccccccaatagagaagagtgttaacttcaggttcagaggggaaaatgctttgtycatatttataaaaacctagttttttaattgcaagtcagtacatccccaaacactagtacttagaggaatgatgtgtataactttcyagtgtctctttttttttttttttttaatkaagccatctatgccctgtcttacaataggccaggaaatgtgcaccaatcctttgtttccagaaagacaattgacatataacaaacctactacccagtaatgaaaatgtgctctacttcatttgtcactgaaaacaaataacaggaaaatcaaaccactttcagaaaagaaaaaacccaaccaaagaaaaggctggaaccaaaaggagtaagatatcygaggagcagactcagcctccctgtcctgcaggagccggcatgtccacagccatgggcattccccacctccccagacctcatcatcagctccacccaacacttcctcaactgaggtacactctccctggtccccttttgctttgttttcttcaaccccaaatataaaaattttatctcctacttaaaaataacatggataattagccaaataatccaatgtatatactgagaattagctagagtttaatcttttgcttccataggatactcgataaatttgatattatctctgacatcaggaggttttctgtcctgtgttgtttgggagaaatayagagaggtatggagttcagaatagtacaggtagatacagcagtgtgttcacagtttactgcttcagtctcttttacgcctcttccctctgctcaataacctgttaaagtttctttgatccacaatatgttcttttcttcctcagcgttttcacacaccatagtccctctccctgtaaaactcttaaatggctaaatagaggtactctgtggatcccaatattgatattccgtcctcagggaatcatccctggaaccacgttcagactaggtaaaatatttacggtgttcactttagtagaatctcattttttcctaccaattatgttaactacaactaataaatgtttgtccattcaatttattctgtgwtgtaagattacaagctgcttgttgatctggtgaatccctgtaacccagagatttctttgagtgacagaaagtactgaaatgtgaatctgcacagctaatgaaggacaaatgagagttatctaatccagccatgaaaaccatgaaggttatatttttgtgaggcctaaaacagtacaaaaacaaacaaagtggtggaataggatggagagttgaaattgtggaaatccaggcagaaggaagacyatacaccacrtcttggaaaataaaggaagtgggttgcaatttataattacrtgttcattcttattaggttgtactacttttaaagtggcttctcatattttgctatatctcacatcattgttcatctgataatatatgaaaactmcaatgtgtttcttattccagaaaggggagtaattcttattcatgaataaacactgamggagaaagattatggatcatagtgggaaaagccacaataccatctacattctctctctctcattttttctacttaggtaaaacatgattactttagaacttgaggaaatggttaaaacccacaagtcaaacaaaaagtaattaatttttaattaattgaaaccttcccaagcmratattaataaatttttctctgtatttttagatatactctttataagcttgcattttttgcaatatagtatcctayaatgattactattttagtacttgttttattcatttaactatcagatckatcttttcaagtctatgaattaaaatacaaattattatttagtggcaatgtaatgttgaattgcacaaatattggaatttattttmaaaataattctctatttacttccaatatcccaacctcaatgcctgtcctaggaacattcatgcacctgtgccctttgaggctcctattatgtcctttagagtagttgtataatttatttcatatgtgtactgtaactttcttgtcaacttgaaatttgttgttactagtgttttagaaaagtgttccttgtgttatgttatttggcaatattaatataatcmattaaagttaaatcctagtaaagtccaaacacccacagatgttgattgtgttcagtgtgacaggacagatcatttgcctcacttctggtgcacagagacaactagcatatttctatacaatacagggtctaaataaktaggttacgtgccaataatttcatctctttgtactctatcccaactggagctcataattttactttggattttgatatatttactttgtataatgaattgtactaccaaggttgaattctagttgtgacgtgcaataagtataataaatggattggctaaytttctcctaagtgcaaatactttcagcagctatgcatatgatctaaacatttgtgctgtctcccttctgtcttatttacttatttatttatgaagatagtattgaataaaaattttgaattccatgatacttagaagataaggtaatcgaatcctctcatttacaaartaataataataataataattaaaaggcacagttttactgatatgtccatgtccaaattcaaggtgacagcatgacacattcaattcctccctaacagtcctcaraaaaattacaaactgctatgaattcaactaacatttcacatgattgactgctttgtaaccctacatacataycttctaagttagccccttaaatttacctccagattttcctacacactctataagagatctcgcawakaaatggaattatacarttgatgaataatagcttctgtgtgtaagatactacaatacaggaaccatggatgtagtcaggaatgaaaaatggcacaatatcaagtgtgaggaaggagataagttttgattattctgctttcatctaagaacaattgactacaagctaaaattgatttgtagaattcacatttttatcaaggtgggaactggatagaggaacattagtttgccaaagaagtaaatgattttgtttaggcttcaggaacactagattcctatcctgttactcagacagtccagcaggtgggaggaaaatccaaacaatgtccytgcactcayttctacgtagaagagtttttaatgatattaaggaaatagtattcttataagcttcaaaggaayattcaaaaggattataatacttgtgctaagtaataaagtatttaaagaaattaggatgacagggaagtaatttcatatagtgttcaagagaaagggttwtgaataagacaaatctgatttgaatcctgaattcaacactcattagttgattgatattggrgaaatagtttcactgatccyctaaaataatggaagtctccacttcatcagcatggttaaaatattaagtgagacaatgcrtatttatgcatataagtttacatatatgtaaaatttatataacatatctcactgcctagtacatcatgagaaattaatctatggtaagcactacttttcctatcacggcaaagatattggaaggggatctaagcaatgaaaatgacacaygcaaatgctctaaagtgtgaaactgcactgtgagttctgtacaactaaaattctataaagagtttctatgaagaaactatggaaagatgcagcacagaataaaaattgggggcgggggcaggtggtagagtatagctgtttgtcagaaataaagaaacagaaaattcattgtgaaaaacagataaaacctaaagattttatgcagaagaatgtctgatcacattgacactttagcaaaaaaaaaaaaaaaaggtattatggtaacaattctagaagtatgcattagagaggcattaggttagagcagagatatcaattagaagcaatgatgtgcccaagtcagctctcaccagaacacttattgctaagtatttggggaktttatgaactgtttgyaaaatctttggaagtttgaaaytagccatagtggaaatatttakgccagcaaaatatgcaaaggctacaaatagatattttctaaaattgggcagctagtttaccaggacaccacgaaaggtttcttcagatttctatttaagaaggagaaagacaaacagggctgtgatgaatggagtaaaatattttttgaagctatatcctcatgatygtgtgactaattaagtgatgatgttgagaaagakaaaagatttaaggagcattcaaagatgattcwwgaatattatccagrcaactgtataaatggtgctactgttcactaacatcaagaaagcagagaacagcacagtctaggaagtgaaaacatgttgtttggacaagttgactttgagctacctgttggatatctaagaaatatctctctatcaatctgaagatatatagatctgtataaacmgatctggaacaaaaaaagtaattttgtactggygagttatgcatttgtacatttagagatacatgttaaaattatgggtttagatgatattatctaaaataattgtataattctacatttatactaatagaaaaytgagcactcactatgtttggggaagtgagacaataatgaagctataataattattcccatatcatagataaagataccgatgctcagaaaatgtaagcaatacacaccaattgaaacaaccagttagtggtggaactgacattccagcccaggctgtgtagatttagaatgcagattcttaagcaaggtgaatgagaagatcaaactgccataggtggagccatagaaaagttggatatatatttgggrgtgactacaagtaaaggatgctacaaatgaggatgaaactatgtacacagagaggtcaaagawaaagtggaaatatgtataatatgcatcaaaaataagtttaacaaggaagagggtcaacacagctcatgtcasactcaaataaacaaggaagtcttggaataacttcatcttagaccaaaaattgctatactttagtgaarggcaattgctgattcacagaagaaaacatggctggctctccataacatcatactaaatatctcattctccaaaagcacactaacgacaagcacaaaggttcacaataggagycttgataacactaaccaaagttaaatttaagtacaaatgattaaaatggaaatagtgacataatcaggcacacagacatatatatgcacgtaaatcrttccacatctcagattccctaattcaataatcctttcatttcaattgaaacaaccatagwtgtactgtgaaaaaccttacctaatatcctcctgccaacattctgcctaattaaaatcttccctgaatgttttgcactgagtaaataagctattccctgtmacctgtggtactgccttactgcctttgtkkaactcctgctctgtttaaatgtacccataatgggcatgagagcatatctctattcagrctccagaccacagctgggagcaagcagactcaaaagatggtaatacgtyaaaggagattgctgagagagaagcaatgaccrttgagattggagtaaaagaataatgtagccgaggaggaggagccaagatggccgaataggaasagatcgggtctacagctcccagcatgagcracgcagaagacgggtgatttctgcatttccatctgagataccgggttcatctcactagggagtgccagacagtgggcgcaggtcagtgggtgtgtgctccgtgtgcaagccgaagcagggcaaggcattgcctcacttgggaagcacaaggggtcagggagttccctttccgagtcaaagaaaggggtgacggacgcacctggaaaatcgggtcactcccacccaaatactgtgcttttccgaccggtttaaaaaatggcgcaccatgagattatatcccgcacctggctcggagggtcctacgcccacggagtctcgctgattgygagcacagcagtctgagatcaaactgcaaggtggcagtgaggctgggggaggggcwcccgccattgcccaggcttgcttaggtaaacaaagcagctgggaagctccaactgggtggagcccaccacagctcaaggaggcctgcctgcctctgtaggctccacctctgggggcagggcacagacaaaaagacagcagtaacctctgcagacttaaatgtccctgtctgacagctttgaagagagcagtggttctcccagcacccagctggagatctgagaacaggcagactgcctcctcaagtggttccctgacacctgacccctgagcagcctaactgggaggcacccccagcaggggcacactgacacctcacaaggcagggtattccaacagacctgcagctgagggtcctgtctgttagaaggaaaactaataaacagaaaggacatccacaccaaaaacccatctgtacatcaccatcatcaaagaccaaaagtagataaaaccacaaagatggggaaaaaayagaacagaaaaactggaaactctaaaaagcagagtgcctctcctcctccaaaggawmgcagttcctcaccagcaasggaacaaagctggatggagaatgactttgacgagctgagaaaagaaggcttcagacgatcaaattactctgagctacgggaggacattcaaaccaaaggcaaaaaagttgaaaactttgaaaaaaatttagaagaatgtataactagaataaccaatacagagaagtgcttaaaggagctgatggagctgaaaaccaaggctcgagaactacgtgaagaaatgcagaagcctcaggagccg

SEQ ID NO: 9953 - DNA, 12801 bp, Homo sapiens
caggatgagcctgctcattccccctcccccaaaagtccctgaaaaaactacaacttaaggaaatgcaacttgaacctttttagttcacagattcaaactcatatcctgcaagaccctagcatatcttgttgaaaattttctttgacttttcaacagtagtcaagattattttaatgaaaatatttctccagttggaagacatgggtatacaggactttgctagaacggcaaatgctttttcccagtcttcatccgtgtaacagtaaatcrttattaaacaaacacacagaacaaaacccactctgattgtgtatcaatcacctgaaggggcagaagggaaaagtacaagagtgaagaaacttctccccacccacagccaagaaggaacgctgcaactaaggcagtttttcatggaagaaaatatccaaagatctagacagtgtttattttagaaaaggggaagagagcaagggagggagggaaatggtagggaagggactaccatttcctcttactaacctacattaaaaactaattgtatcaagcaatctcaaatgcgaaaagcaaaactgaccctagcacaatttaaagtgaataatgttttccttgacaaaaattcggtattttaaactcattctgagcaaaattatcttttaacctgatacaccaaactattactgcttttcccaaacaacagttagaacatgagcttttgagtttcttacattctttacgttttaaaattaaaagccaaattcctttaacytcatatatcytaagccactctgatttaaaattacttctatgtcattgtcttctagcattggtctgcaatagaatctgtgcaattaacaataatcttcttccctctgatctttctagagtcaaggatggcatatctccttatcttatttgttccattagattggcatattttgcctcatctgtcaccttctatcaaactctgctttcagatatgcgttaattcatttttagttgtcctcaatgttctaaaatagtgatgtttgacagaattaatacagtgctctagttctttctgttcaactggtatttaattaaagatcttggaggmcatctttctctcaggctacaccacttaaaggaggaacattacttcytccatggacaatgtgataagccacatggcaacaaagctgcctccctaaggtctctcatttaatagactgctttaccacatataaactaccagcaaaacagattatcactttaattcacattgattttactcttcatatctctgaatcacaactctgtcatgggctgcgttctctcttaacttctgaatttccagaatttctgtagttgtaatgctctcctgtatttttgcttttgtttcatctggacttcaaaaagttctaatggcatctgattgggaagatttcttgaatctctgataacaacgcagaagtctttaagcaatcagaactgccttggcgcacaaactgaaaactccgttttaaaatcttctgaattaacatcttttggagaatagcccactcaacttgatatgtcataattttcaattctaaaggtggcacggataatttaaagtggcacttgctatttattacttaaataattgttctcttggacgggcttttgaaagctagtacttcttaatcattttcgactatatcagaactgtaacagacatgtcaatttaagcaaacttcatgagcaataaactaacaaacagactctaggtggtggtataggttattttttatcatgatgttttgcacttataactgcaagagtcagaaaagcctttagtctcttcacacacttctttagtgcaaagttaacaatattttagggtgttaaaattagcaaaatccaagttctgcrgagtttagaaatgcatgtaaaagaggcattaaacctggttttcaactaacttcccacaggcattaaacctggtttttcaactaactcatttgaataaaatcaacaacgaacagtccttttttttttctgttatgttctgatgtatattttactcacactcctagggcacttttaaaggtaagtttggaaagaggtctttctccaccagagtatgaaacagactagaacaaccaatcctacaacctgcagggcagtagccgctccactaattgattctccttctttgtctctaggaactatgcccaggcagaaaaaaagttactgtaggtgatgaagccagtgctccctgaaccaaataaaccctatcgacgttaccgaactgccgggcaaaaccagagcaactcacttacttggarggtgaaaaacacttcaacatactccaggcggcaaccgacacttaggggccaggcagatgaaacaccatttgtttaaaaagtctattatttcactgtctcttcaacaaaggtggaaaactgatgattaaacactgaataatgccacccacttactaaacctatgattcactaataagcaggttcaatgcaattcataactttaaagaatgaattaccgaagccccttgcttcacaaattcccccaagaaacagaaagagcattcatcacatataacccgacaaccatttttactatggacacctacagatggcttctcttcctctaaggacacaatttccttcacaatcccacatgtaatcatttacaataccagaaacaaactccaactcagttccaccaactgggtttttaaaaatccttgtgcctaagaacgtcttttttccccaaagtaaaatgtgccattaaaaaatatttttaaaacgcaaaagtgcttatcattccgtacttcttttactaccttcagcagccaattattgacgtgataaaaggtagaaactcctggaatgcttcagagatcaacatgtgtcacagactcccagcctgtccgcctctaagayacagttggttcctttgttccttctgactgaacaccaactcctgatcaaaattgggaaactactttggaagggatgggagggtctgcagaatacatccacggaaaccttcataaaacaatattcaatcgtaataaggtggacacagaagaagggagaaaaggcagcctcccggacttccaccgggctcaccctaaatgggggccggcccctggctcctggtaaaatgatggctgaggcctcgggtccgtgagcctcgccatcgggaggggaccgcgagtgcgggcagagcggcccggggtcgggtgggggccgggcgagctgtcccttttcctattcactttcccagccgggtatccagcgagcaaggagcagggaggcacccaggcgaaaggcgccgcccaggatccggctggacagcaggacggagagcggcgaggcgagcggtgcccggggttcgggaccgagagggcaagcgagcgggggcaaccccgacccggccccccgagtccggccccgctcaggggccacgcgacggccgcccccttgcccagaactggcacggacgggcgggccgacccggggccactccacaacttgccggcccgccgccccggccccccgcgagaacccggagactcgaaccaggcagcagaggcaggatttccccggaaacgcgccctccccgccgccccgacgcccccgcggccctgccagccaagcgagagccgacgcgggccgcgctcccgggccgtttccggcggcgccggcggccgctactcctggcgccctggccgcggccgtcactcaccccaggccgccgcggctcccagcctccggctccgtcaggctcggtccgcgaaggcgcctgccgccccgtcctggcccggcgccccggcgagctcttccctccgaccagcggcgctcacggcgcagcggcggacgcgaggccacgggcggacgggcgcgcgcgggtggcgggcgggcgtggggccgggtcgtccctgcgcctcgccgccgcctcctccgccgccgcctcccgagttcggggctctgctgcaatgtctgcgaggctgactttgagcgcctcgctcaccgcccgcccgcagccgcgctcctccctccgccgccgagtccgccgcggcccagtccctcccctcgccgccccacgccattcagctcttcagccaagtttcttaacccttttctccccctccctcccattgtcacccggtcaggaggaagccgcgcggatccgggcggctcacaggagctgcggaaccccctctgtttcgtggatttccttctcgcctgctctccgggtgtcccagacggggctgcaagacccggaggcagcgagaggaccgcgtccccgagagaggggctgcacggcgcgcccgggccgtcccccgggctcccagctctgtccagccgcccgcgaccgctgcaggcgcctggacagctcctcctggggaccggggaaagcgctcttgggacccaggccgaatgctcccgtttgggcacagcctgggggccggggcgccccagacgctccagggtccccgcctgccttaagcgtctacctcctccccttcaccccacaacacgcgctctctgggccccctttcacccacccacccccaatttctatctccttgtaatctgtgtgtcctgctttaatgttggggggcacgggcgcgaactctgggtcactttgaccccacgcccagcacgtagtaggcgcccagcactcgtgtggagcgactctgggaggaaaactaggaaggagacctgaggagcgccccgctcagctccctggacagamgtaggacccaggagcagggttaatcctcggctgctttgtcactgcgaagtctccagcggagtctgtcagccaatctgcatcatccccgggaaggatctgacccaacaagacaagggaaaaggagcagggctgctacttcttcagcagctctcctcggttcggtctccgaataagaaataacaattacatcacgaggccggggcggcagcgcggtggagcctctcggtttcctgcagcctaatctcactgaacccgcctctaaattgggggggccacagattggtgaaacgagaaagtggaaggaggagagagtcatacgaaaccataatttccccttatccttgtatttgctgtttgaaaaatcgtatcctcaacgctccccagacatctcactagaactattaacaccccctcaacacctccccagatgtcaggtttctttttgacttgagcatctagcatttagtaaytcgccatgaaaaaaattaccaggggaagcgagtgttgttgctgaaattgtttttgcttgacacaaaaaagctaaagtacagcttagtctcacccgaaattctgaaacggcatgcccgtgttaaaacacttattacataagacaaatgagccgatgaggcactccattcttatatgtaggttttcatatcctgaagaatttgatagcatttggaaatgaagttgctaatgmgcttaaaaaacaaraactatccaagtcatgaaactgtattctgtgcctgttatgtaatggctgtaytgtgtattgcaaatttcacttaacctttaaacaatatgaatgagagttttagaatactgtcacagtcttgaaagtgaaagcaatttttcaaattaatgcttaataaattcagcacccakcacagtgccgggcacatagtgccaatgttttccttagtggcaatggcacattttaaaacaattatttttcatcaccctagtgattgaactatgcaatctgttgccattttatatagttaaacctcatataatataataccatattatttgcatataccacaattcaaaatctgctctaggcaaaataaagtctgctgttttttagtgcatcatttattcagaattgatacaaagcaaaccgtttcaattcaatgatgaccagcataattggagcttggcccttagtggggggtmaaactttttttatgaaaattatttttaaccattatacagatttttctacaatgtattgcaaatgtttctcttaagcagtttgttgaacrtcatttagcattttcttgataattcaatgttaattttattaaaagtaattattgtagtaggttgtagcggattcagtaaatatatccagttcctattctatattctttctaggtgttaggaatgctcccaggaggtacaaaagctatcagtcgctgcaccgaaggactctaggatgctatgacttagtgattatctctgccttttgtaatttctctctctcccccttcactaactgacaatctattgtccttactgttactagcatagctgccactaacattctcctcatcttctgatkggtaacttccagtctagtgcrgactgggaatccagatagcctcacttgtcacaattctgtctaaagtaaacttaataggttctgggtaagggactaatgggytcaccaaggagtagggcgcacacasaccttagtgcatagactttgggaaagatatttggactactcaagtctatcttttaaatacattcctcttacttcttaaccaggttttggaccatggagattgcccarcargccgagaatattccagccctccaacattgttgttaaaaagtccactgctgtatgttaggtgacttcccaaagctgctcactwcttcttmttattctgttttctcaaccccacaaaaatccaatcactgaaatcctgaactcttttgatagtggcatgagtgttaagtaaattgcacacctcttgtggaattcattttcacttaatcatgctaattatgtggagacttgtttgttgttgttctttgtttttttaagtaaatcaatacctaaatttcctggctaacagagtcattgcaaggatactagrgcattatatgtaatataagaatgcctatttggtaatttgtactttgaagtcaagtctcatttgaatcatttgtgatgtgaaaacaatgctgttgggtttatatacttaaacacctaattaytgttttacgtccagggttcctgtgggatcacatgcctttagttcagtctcagtatacctctccgccacaaagatgtagtctgggtgtgttctctagcctttggttctgtagcctttggtgtgttctctaaatctctcctctatagcattttcaaaaaccgttttgttagtgggtwtttgcttgtcmgtatcccactgtagaatgcaagcagtacaggcacagggtccatatccctctcattcacatttggggacttccagctacccatccctgtgcccagcagacaayagacattcagtagatattggccaacatactgtcataccccagaggacagaatgtatctttctcttggggtcctggctgtgatgtaagggagttcagagaacattttgcagagaaaataatgcttccgctggccattaaaaggttaaaagaattagccatgtaggcaaagtgggaaaagrggttctcaggagaggacatagactgttcaacagtagagaggtatgagaagacaaaaatatgcactgagaagtattgagcccatatttacactatggagtgaactatgacacctgagtagggagaaatatgtgtaatataatagatcacagacaaatggaaccccactgcagttaccttattagycacagtcccttagcctctggagcagcactgaccaataaaaacataaagtgaaccacaaatgtgagccacataaggaatgttaaattttctggtagttatattcaaaagtacagaggaacaggtaaaattaattataataatgcactttaacccaatacatcaaaaattaccatttcatgtctatacaacatacagaattattaattagatattttacaatcttttacagtcttyaaaatccagtgtgtcttttacatttatagcacatcttcatttggactagtcttattccagggctcaacagccacatgtggctaacaactaccmtatcaggtagtgcagctccagagaatgtaggaaatatttaataatatagtttaagaaaagtttcttaagaggaaaatctaaatcttgttaactctaaaagcttatgccgattattagtgttgaattatgctaggttataaagaccaccttcttgtgtttagacttttacgccaatttagagaatcagcaaagtttgcattttatgtactgtgtcttcattaacgatgctgtagttacaactacttctatctctattaactatggtggtggactgtaaatgtaaactgtctttatggcagaaataaaacrctatagatttggggttgactaagctttaaaaaaaattctctctacartatgaagctatctcttctatgcagttactgccaagcatcttcctagctgtagaagtccaggattttgctctctaattcttttatgcccagttacttgtagatgacaaaaaccaccctgacctttgtttgaggcagtcgcctacctgaagctgcagtaaggatttgctgcagctccctgagtaccaagaaaggtctaaagagctgacttgaagatgcttagacaccctctctgcmggttactgtgcagctttccctaatgagattggagcccttttggtttcattgggatttgagtgyggaagactggcaaatccagggcactcattttctacactaaaatgaatcttgaaaactgtatctttttaaaaaaagtctgagaatgattgtgtacaagtagccaaacctgtgcaaggaaaaggcagatactttaatgaaatgcatatgtggttgatgccgtctcattccttctcaaaacaagaaaatgtctagtatagttamagggttagaaaaaccaagaagtcccaacgaagcaaggaaaacctgtcagttttaataatgtgtcagtttgatatgtctaaatgattgagagtaaatatcacatgaaatctttccttttatgtagaaatggcgtatgcagctctcattaggcagtcctgtcrtaaatgcatatgaaagtttcctttaagggatttcacaaacataggaccatgttatgaatcaattcagtaaaaacatgatcctattatttttagagatatatttagatagacttcaactaaagaaaagtgaagaacacatctgtttttccaaataattcagggttctaaagggaagaaagatacaaagaaagcatgatgtatgcttactatttgtataattgtttggctctcaaaagaagacatagacactgacctatctgttttagattagtttaagaaacatgaaaatctcgtgtaatttttcttttcacaaagaatttgaacacacacacacacacacacacrcacacrattgcatgcaattcaatggtggaaagaatcatcttttcaacacatggtgctatgatatctacatgcagaagaatgaaattggactccttcacatcatatacaaaaatttactcaaaatgaaatgtagacctaaatgtaagaactaaactattaaactcttagaagaatatattgcagtaaatccttgtgacctctgttaggcaaaaccttcttagctatgacactgaaagcatgaataacaaaaaatagataaattgkactgaagtcaaatttaaaatcttgtgtgtttcaatggataccatcaagaaaatgaaaagataacccatagaataggagaaaatatttgcaaatcatatatcaggtaagggacccatatctagactatataaaaaactcttacaactcaataataaaaaggcaaatacccagtttttaaaatgagcaaagtgtctgmatagacatttctccgaagaagatgtacatcaagcacatgaaaagwtactccataggattagccattagggaagtgcaaatcaaaatcacagtgtgatgctacttcacactcaaggcaaatgactataatagaaaaaaaaaagatgaaaacaagtgttggtgagcatgtagagtcattggaacactcaattgttattccttattgatgcatagcaaatcgcttcaaaatttagtggcttaaaacaagaaacacttattatctcatagtttctgggggcaaagaatgcaggaacagcctagctggatggttctgacacaaggtctctcatgtggctgcagtcagggtgttggcagggcctgtggtcatgcgaggcttgcctaggtctggaggatcgaattgcaagaaggcaccctcacatggttgttgacaggaggcctcagatycctgccacatgggcctctcctcaggctgcttgagtatcctcatgatgtggcagctaacttccactagagcaagccgtccaagaaagggcgagagcgaagccacagtgtcctttctgacccggtctcctaattcacacatggttacttccattttattctattaattagaagtgagtccctaagttcattccacactcaaaatggaaagtcatcttgaagggaggagtagcaaataatttgtgaacagattttaaaaccaccacagcacgcaattcacatttttgcctgtggtctgcctctttggtttcctaaaccaacttgcatgtccttgtttccatacactgaacaggctcactgcctccctcragggaamaagacttaagcgtcttctggttactgcatcaaatctattgcttaagaattctgggtgatatgcagcactcccaggatgccccgatgaggccccttgaaggctggtaaacgggcgtgctttcagccayagcacatttacattttcaaccatgaagaaggaacaagatcattgcaataaatctgtccatttggaaaaggaagaatgaggaacacacattggtcaccgttccatagtaattatcaaaacctactaagcaggagtagccaggactcctttccttggcaatacaggaagttccttgattgaccaacctggtagcctctgattctttctcctgaatgttctccctcgtgccttgccctctgctgttcctggatctgcctttgaagtttcacatttgacagttttcctcaacaaatgtatctgagacagacacgggggaggttgtccttcttggagacctcttggattttgaaatatttcagcacagggattattttaaagttttaacaatgagattattgcaaaccaagttggggatttctttgggatgttaatttcttcagacacttagcaggcttgatttgtttccattccattccatgtacargttaccatagccaaaagtcttgcccagacatggttttcaaggctgcagattctcagtttttatttactgggctctgtactctgcccatccctctggcccttaaattaatggtgtctaccttgagatcatctgaaataatagctttaggtggggaggcaatacaatttatcacctcttgctaacaatatcactgctgcattatgacaaagcacaagtcttacctcctgctaagccagcagttacatggccacagcttaaaacttcttcaatttcaagtacagagtagatgactttttcaacactgcaaggcccatatcactggactcttcatcagttgttagcaagtatcggcagagaatgtctcccttagaaaatctttgcttccttccacctctgttttcagaatgtttgattctagtctgagttcacctaactcaaaagactttactgaaaatagcaaaactataccaccacctacaaacactatgaatttatcttttatttcccttaacattatggcctcagtcagcaaaaagtctgcttttcaaggtaagcagttggcagcttaaccaaatagtttgctaccacattaaaaacagagccctatcacacactgcccaaatctttctgctaaatcagtggtacttgtaccatgcagcataccattactggtacctactggccatggttcctggttacagaaacaaaatttactcttgctagtttaggcagaatgtgtgtgtgtgtgtgtgtgtgtktttttatataacaaaataattaacaacatttcttctaggacccagaaaccaggcttggataatacatgagagaaacttccagttgcacaaagggactgccgtgtggaaattccactcacctaccatctgcyacatggaaccaataaggatacagactaaatactagaaccttcattagaactctacagaataaccatacacttcaaccaaccactttatttgccaagcagccctatagattctgccttacaatgttcatatccggcttccatgtcttatgtaggtgcattttgttggtggagaycaggtcacatgtgaaaccttagcttcatctgagtctgagaaatgccacattcagccttccagtaacctggaaaatatactaggaagagattagagtagtatttagtgtgtgtcattctacagtatctggcacagtggccaaaggtttatttttgagttttcattatattttaactgacatactaaaatttgaggaaagtcatgatgaaatatatagtaaaattaataaatagcatgaattacattgacttactatgtttccttttctctgtaggattcttcttggtttgagcgtttgtattagtcagttttgggtcgctataacagaatacctgaggctgggtaatttataaagaaaaggtgtttatttagctcacaattctgtaggctgggaagtttaagggcatggccctggcttacggagagggctttcatgctgcattataacatggcagaggtcaaaggaaaagcaaaaacgtgtgaagagacaaaacccgaggagcttctcacctttataacaaagcactctcttggggac

SEQ ID NO: 9954 - DNA, 19072 bp, Homo sapiens
ggcagttacatgaaaagacctcctgggaggggcagaaacatttggacagatgcatgggtggagacacaaatgggctagggggtacccacttctgtccctggccttgggaacctctgcccttcccagtggctccagactccccttacttgctttctcatatagtctgggttctacttctctgccctctccctccccatgctggcctcataccagtgacttccactgaggtccctgtgatgtatccactatcttcagatgccaagaatgcgaccacatctgccacatctatgagaatggtggggagagggcagaattctgctcactcccatagacccaaaacagccataatctcccaccaaagacatccctccccacaaacctctccacagacaccaaccaccagtcccctagaaaatccccaaactttggggatctcttyattcaggcccccttcccagggaccccactacattcagtgctcaccctcagggtcccccaagtgtcccatcgggatcatttcagtaatctgtaaggaaatactcatgtgggtgaaagcttcttttatggatttttttgaagactgagtctgtgaccyttttttgtcttcatttctcatacattcattgaatatttaatgtttgccaggaactgtgcccagtattctctctctctctctctctctctctctgtgaagcccagagagattgagtctctgaatgattctgccctccacccacagcctcctaccttgtccaccactttctgtggcactttctgtgtcatgggtgttgcaatgaaccctgggaggacagagttacagcggatcccaygtctgtgggaaggagagtggctgccgattctggagagggctgaatgctggtacctccctcagaccccccaggtgctccccagcaccctcaagcatctgaccaaccgtccaagctcccgggctgcggtctgggtcagcccaatcactccagccttggatgctgcatagtttgtctgccccacgttccccacctataggtgagtcagagatgtggaatgagtcaggagtctyaaggaggggttctcctctctataccacttggctggctgacctcgtccaactcaacctgacctttcctacgatgctactgatgttgatgatggaaccacgacaaccattggacaccagggcttgtgctgcagcctgagtgactaggaaggtgccctggcgggaaagggtaacaagggagaaaagatcagctggggtgacagccctcctccaactccctccccaggctaagggggccaaacgtcgcaggttcagagatcgccaccttgaggttgacagctatgactttgtcccagtcatcctcagacatgtgcagcagaaactcatcctgggtgatgcccgcacaggacacaacgacagatggtgggcgagaaaagcaggcctatgggagggggaggttacgcatcaaaaaccccccacaaaaagccggggcagtggaggcaatatyagagctttagagggggaaagtggcctrgcgttcacctgcacttgttccagcaggcacctggcggccctggcctcagacacgtcagcctggaaggcagcatggttccctcggggcggcccctccttgctccctggcccgcccagcagccgcaccgtctcctgtgccgctgcccggtccaggtcgcaggcagctacggtggccccctctccggccaggcgtacactgaccgctcggccgatgccgctccccgcacctgaggtaggacagaacacgccggaccgggcacggggaggagagggcagggatcagaggtcacagggcagaaagtaaaatgtgggtaaggggccagaggtcacagcggccgcgcactccaagggcacgcccctgacctcactccaataccccaaaccgcccggggaaagaaccccctcaacctgtgaccaaggccagtgcggagcggagtcggttctggagctgagacgccatggcgggctgtgggtgggtgggaatcccagcactaagccaatcccagcgcagaggggcgtggcaagggcaaagccggggccaatcaaaggcccgccagccttaggccatctgcggccaccagcgcaggccgacctcccacmgagggggcgtggcccgacactgctgcttaggggccccgggtgtggagaagacaaggggccccattccccccaaaaagacaaagactgcatgtggggcggaagatcggaggtctttatttccggttaccacccctccccctcgattcaaacacagtgatataaaaggaatagaaacaaaaaaaatcaggccatgagaataccaaytaaccctctcccaccccatccccccaatcactcccaaatcaggacacacgattgatgtttgatgtttatccccgactcctcctgttaccctctctgtccaggactctggtcttccctgaagcctccaccaactggtgggagaaaggaaactggaccttggagaacttcctgtgtagcaacttggttctccgagaacaggtggggtaggggacaccaggtaggctgccatcaccccctgtcccttccagccttcttcatggccccatttagccttccaaatgcaacatggtcagacagtgcccaacactatggtccctctggcctctcattctcaccgctccagcctctgtaagactgccagcccttgaaggccctaatgccaaagtaaccattctcccaggctacagttccttcctttggcagatgtccctggccagggcccccaacctctacgcacccctgacctggagttaggggtagaggtttggggcaggggtagtttatccacccctcactcaaggtgggcaatcagcaccatcatgataactccccccagcagccccagcacctccagaagtgattgcaatggtgatgcctccctcagcagctcgggcaacacagacactgttgctacgtagataaagccacctgcagtaaatggcaggacccagccaggacctgcaccacctgcaatttcactgyccactgctcctccttcagtgagaagggcacaggctgtgcctgccagtgcccctactgctgtcagtagttgcagacgcatcgcctgatgggcagaaaagagaaaaargcactcaccaatagctaaagattatcagtggtttagaagtggctggtggggtataggtataggggacatggatttggaaactaaacatcaaaataaaaagagaagagggagcagtctagaatagacaatttctgaaaaatcttaagagatcagaggtcctttccacagactttctgattgagtaggcgtgtgtgtgtaagactccactaaaccattcagatggtttatagaccagtttaagaaatactgagctaaaggacaaagtaaccagaacttcttccccctcatttctagaggacttgtcaatgacagtatgaattgtttggaactaataagaggctgtttgggtttagggtgagtgaggagarataaagggtttgaggcagctgtgtttggcagacatcaccaacctgctttttgctgcagccagactggaccaagatggcaaagtcyccgacctcgtggggcacttcatgtagcaggacagtcattgtggtcaggatccctagtccccggccccctcgaaaggaagccccaatggccagaccatcagtgaagttgtgtgccaagtcagcagccagattcaggtaccccracacacgcaggtcttgtacaggacaagaagagaaaatgatcagaggcttccatcaccacttgttccagtcttggtcagytattctcacacctcccctcagagaccactttacacccagtcctttagtgtttctcagatacctgccattacccacagcacatattccatgtgrtttgtgatgatgtcccttgcccaaatttatcaccaactctggcccttacctaagcctcttttttcttcttcagcgttctgaggtctcactggcccatctttgggtactgtgctccctcctcgcctcttctgaacccctcttgtttcctttycttcttcctctgagctctgcttctccttggtagaacgctctgagggaagaaaagagttggtcagagtggagaacagatcttccaayatgtcctctccctcctgagggccataagatgaggagattctgaggcaggcaagtcagctttcaggaaagttgttcctgggctcaccttgtcttccrtgtccatgacttccacgtgtatgactgtgagcgtgtccatgtccatgactgtgaccatgtcctcctttcacatgtctcacaaatttctccacgacaagaaaggcaacaattccactgagaacccacagkcccacagacagaatggggccctggcctgggaatggaggcattgagacwttaagggagatgtgcattccagactcctcctcctcaagtgcgggaggtgaggaatagggagagacggaccttccccagcaccccaactcccatccccatctgtctcttcctcaccactgtgsgagtgtccatgtccgggttgctccagagtgtggtgagaatgaggttctggaagaakgggggaaaaccagatgagggaatatctgacacaatgagtgtgtatttgggggaatatcgaaaggtcagggatcataaaggagaaagaacccttttcctccaaagaacgaaataggttagatttgaggtagaagtcagaggttacttaccaagagcatgaggaatgaggtgcaggaaagcatctcccaggagcccaccggaagcaaaactgagcaagatctgaagtagagagcgatgccggggagagttcgactccacggggataaggaagaggacaaaaaatggagctgctgagatcagcactgtggcccccagtgcctggtgagggagagtcaaggtcaagtactgtggagtttcccaacaatccagaaccagcccttctctctcccatcccctggagactcacataagcccagagagtgacagcatccaggtcctgcttgatgcstggagccccagactccccatagcctccatggctatgctcatggtcatgtccatgtcctctgtggtagaggctctcatgggagtagccatggctatggccatggtgtaaatyctcatgtgaatgtccatggtcgtgatcgtgggtatgtccatgccagatgctctcgtgagtgtggccatgrccatgggcatggctgtgdccatggtggaaatcttcatgtgagtgcctgtggctgtggccatggaagtcctcttgcagatcgtcgtgcaggtcgtcatgacccccgagtccagccaccagaagccccaaggtcgcccaggtcagcagtcccacggccacccagtgggggscccccaggcctctggccatcacgctgaccagagggacagaggcagtgactccacttgactcaactctatacctacacagggtccgctttactccaatcgcgccctccgtccacctctatgggccgctctcccattcccttaagttcccacctacattgttcccaagactagttctctttatcccgaaccacctcccggatgtagggccctgggacactaatctttcaccagccactttacagactctctgggccctcgtctctacgactcattaggtgaggaaaaggcctggaaaggatggtagagaaaaaacagagaattctcaccggctccgggatcctctcctttcccggtttgcttggacgtggcagtccsgcctttagatcccgcgagaacaggaagttccgttccaccttcgccctaatgcctttaccaatatggcggcactccggtagcgrcgaatccatcctgcactgacacgcatgcgcgagtgtggaggtgatttgaggggagggtgggcgaggcgggctaacaggccggaggagaccgcctcctcggtttccaactagacgagggggcgggaactcgcgccgagacttcccgtctgtacaaagatggctgccacattggcgctgtcattttggtactgagcagagcgacgggcttaattcgacccaatccaggccagagtctttctctcaggggcttcctcgtgctcagctaatcctccgatcaatccttgggaatccctgggacctcttcggtatccctactctcagccagggatcatgtcttgggccgctcgcccgcccttcctccctcagcggcatgccgcagggcagtgtgggccggtgggggtgcgaaaagaaatgcattgtggggtcgcgtcccggtggcggcggcgacggccctggctggatcccgcagcggcggcggcggcggcggtggcaggcggagaacaacaaaccccggagccggagccaggggaggctggacgggacgggatgggcgacagcgggcggggtgagtgccccagcagaagggcaggcgagccakkgaccgctttatctgcgacccctcccccacaccctcccccggtgctcttttccttgcgctcccgcccccttgtttgtaaacacgcgtcccctccctcccgagggccttagcaccctcccccccggggcggggcggggaaggggarcttccgccctcctagctgtgaccgcttgaggccttgggcaccggaggtcgcgggcctgggaagggcacgattcctcttaaacctcaggactttgggcgtttacaggcagatcctgcgtcttaggaggggtctctcctgcctgtctctttcccttgcacgctctggctacctggctttacgctgggaatagaggggctcgatggtctaccccacgtgctgccccacccacgagacaggtgtggctttgggatgacctggtattcrttcaaatggattggttggaaaattttcctcacctgaactatcctcctctccttgtcaactccctcctctcaccacaatgaggagttacgctgtttttgggtttttttagccagtcaaatatagcagtgggaggttgtataccaattttagtgacacaaatgttaataagttytgataacccactaccatcggaccagccggagttacactgttgtttgacagcagggtgyctctgaacttggggatgggtggagtgggctgggtccggcacggtggggtattagagaattaaagtctctagttggatgtttgaagactcattttctttttttgtctcttctgtctcttgtgtgtctgtgtgcctgtacatacccctccctcagactcccgaagcccagacagctcctccccaaatccccttccccagggagtccctcccccttctcctcctgggccacccctacccccttcaacagctccatcccttggaggctctggggccccacccccacccccgatgccaccacccccactgggctctccctttccagtcatcagttcttccatggggtcccctggtctgccccctccagctcccccaggattctccgggcctgtcagcagcccccaggtgagaggttgtgaccaacttactgcctggccactttcattttcttgttttcctkgtaaccccagatccttgtgtgaacttccccatggcccattgaccttccaatcctctaaccttgtcaggcctgtggtctttatgagaccccttgcctttcctgaggtgactgatctttcagtgcatgcttcctcccctaaaagaactctaatattctttgtttttgtgtgtgtgtgtgtgtttttttttttttttttttttgagatggagtcttgctctgttgcccaggctggagtgcagtggcacaatctcagctcactgcaacctctgcctcctgggttcaagcaattctcctgcctcagcctcctgagtagctgggattacaggtgcctaccaccacgcccrgctaattctgatattcttgatgtccttttcatctatctgattttctgcccttttgatcccatctgctttcccaagacacctgcccttcagggtcactgtgttgcacaatttcagggggggcctgtttattcactttggggttgtgctccagggatggcctttcacatagactgcagtgtaaatgacagcctctggaatgtgcattgmmgggccttgcttagtggtagggaatgatttccatcacttctgtgacattctgcttcccaataagtcttcctgtgacttccctatttcccccatcccagattaactcaacagtgtcactccctgggggtgggtctggcccccctgaagatgtgaagccaccagtcttaggggtccggggcctgcactgtccaccccctccaggtggccctggggctggcaaacggctatgtgcaatctgyggggacagaagctcaggtatgtggctcagaggatgaacagakagggagagtctgggccatgtatcaycacctgtgggattcccagggcttatggagtttggtcagascaaktgacctgggggaggcctgatgggagtaaagaagctgaagctgaratgtaggacgcsattggggggaaggtcagagggaaaaggaagcagcgtgtagggtttctgaacagtgaggagactgggactggwtcatcactcagctcctggttccctatctctgtatttggcaaacagggaggactttaadttttgctagggggagattggaaasagactaaatggtgaaggtgtctccatgcaaccttcttattgctcctcccctttccctgtaggcaaacactacggggtttacagctgtgagggttgcaagggcttcttcaaacgcaccatccgcaaagaccttacatactcttgccgggacaacaaagactgcacagtggacaagcgccagcggaaccgctgtcagtactgccgctatcagaagtgcctggccactggcatgaagagggagggtaaggacccgccctgcccasgcgtcttagaccacrtgcccttctcccttatcccactcrgactgtgtacctctctggaagggtggactgctctctctcctctaragggcgatatttgatttctctctcccttcgcagctctcctccctgttaccctgttctggcccttgagtttccttcttaatggttaggcctctgtggcctgcacatatgacccctccctagactgatcctaggataggataacttttccttagccatgatgggctgtctccccatttctaacctgagtggttcctcctctgattccatggaccttctctggtctctgtctcctgttatctgtgatctttcctctaactcctgggactgggcactcttaagcttacagactttactgaagacctcagggcttcccttccttcttctgtgtctccatcttatcttcttaagtcagattcctaggattctgararacactttaragcatatcttggtcaaaacacccactttagagaagatgagcctgaggcttggctttcccaaggtcatgcaacaaaggaktggcaggcaggtttgggatcaraacccacatcttcaaagacctaggccagtgctcctttcactgcctatttgttgagtcagaagagcacaagatttgcactcagacacacttagagtcagttgtatgacctgccatgtattatatgaatttaagcaaactaatctctttgaaccccgagttcttcatcttaaaaatgagaataaatgcttccagcatcattatgataattgagtgaatgktaaaatgtgcttagcatgtttcttggcatattttattwaaaaaaattttttttttcaatcagctttctcaggttgaatcttggcatgttttttttaaccatgtagtaggctctccatttaaattcctccctaattcttttacctacctcacccttcccgactgacttacctgcccttttataacccttccttcagggctgcccccagtccaccctttctagtgacttccccaattcctataaatatctcccaagggccatgagatcctgatgaggccgtaaggatatttgtggaaccccttcatggctggctgctgactttccatyttttctctcccccttccccctgcagcggtacaggaggagcgtcagcggggaaaggacaaggatggggatggggagggggctgggggagcccccgaggagatgcctgtggacaggatcctggaggcagagcttgctgtggaacagaagagtgaccagggcgttgagggtcctgggggaaccgggggtagcggcagcagcgtgagtgttggggtcaatccactctccttcgtgatgggggttgggggaggcagtctaggtctgttmwacatcccctccccctcctttcccctcataaccttcctaacactacttgggactggaggtgctgccaaacaaggtctttcaaacatctgaggtggatgtgatagctccttctgtctccactccccaaacaacccactggcagaaccataggcatgtcccaaataaataattgtttgcactaatgccagaagagaagactcacttacagggattggtttggatggggctcacaggaagactatatgtaaggagggggtgtcaaaagcctcttacaagggggctcccagcatatctcaaaatcttccataactcttaccccygtcccctgcagccaaatgaccctgtgactaacatctgtcaggcagctgacaaacagctattcacgcttgttgagtgggcgaagaggatcccacacttttcctccttgcctctggatgatcaggtcatattgctgcgggcaggtcagtgaccttggatccctttgacttcttgacatttgacccctctttgacttcccgatctttagtgaccccagtggccttaccttgcgtacccagggagccaaacttgctgacctcgccacctcttttctccttctcttccactgatgtgctttgaatcccttggcctgatttctggctcctgacccttgctgccccacccaggctggaatgaactcctcattgcctccttytcacaccgatccattgatgttcgagatggcatcctccttgccacaggtcttcacgtgcaccgcaactcagcccattcagcaggagtaggagccatctttgatcggtcagtggccctcggctaggctggcatgtagatagagggggtggggctataggctggtccgtgtccaaggctggctgagctgtgacctttgagtgacctgcasgtccctctccagggtgctgacagagctagtgtccaaaatgcgtgacatgaggatggacaagacagagcttggctgcctgagggcaatcattctgtttaatccaggtaagaggaggattacctttgtctctcaaggccaaggcaaccttggagcctcctcttctccgagactcctaagttacccagctatccccctcagtaagaccctcaacctggaaatctcccaactggccgaggaaaaacccacatccacggatccatcccacaaacccartgggccctgcttcccttgccaggcctctggtaaagggcaagcaagtgcagcccaaaaggggcatcctgtggctcacatctgcatggccatcctgatttggtttgtcttcatttctcttcctcctctcttccctgccatcccagatgccaagggcctctccaaccctagtgaggtggaggtcctgcgggagaaagtgtatgcatcactkgagacctactgcaaacagaagtaccctgagcagcagggacggtgagatggggctggggggcactgaggctcccttgggggtggggagtgctatgaggatgtgttcagggcccgtgtgcttccagctctcaatccccttctcccacctccaccccaggtttgccaagctgctgctacgtcttcctgccctccggtccattggccttaagtgtctagagcatctgtttttcttcaagctcattggtgacacccccatcgacaccttcytcatggagatgcttgaggctccccatcaactggcctgagctcagacccagacgtggtgcttctcacactggaggagcacacatccaagagggactccaagccctggggcagggtggggggccatgttcccagaaccttgatggggtgagaagtacagggcagaaccaagaacataaaccctccaagggatctgcttgatatcccaagttggaagggaccccagatacctgtgaggactggttgtctctcttcggtgsccttgagtctcwgaatttgtcgggktctcccatgatttggggtgatttctcaccctctgtccttcccccagcacaaagcactggccttgcctccaggaccttgcttccttctcatcttgcctcattttgcttcccatctgaagagtggaaatggggawctcccccagaggtggatactggggggcaggcctcccaagctgatggacatgagagtagggccctgacaggccttcctcctctcaaacctggcagatgggggcctctctggaagagggaggggccctgtcactgtccaraktctctttttacacttcacctccttctgcagtcagactgaaatataaaaaaggtggtggtggtggtgaaggggctggtggagatgtaggaaccgatctgctatttttaatttcctgtgaggatagagacttgcagttagactcaaagaagtactgtactttcccaggttgactaagaaatgccagtggtggaggtgggtgtttgggaaaggcagggccctgaaatggcctgtccctagggctctccaagcactagccttcccagcttcccgccgcccccccyatctcttcctgtctaacttggggaaggggcctgggctgtgaggacagggcccccacaggggatggtttcacgagtgtagtcccggaggccttccctttacagctctcctccagccctgggcacatagcataggctggggacacaggatcctggcctgagaattgaggggaggtggccagcccgcagargtggggtgctggggctgcatgatttttgccctgcgtcccttctctttggggctcctttcccctctcatacataaaatcgctttcaaattaaaatcgctgttttctggactgaggtgactgtatgrggatgggcagcgccgtttcgggcttggrgggggtatccggttgggagctccggacgcgatccctggacgccgccgccgaggttccrtggggcccaagaggtgcacgcagggtgggggacacaaggcaagctttgtcggggagggggggagagggtgtgccaggctgggggcggggccggccggaggaggaagggggggcggtggattctcaaaggcgccttgttcgctcgtgccctctccgcgccagcgggcggcggcgcctcggctcgctgcggccttccctccgggcgcgctgcgggctccgggcagacccggcgccgtgcccgctcgtgggggcgcactgggcgccgagcgctgcgtgcttctcaggcgttgcccgcccggaggcggcccacgtccccgagtgaccccatttccctggacccttccaaccagagtcgamtgctcgctcatcttaccactgctccccctctacctcggctctgggactccctaaccgcgtcccccatttgcatctccttggacctgactatcctgtgtttgtcggtgggtcccagtctctggcctcttgctctccgtagaacaccttcccccacatcccccgccccagttcgtcgctatctatagccttgtctataaatacccccgccccggcccggctctgtaattacacggggcggggtgagggaagtaattatggagacctgattatgggtggggtggggactgcgacccccaggcccgcctctccccctcccactgtgccctaaatcccgcccaggcctctgctgaaagggggctctgggcccccaagagggagggaatgggagggagtgtgtgtgactggacgtttgggtcctagaaaaggaaggggctagggaagatattggggttcccgmaaagagwatcttagggtacaggcmgttgagacytacaaggggcaggagagagcgagcgatagagggagggttcccgcctccctccccaggtggagactgagggtggggtttcccttcggtggctgtgggcgggcggctggaggcgggggccgggccgggggcgggggcgaggtgggggctctgggcgccagggtggccggggacacacagaagcggcagccaccgaggagrragcagtgccgggmgccccgacggcgmcttgctgcatggagctgggccgctgacagctgtcgctgcccgcagcctmtgacctccctgggaccccggcgtctgaggctcatagtctgctccctgtcttctgtcagcctcagggcatccagcgtctcaggccgacctgggtccctgggacccggcgtttcggcttctcagccatggagcggtgcagccgctgccatcgcctcctcctcctcctacctctggtgctggggctgagcgcggccccaggctgggcaggtaagaggagtcctgatgcctgggtcctcggagtcaggctggagctctgagtgtctctgggaaggggccagctgatgcctggggcagcagcttctgagtctaacaaggagatttggggcttcaaggctacaggctggagggcaggacacctgtgttccttggcatcagggtaggaatctctttgtccttgaagtgactgggggagggcagatagggctgaaaggtggaggaccactttagagaccctgaatggggatggatgcttgtcttgrgtccttgggaagagctgaagatggccagggccagcccggtccagtcattgctggtgtggggatggtagacgccaatgttgatgggtgaggcgtgtgtgtcttatggcctttctgtcgatatctctgggataaggggtgagcacctgtgattcagagcagagcccagtaagcccagaaagaaaggaagccttgactacctgtctcattggcctcctggacagggtccccctccccctccctgtgccctcratgctgccacgmagctggctctggggagcactggggctggctgccaacaggacggccctccggacaggccaggatcaggtgtctgaggccagagccaactctttgcattcctgcctagcccctcctccctctggccagccaggctcccctgggaccctggtgcccacaaccctgatcttttccttctttttcccaggacccagaattcctggcttctaggaaaggggatttgatgtcaaggagggggctgtgagcaccaggtcctcagcaggctggaaaaagcccatttctggagacactgagggctgatttatatttaacttgactattcaattcttctctgctttagagagaaaatggtcagaatggcagcacaaaagatttagattagattacagaaggaagaacttccaagatgtgaggacagtgaagcccagggccaggaaattgaggcgtatggtgcctgtagactctaggagtctttcttagggggaagagggatcctctggcatggagrcagggggatggctaagatgactgtttcttatttcaggggctgagtgggtagagatgggactttagggaaatgagttactgtagaattcctaaggttagagaataaggcatttggggggccagaggtagagtggtggagggtaatggggctaccagtggagagcctgtggggcagatgaggctggatacaggggggcaagtatgtggcctggtgtgggaagatggtgggcggacctgtgggtaggttgtccatatgatcgaattgtactcccttgggatttggtggagggtggggacctccgaggtctccttggcctggggtctctgtgagtctctgtgtctctgtctcactcacccttcgtctctcaaagcggcccttgtgtgttggtgtttgcggagctgccacacgmgcaggggccaggcttaggtgggggttgggggggaaggccgtggtttcccggctcctggactcaaagggccttttctctgcctgcccgccccacctcacccaccccacccagctccactctcctgattgctctggcctctgccctgccccacacttctatgaaagttttgctggaactctctttgggatttttccaatctggagctgatggtgtgaagagtatgtgtataggggagcaagtgagggcaaggtgatcttttgttttccagggagtttgagccctaggaagctgagttctagktagacagggctggtgggctggatcttgaatctttgggtcccaggtggtggggttggtgggggtggtgagacaggattgaggttccaggtgtggggagcttgcctgggttctgggcaagcactctgatgggatccacagatgtgtggctcagggccctggacctgttccggmtcctcgtggcagcttcagcccctgccccccattcctccacccctccccaactcatctcctaaaccaggaggcacagactcctgggagagctttcttgtatctttttcctcagcatgctcagggttgttcccaccccatcccccaaacctgggatctgtagctgcttgaagcccctctcatagagctgcttctctgatctcttcctcgtggcccccctgcacctcctgtgtccaggatgatcgattgcccagatgttgtttgtgctggagacgggacagatgccagagacccagagagtgagagatatggaaagagagtgagagcgagggagagaaaaagatggacagaatgtgagagaaatggaggaagacagaagagacagagacagaaagaccaacataaagagacagagagagtaagagagtgagagagacaggagacagatgaagagttgagagaagtattcagagagtacagagagagacagattcataagctaaaagacaaagagagagcgtaagagaggcagatgctaggagagacaggggcaggagtgtcatggggttgaatgccagctgatgctgccctgcctccaggtacctttgcatttcccatccattcaggtactgttcagaagcaagtgagggtgaggtgacctttcccttgcagggagtttgagccctggaaagctgagttctagatcccaaatgtcccctatttatgccctcctgagggcatgtcccttctcctgataatcatggactctcccaggtgcaccccctgtggatgtgctccgggccctgaggttcccctccctccctgatggtgtccggagagcgaaaggcatctgtccagctgatgtggcctaccgagtggcacgacctgcccagctcagtgcacccactcgccagcttttccmaggtatgggtgacatggtggggtaggcctggggggaggtaatgggatggggcctaggatcagacaccaggaggaaaggggttgtggcggctccctttgcctctcactctgtgtgtatctctctcggttactaggaggatttcccaaagatttctctctgctgactgttgtccggacccgccctggtctccaagctcccctcctgactctctacagtgcccagggtgtccgacagctgggcctggagctgggccgacctgtccgcttcctgtatgaagaccagacwgggcggcctcaacctccctctcagccagtcttccgaggcctcagcctagcagatggcaagtaagtttgtttgctcctctggtctgcctggcccacactttcaggaggaagtgcccccaaacccctacactctaaactgtgaaacccttgagaccctttgggccacaccacacctacccactgcccaaacttcagtcacttctagtccagagtttgggctttagagtgtacagccttctctgcatgttgaactagcctgtaccttgggcaagttacttaaaatttttgagcctcagtttctacatctgtaaaatagacattaaatagaattggcacaaataagaaagtgacggcatggtgtctggtgcactgtaaacactcaataaatggtagccattgttattactgctcttatcaccattggcttcaactcttatcactgctctccaaccatgttgactcccctacttcagtcagccaagagttcacttgaacctcttccaccatttccaggtggcaccgtgtggctgtggctgtgaagggccagtctgtcaccctcattgttgactgcaagaagcgagtcacccggcctctccccygaagtgctcgtccagtattggacacccatggagtgatcatctttggtgcccgtattctggatgaagaagtctttgaggtaaccagagcaatcagaggcaggattgacttctggtcccctatcttgtgcccactacccttctggccccagcatgtcatcttcctattccctaggccttcatttttttttcttatgaattttcatttctattttctatcttcagggctactgttctctgcaggagaactagatgcctacctatatggcaggactgtccacagccacttactctgtccttcagtcttcatcagttccctcatccatccatcctttcaacccctctctctcctcacccacccatcaattcactcactcctcagccaacctatgcacacatccaccacccactcccccatctatttactcatctatgcatcacacgcccacctagtcatgcatgaaggcttatatccacccacctgtcaatcctccccctgcttaaccactctccccttcaaaccacccatctatgcttccacccatctatcctcttcaactcctccatccagctattcactcacccacccaccctccccatctacccatgcacacaargatgcatgcatccattcagccaccatctatccattatccttccaccaactcaaccactccctccttcaatatactcactcacccatctcctgacccacttacttcccatccgaccagtcattcacccacataagttcacccatctacctattcacccatttgcttccatctactctgtaacccctgttcatctgcccaccagtccaccctcccatacgtacatttattcattcacta

SEQ ID NO: 9955 - DNA, 15611 bp, Homo sapiens
aaacctggggtggaggtgggagaaggggattgagagctggaagcacacgggccctgaacacatcctcatagcactccccacccccaagggagcctcagtgccccccagccccatctcaccgtccctgctgctcagggtacttctgtttgcagtaggtctcmagtgatgcatacactttctcccgcaggacctccacctcactagggttggagaggcccttggcatctgggatggcagggaagagaggaggaagagaaatgaagacaaaccaaatcaggatggccatgcagatgtgagccacaggatgccccttttgggctgcacttgcttgccctttaccagaggcctggcaagggaagcagggcccaytgggtttgtgggatggatccgtggatgtgggtttttcctcggccagttgggagatttccaggttgagggtcttactgagggggatagctgggtaacttaggagtctcggagaagaggaggctccaaggttgccttggccttgagagacaaaggtaatcctcctcttacctggattaaacagaatgattgccctcaggcagccaagctctgtcttgtccatcctcatgtcacgcattttggacactagctctgtcagcaccctggagagggacstgcaggtcactcaaaggtcacagctcagccagccttggacacggaccagcctatagccccaccccctctatctacatgccagcctagccgagggccactgaccgatcaaagatggctcctactcctgctgaatgggctgagttgcggtgcacgtgaagacctgtggcaaggaggatgccatctcgaacatcaatggatcggtgtgaraaggaggcaatgaggagttcattccagcctgggtggggcagcaagggtcaggagccagaaatcaggccaagggattcaaagcacatcagtggaagagaaggagaaaagaggtggcgaggtcagcaagtttggctccctgggtacgcaaggtaaggccactggggtcactaaagatcgggaagtcaaagaggggtcaaatgtcaagaagtcaaagggatccaaggtcactgacctgcccgcagcaatatgacctgatcatccagaggcaaggaggaaaagtgtgggatcctcttcgcccactcaacaagcgtgaatagctgtttgtcagctgcctgacagatgttagtcacagggtcatttggctgcaggggacrggggtaagagttatggaagattttgagatatgctgggagcccccttgtaagaggcttttgacaccccctccttacatatagtcttcctgtgagccccatccaaaccaatccctgtaagtgagtcttctcttctggcattagtgcaaacaattatttatttgggacatgcctatggttctgccagtgggttgtttggggagtggagacagaaggagctatcacatccacctcagatgtttgaaagaccttgtttggcagcacctccagtcccaagtagtgttaggaaggttatgaggggaaaggagggggaggggatgtwkaacagacctagactgcctcccccaacccccatcacgaaggagagtggattgaccccaacactcacgctgctgccgctacccccggttcccccaggaccctcaacgccctggtcactcttctgttccacagcaagctctgcctccaggatcctgtccacaggcatctcctcgggggctcccccagccccctccccatccccatccttgtcctttccccgctgacgctcctcctgtaccgctgcagggggaagggggagagaaaaratggaaagtcagcagccagccatgaaggggttccacaaatatccttacggcctcatcaggatctcatggcccttgggagatatttataggaattggggaagtcactagaaagggtggactgggggcagccctgaaggaagggttataaaagggcaggtaagtcagtcgggaagggtgaggtaggtaaaagaattagggaggaatttaaatggagagcctactacatggttaaaaaaaacatgccaagattcaacctgagaaagctgattgaaaaaaaaaatttttttwaataaaatatgccaagaaacatgctaagcacattttamcattcactcaattatcataatgatgctggaagcatttattctcatttttaagatgaagaactcggggttcaaagagattagtttgcttaaattcatataatacatggcaggtcatacaactgactctaagtgtgtctgagtgcaaatcttgtgctcttctgactcaacaaataggcagtgaaaggagcactggcctaggtctttgaagatgtgggttytgatcccaaacctgcctgccamtcctttgttgcatgaccttgggaaagccaagcctcaggctcatcttctctaaagtgggtgttttgaccaagatatgctytaaagtgtytytcagaatcctaggaatctgacttaagaagataagatggagacacagaagaaggaagggaagccctgaggtcttcagtaaagtctgtaagcttaagagtgcccagtcccaggagttagaggaaagatcacagataacaggagacagagaccagagaaggtccatggaatcagaggaggaaccactcaggttagaaatggggagacagcccatcatggctaaggaaaagttatcctatcctaggatcagtctagggaggggtcatatgtgcaggccacagaggcctaaccattaagaaggaaactcaagggccagaacagggtaacagggaggagagctgcgaagggagagagaaatcaaatatcgccctytagaggagagagagcagtccacccttccagagaggtacacagtcygagtgggataagggagaagggcaygtggtctaagacgcstgggcagggcgggtccttaccctccctcttcatgccagtggccaggcacttctgatagcggcagtactgacagcggttccgctggcgcttgtccactgtgcagtctttgttgtcccggcaagagtatgtaaggtctttgcggatggtgcgtttgaagaagcccttgcaaccctcacagctgtaaaccccgtagtgtttgcctacagggaaaggggaggagcaataagaaggttgcatggagacaccttcaccatttagtctstttccaatctccccctagcaaaahttaaagtcctccctgtttgccaaatacagagatagggaaccaggagctgagtgatgawccagtcccagtctcctcactgttcagaaaccctacacgctgcttccttttccctctgaccttccccccaatsgcgtcctacatytcagcttcagcttctttactcccatcaggcctcccccaggtcamttgstctgaccaaactccataagccctgggaatcccacaggtgrtgatacatggcccagactctccctmtctgttcatcctctgagccacatacctgagcttctgtccccrcagattgcacatagccgtttgccagccccagggccacctggagggggtggacagtgcaggccccggacccctaagactggtggcttcacatcttcaggggggccagacccacccccagggagtgacactgttgagttaatctgggatgggggaaatagggaagtcacaggaagacttattgggaagcagaatgtcacagaagtgatggaaatcattccctaccactaagcaaggccckkcaatgcacattccagaggctgtcatttacactgcagtctatgtgaaaggccatccctggagcacaaccccaaagtgaataaacaggccccccctgaaattgtgcaacacagtgaccctgaagggcaggtgtcttgggaaagcagatgggatcaaaagggcagaaaatcagatagatgaaaaggacatcaagaatatcagaattagcygggcgtggtggtaggcacctgtaatcccagctactcaggaggctgaggcaggagaattgcttgaacccaggaggcagaggttgcagtgagctgagattgtgccactgcactccagcctgggcaacagagcaagactccatctcaaaaaaaaaaaaaaaaaaaaacacacacacacacacaaaaacaaagaatattagagttcttttaggggaggaagcatgcactgaaagatcagtcacctcaggaaaggcaaggggtctcataaagaccacaggcctgacaaggttagaggattggaaggtcaatgggccatggggaagttcacacaaggatctggggttacmaggaaaacaagaaaatgaaagtggccaggcagtaagttggtcacaacctctcacctgggggctgctgacaggcccggagaatcctgggggagctggagggggcagaccaggggaccccatggaagaactgatgactggaaagggagagcccagtgggggtggtggcatcgggggtgggggtggggccccagagcctccaagggatggagctgttgaagggggtaggggtggcccaggaggagaagggggagggactccctggggaaggggatttggggaggagctgtctgggcttcgggagtctgagggaggggtatgtacaggcacacagacacacaagagacagaagagacaaaaaaagaaaatgagtcttcaaacatccaactagagactttaattctctaataccccaccgtgccggacccagcccactccacccatccccaagttcagagrcaccctgctgtcaaacaacagtgtaactccggctggtccgatggtagtgggttatcaraacttattaacatttgtgtcactaaaattggtatacaacctcccactgctatatttgactggctaaaaaaacccaaaaacagcgtaactcctcattgtggtgagaggagggagttgacaaggagaggaggatagttcaggtgaggaaaattttccaaccaatccatttgaaygaataccaggtcatcccaaagccacacctgtctcgtgggtggggcagcacgtggggtagaccatcgagcccctctattcccagcgtaaagccaggtagccagagcgtgcaagggaaagagacaggcaggagagacccctcctaagacgcaggatctgcctgtaaacgcccaaagtcctgaggtttaagaggaatcgtgcccttcccaggcccgcgacctccggtgcccaaggcctcaagcggtcacagctaggagggcggaagytccccttccccgccccgccccgggggggagggtgctaaggccctcgggagggaggggacgcgtgtttacaaacaagggggcgggagcgcaaggaaaagagcaccgggggagggtgtgggggaggggtcgcagataaagcggtcmmtggctcgcctgcccttctgctggggcactcaccccgcccgctgtcgcccatcccgtcccgtccagcctcccctggctccggctccggggtttgttgttctccgcctgccaccgccgccgccgccgccgctgcgggatccagccagggccgtcgccgccgccaccgggacgcgaccccacaatgcatttcttttcgcacccccaccggcccacactgccctgcggcatgccgctgagggaggaagggcgggcgagcggcccaagacatgatccctggctgagagtagggataccgaagaggtcccagggattcccaaggattgatcggaggattagctgagcacgaggaagcccctgagagaaagactctggcctggattgggtcgaattaagcccgtcgctctgctcagtaccaaaatgacagcgccaatgtggcagccatctttgtacagacgggaagtctcggcgcgagttcccgccccctcgtctagttggaaaccgaggaggcggtctcctccggcctgttagcccgcctcgcccaccctcccctcaaatcacctccacactcgcgcatgcgtgtcagtgcaggatggattcgycgctaccggagtgccgccatattggtaaaggcattagggcgaaggtggaacggaacttcctgttctcgcgggatctaaaggcsggactgccacgtccaagcaaaccgggaaaggagaggatcccggagccggtgagaattctctgttttttctctaccatcctttccaggccttttcctcacctaatgagtcgtagagacgagggcccagagagtctgtaaagtggctggtgaaagattagtgtcccagggccctacatccgggaggtggttcgggataaagagaactagtcttgggaacaatgtaggtgggaacttaagggaatgggagagcggcccatagaggtggacggagggcgcgattggagtaaagcggaccctgtgtaggtatagagttgagtcaagtggagtcactgcctctgtccctctggtcagcgtgatggccagaggcctgggggscccccactgggtggccgtgggactgctgacctgggcgaccttggggcttctggtggctggactcgggggtcatgacgacctgcacgacgatctgcaagaggacttccatggccacagccacaggcactcacatgaagatttccaccatgghcacagccatgcccatggycatggccacactcacgagagcatctggcatggacatacccacgatcacgaccatggacattcacatgagratttacaccatggccatagccatggctactcccatgagagcctctaccacagaggacatggacatgaccatgagcatagccatggaggctatggggagtctggggctccasgcatcaagcaggacctggatgctgtcactctctgggcttatgtgagtctccaggggatgggagagagaagggctggttctggattgttgggaaactccacagtacttgaccttgactctccctcaccaggcactgggggccacagtgctgatctcagcagctccattttttgtcctcttccttatccccgtggagtcgaactctccccggcatcgctctctacttcagatcttgctcagttttgcttccggtgggctcctgggagatgctttcctgcacctcattcctcatgctcttggtaagtaacctctgacttctacctcaaatctaacctatttcgttctttggaggaaaagggttctttctcctttatgatccctgacctttcgatattcccccaaatacacactcattgtgtcagatattccctcatctggttttcccccmttcttccagaacctcattctcaccacactctggagcaacccggacatggacactcscacagtggtgaggaagagacagatggggatgggagttggggtgctggggaaggtccgtctctccctattcctcacctcccgcacttgaggaggaggagtctggaatgcacatctcccttaawgtctcaatgcctccattcccaggccagggccccattctgtctgtgggmctgtgggttctcagtggaattgttgcctttcttgtcgtggagaaatttgtgagacatgtgaaaggaggacatggtcacagtcatggacatggacacgctcacagtcatacacgtggaagtcatggacayggaagacaaggtgagcccaggaacaactttcctgaaagctgacttgcctgcctcagaatctcctcatcttatggccctcaggagggagaggacatrttggaagatctgttctccactctgaccaactcttttcttccctcagagcgttctaccaaggagaagcagagctcagaggaagaagraaaggaaacaagaggggttcagaagaggcgaggagggagcacagtacccaaagatgggccagtgagacctcagaacgctgaagaagaaaaaagaggcttaggtaagggccagagttggtgataaatttgggcaagggacatcatcacaaaycacatggaatatgtgctgtgggtaatggcaggtatctgagaaacactaaaggactgggtgtaaagtggtctctgaggggaggtgtgagaatarctgaccaagactggaacaagtggtgatggaagcctctgatcattttctcttcttgtcctgtacaagacctgcgtgtgtyggggtacctgaatctggctgctgacttggcacacaacttcactgatggtctggccattggggcttcctttcgagggggccggggactagggatcctgaccacaatgactgtcctgctacatgaagtgccccacgaggtcggrgactttgccatcttggtccagtctggctgcagcaaaaagcaggttggtgatgtctgccaaacacagctgcctcaaaccctttatytctcctcactcaccctaaacccaaacagcctcttattagttccaaacaattcatactgtcattgacaagtcctctagaaatgagggggaagaagttctggttactttgtcctttagctcagtatttcttaaactggtctataaaccatctgaatggtttagtggagtcttacacacacacgcctactcaatcagaaagtctgtggaaaggacctctgatctcttaagatttttcagaaattgtctattctagactgctccctcttctctttttattttgatgtttagtttccaaatccatgtcccctatacctataccccaccagccacttctaaaccactgataatctttagctattggtgagtgcytttttctcttttctgcccatcaggcgatgcgtctgcaactactgacagcagtaggggcactggcaggcacagcctgtgcccttctcactgaaggaggagcagtggrcagtgaaattgcaggtggtgcaggtcctggctgggtcctgccatttactgcaggtggctttatctacgtagcaacagtgtctgtgttgcccgagctgctgagggaggcatcaccattgcaatcacttctggaggtgctggggctgctggggggagttatcatgatggtgctgattgcccaccttgagtgaggggtggataaactacccctgccccaaacctctacccctaactccaggtcaggggtgcgtagaggttgggggccctggccagggacatctgccaaaggaaggaactgtagcctgggagaatggttactttggcattagggccttcaagggctggcagtcttacagaggctggagcggtgagaatgagaggccagagggaccatagtgttgggcactgtctgaccatgttgcatttggaaggctaaatggggccatgaagaaggctggaagggacagggggtgatggcagcctacctggtgtcccctaccccacctgttctcggagaaccaagttgctacacaggaagttctccaaggtccagtttcctttctcccaccagttggtggaggcttcagggaagaccagagtcctggacagagagggtaacaggaggagtcggggataaacatcaaacatcaatcgtgtgtcctgatttgggagtgattggggggatggggtgggagagggttarttggtattctcatggcctgattttttttgtttctattccttttatatcactgtgtttgaatcgagggggaggggtggtaaccggaaataaagacctccgatcttccgccccacatgcagtctttgtctttttggggggaatggggccccttgtcttctccacacccggggcccctaagcagcagtgtcgggccacgccccctckgtgggaggtcggcctgcgctggtggccgcagatggcctaaggctggcgggcctttgattggccccggctttgcccttgccacgcccctctgcgctgggattggcttagtgctgggattcccacccacccacagcccgccatggcgtctcagctccagaaccgactccgctccgcactggccttggtcacaggttgagggggttctttccccgggcggtttggggtattggagtgaggtcaggggcgtgcccttggagtgcgcggccgctgtgacctctggccccttacccacattttactttctgccctgtgacctctgatccctgccctctcctccccgtgcccggtccggcgtgttctgtcctacctcaggtgcggggagcggcatcggccgagcggtcagtgtacgcctggccggagagggggccaccgtagctgcctgcgacctggaccgggcagcggcacaggagacggtgcggctgctgggcgggccagggagcaaggaggggccgccccgagggaaccatgctgccttccaggctgacgtgtctgaggccagggccgccaggtgcctgctggaacaagtgcaggtgaacgcyaggccactttccccctctaaagctctratattgcctccactgccccggctttttgtggggggtttttgatgcgtaacctccccctcccataggcctgcttttctcgcccaccatctgtcgttgtgtcctgtgcgggcatcacccaggatgagtttctgctgcacatgtctgaggatgactgggacaaagtcatagctgtcaacctcaaggtggcgatctctgaacctgcgacgtttggcccccttagcctggggagggagttggaggagggctgtcaccccagctgatcttttctcccttgttaccctttcccgccagggcaccttcctagtcactcaggctgcagcacaagccctggtgtccaatggttgtcgtggttccatcatcaacatcagtagcatcgtaggaaaggtcaggttgagttggacgaggtcagccagccaagtggtatagagaggagaacccctccttragactcctgactcattccacatctctgactcacctataggtggggaacgtggggcagacaaactatgcagcatccaaggctggagtgattgggctgacccagaccgcagcccgggagcttggacggttggtcagatgcttgagggtgctggggagcacctggggggtctgagggaggtaccagcattcagccctctccagaatcggcagccactctccttcccacagacrtgggatccgctgtaactctgtcctcccagggttcattgcaacacccatgacacagaaagtgccacagaaagtggtggacaaggtaggaggctgtgggtggagggcagaatcattcagagactcaatctctctgggcttcacagagagagagagagagagagagagagaatactgggcacagttcctggcaaacattaaatattcaatgaatgtatgagaaatgaagacaaaaaarggtcacagactcagtcttcaaaaaaatccataaaagaagctttcacccacatgagtatttccttacagattactgaaatgatcccgatgggacacttgggggaccctgagggtgagcactgaatgtagtggggtccctgggaagggggcctgaatraagagatccccaaagtttggggattttctaggggactggtggttggtgtctgtggagaggtttgtggggagggatgtctttggtgggagattatggctgttttgggtctatgggagtgagcagaattctgccctctccccaccattctcatagatgtggcagatgtggtcgcattcttggcatctgaagatagtggatacatcacagggacctcagtggaagtcactggtatgaggccagcatggggagggagagggcagagaagtagaacccagactatatgagaaagcaagtaaggggagtctggagccactgggaagggcagaggttcccaaggccagggacagaagtgggtaccccctagcccatttgtgtctccacccatgcatctgtccaaatgtttctgcccctcccaggaggtcttttcatgtaactgcctcaaggaccctggactctgctcacccccccaccactctgcctggcctcctgctgatgaggactctaagttcccaggatacaaaaggggtggcagtgtatggttcaggaatgctgaatatgggaagcaggggtgcttgtgaccctaataaattccaagtcctcttccctgccacctccggctcttcttgtgtccaagccctcakacccttccccacctccccctcctttccctttcccgaaggattgttccctttctctgcctggtctcccagggcaacccccgccgccgggtgtgagaggaaagagtatgtgtcactgtgtatgcgtgacactccgggtctttttgragggaggggttcgtgcgtcacccctttccactggttctgcagcaccagtcccctccccccaactccctgggttcttatggtccccaagggtgatttgttcatggccccatcttggtgtccagtctggccttgaaagggggtcttggaacaggtggccctcccccacccctctcctttctctgagtccccccctcccctttctctccaccttacaatagctgcagccggcctggggtcggatgggggggattaggggagggggccaggattaggggaatgaaccagccgatgaaaggggctggagagagcaggagggagggggctgggaagaggaggagaaggggagggggtctgcgctaatcgactctggcgcccacataaggactggccacggactgaaggagaggacagggaagtaggggggaactggggtggggggcgagggcacccactgctgccttgtcccagggacaggccaccccctggcagccgcagcccaagtccgggagcctcagctcgggcggggacaagatgcccatcagggtctctaactgccccccaccccctcgccctgtatccctctcattccctacactcaatggggatcgctctgccccttcctcttctctttcctccccatccccttcgtttactctagagtcctcgaagaggcttctgcccacttcccactccagacattctgcccctgtgtaccccacccacacgcgcacccccccttcccaatgggagctccatcttgtgtatgtccctgtttccgcgtggtgtctcyattccccctttcctcccgtgcgcctccctcccttccccgccccgggccgcggctcctgattgtccaaacgcaattctcgagtctatggctccggccgagagttgagtctggacgtcccgagccgccgcccccaaacctcgagcgggagagcgggtcggagggtctagggagagccaaagcagagggtggagggagtccccagggtggtaaggggaatcccgggcacatcgggacctaggtgtgttctcrggactagaaggctaaagcggcagatcttttgcagccttttcccccgggatcctggaatgggggttacggagaagtgaggggggttgatccccagagtcgccagggtacgcagagtgggggaggtagcccttttcacgagccctctgtcccctcctggggtcccagatattccaggccccggccccccggagctgaggccccgcgtgggggcctctggaagggaaccgaggctaaggttgttggccgcgcgacggtgctgggccgggggcggagaccgtggttccctaagtggcgcagaactcccgggacgcaggatcctcacgcgggacgagcccgtcccgtgggcgggagaaccgcggcgtccacgkcccgtcccacccgcgccgcgaatggtgggtgacgtctccgccggcggggggagcgggtgtagcggaggagcaggcggaagtgacgtagggccccagcgcccgggccatggcggcggcggtggcgggagctgctgtctgagcagcggttgcggaccgagcgaacttggcccaggagcccgggcctagggagaggcgcggcggcggcgggagcgcgaacggctggagctgggtgaggggcagtgccggcgcgggggcgggagcgggggcggagagggkcgcttctggaggggcggggtctacgcgaggggcggcccccctgacgcmctcctccccttccccccacccccagccttcttcgccttctcctcggctgtggagccctggtggggggtctgcgcccggtcaccatgacgacgccggcgaatgcccagaatgccagcaaaacgtgggaactgagtctgtatgagctgcaccggaccccgcaggtgacaggcattctccctttcaggcttaccccctcccccmaamccttatatccacagaccgcatcacacagcttcttttccgtaatttgctctattctgccttgcctggccctacctttgaatcaccttaatctttccaaagcactttcgcatttagctcatttaatcctcaaaacagccctgccagagaggtggaacaagtattattatcttcatttgaaagatcacaaacacaaaaattaccttccctgttcctcattcagtgtcataagtcagtgcayataagactcactttgggagtttattaaaagcagagcttcatgccccccaacattctgattcagtagtgaattgggttctcagaatctgaatttttaacaggcaccctatggggttctaatacaggtagcaccaggactttaaaaaattttgttgaatagtttttcccaaccacagatttgtgccatcttcactcctaggccacttagccacctcagatcctcctattccaaagctcctactcttagttaatggacactaaagtctgtcttttctccatttgctccaagtcatcagtccttctctttctcagaattcttgtctcctatagagaccaacatgggtcttctcactgtatttctcaaaattcttattttatgggctrctgtttctaaaacccctttccctctaacccacaccacctttctactcactgatgccttcaggaagccataatggatggcacagagattgctgtttcccctcggtcactgcattcagaactcatgtgccctatctgcctggacatgctgaagaatacgatgaccaccaaggagtgcctccacagattctgctctgactgcattgtcacagccctacggagcgggtaataggagagacatgtttgagatgagatgaaggggtacaaagttagggccctctcactggtcttggttcagcctaggcttcagtwcccttgactgaccactcagggcttcccttctcctaccccaggaacaaggagtgtcctacctgccgaaagaagctggtgtccaagcgatccctacggccagaccccaactttgatgccctgatctctaagatytatcctagccgggaggaatacgaggcccatcaagaccgagtgcttatccgcctgagccgcctgcacaaccagcaggcattgagctccagcattgaggaggggctacgcatgcaggccatgcacaggtgtgagggtcaggagagaagcagaactgatgggatgggtccgtgggtcagtccttgttgcctgctagcttctaagcctcagcatcctaggagctgaccacakactgatcattagggctggaaatcatgggtgtaaattgcagtttcttagtaaacaactggccctgctcttcttaagaaaaatatagggctgggcacagtgactcacatctgtaatcccagcactttgggaggtgaggatgggaggatcacttgagcccaggagtttgagaccaccttgaataacatagggaaatctcatctctaca

SEQ ID NO: 9956 - DNA, 13973 bp, Homo sapiens
aaaatgtatttaatcctttttatattacaatatgccaatatattccaatatagtggtattattttaagattctagataacttcttcatagagttcgcaaaatataggtcaaatttatggttatcattattaaaacaaaagtttaaattaaatgcctcagtcttcctactattcaaagacattttaaagcaaactacatgggtaatctccggtgacatttttatgaagtaaaatacctttcggttaaaaatataaaatacaggtatatttttacggcatggtattttaattgaaaccctgatgctactcaatttttctcaagtatttcatcttcatttactcaataaaggaaccttgtaagaattatagttaggcatcctacctgatgattttatcgggaccgtattatttccacttccagaaatgtcgttcctttcagtcggttaaaatcaattggaaccaactacaacctacaagttttcagctccagtaatattttgaaaactttttaaaaattaagcaagcccttttaataattactcctttcgcaggtgttcttggtaaagttttaacgtcacataatgtaagtattgtgtatcatcgtttttaagctctacaaatacgtgtgattcacaaaggtgagcgtaatcatttcttctggaatttcttagtcgttgcaataataagaatgggctctaggcgccgctgctcaccaatcagggaatgggaagctgcgcgccattgagtccctccctcccccgcctctaccacacaaagcggaatgagatggataytcacagatcctgacactggagacttagaagtattttccttcgctttctgatatattttggatrtagtcggcctaggacttcatagatacataagccgattcacaaccaaccagctcgagaaaccgcggaatatcggcttagagcctgccatggcgaatcggctacagcgcggggaccgcagtcggctgctgctgctgctgtgcattttcctggggacgctgcgggggttccgggccaggcagatccgatattcggtgccagaagagaccgaaaagggctccttcgtgggcaatatctccaaggacctggggctggagccccgggagctggcgaagcgcggagtccgcatcgtctccagagggaagacacagcttttcgctgtgaatccgcgaagcggcagcttgatcacggcaggcaggatagaccgggaggagctctgtgagacggtgtcctcctgtyttttaaatatggaacttctcgtggaagacaccttgaagatttacggagtggaggtggaaataatagatattaatgataacgcccccagcttccaggaggacgaagtggagataaaagtcagtgagcacgcaattcctggggcgcgatttgctcttcctaatgctagggatccagatgtgggcgtgaactccctmcagagctaccagctcagccctaataattacttttccttgcaactgcggggcagaacggatggggccaagaatccagagctagtactggagggaagcctggaccgagagaaagaggctgctcacctgctcctcctcacagctttagatggaggcgatcccatccgaaagggcgcagttcccattcgtgtggtggtcctcgatgtaaatgatcacatcccaatgtttacacagtccgtatatcgcgtgagtgttccagaaaacatcagctccggaactcgggtgctgatggttaatgcaacggatccagacgagggaatcaacggggaagtaatgtattcatttcggaacatggaaagcaaggcttctgaaatattccaattggattcacaaactggagaagttcaagtacgggggtctctggattttgaaaaatatagattctatgagatggaaattcaaggccaagatggtggaggtctctttaccaccacgacgatgttgatcactgttgtggatgtgaatgataacgctccagaaataactatcacctcttctattaattcaattctggaaaactctcctccaggtacagtgattgctcttctaaatgtgcaagatcaagattctggagaaaatggtcaagtctcctgttttattcctaaccacctgccttttaaattagaaaagacttatggaaattattacaaattgataacaagcagagtgctggacagggagttggtccagagctacaatataacgttgacagccacagaccagggaagcccgcctttgtctgcagaaactcatgtctggctgaatgtggcagatgacaacgataaccctcccgtttttcctcactcctcttactctgcctacattcccgaaaacaaccccaggggtgcctccatcttctcagtgaccgccctcgacccggacagcaaacagaatgccctggtcacttactctctgacggatgacactgtccagggggtgcctctgtcctcctatgtctctattaactccaacactggtgttctctatgccctacaatccttcgactatgagcagtttcgagacttagaactgagagtgatagcrcgtgacagcggggacccgcccctcagcagcaacgtgtcgctgagcctgttcgtgctrgaccagaacgacaatgcgcccgagatcctgkaccctgccctycccacagacggstycactggcgtggagctggcgccccgctctgcggaacctggctacctggtgacyaaggkggttgcggtggacaaagattcaggccagaacgcctggctgtcctatcgcctgcttaaggccagcgagccgggactcttcgcggtgggggagcacacgggcgaggtgcrtacagcgcgggcactgctggacagagacgcgctcaagcagagcctygtggtggccgtccaggaccacggccagccccctctctcggccaccgtcacgctcaccgtggctgtggccgacagcatccccgaagtcctggcggacctcggcagcctcgagtctctggctaactctgaaacctcagacctctcgctgtacttggtggtggcggtggccgcagtctcctgcatcttcctggtctttgtcatcgtgctgctggcactcaggctgtggcgctggcataagtcacgcctgctgcaggcttctgaaggcgggttggcaggtatgcccacgtcacattttgtaggcgtggacggggtacaggctttcctgcaaacctattcccacgaggtctctctcattgcggactcgcagaagagtcacctgattttcccccagcccaactatggggacacgctcatcagccaggagagctgtgagaaaagcgagccactcttgatagctgaagactcagctatcattttaggcaaatgtgacccgacaagtaatcaggtgagatttatttctctgcctcctaattgttggtgtcttggcacaagtcttttaaggagatgttttttgagcctgttatgaaaactgtttggggggggggtggggcggcatatatttagttcatatatatttagagcaatacatgtgagttttactttgcctttcatgagattacgataatctttcagaacgtttttgtgaaagtcatttttcaatcttggcatattttcttttgatttcaaaggggccattcaactatgctggtttggtttgaagtaagttgaattttagtattatttttctattatcagtgtatgaggctctcaatttattatatatagatacaaattaatgattcacaaacactttttatttccatttcaattttgctgtgccttcactgatttgtagttatattccaccattatttgctattactgctaatgttcaaattttgatcctgttgatttaatagcatgctccctctagctctccttctcatctatctatctatacacatgcacacacacttatacacgtaagcttttctctgagcaattttattttgattcttggtggctggtaatatgcttagatcctgttgactatttcaactttgtctcatttcttcatcctatcaacacagacatattgactggcttttaactactggatttccttgggagataaaatttagatcacattttttcttaagctctagatgtcttttccattactatggtgaagttacattgactgttctgaggaaataattgaattattgaactggtattatttccttttattcttttactttggtgtctgtgtttgtatgtatggaaggttttttaatgtagtaaatccatatatagaaataacttgattttgattcagtgcttctcaaaaacctattttcaaatgtgctaaagatgtctacagatttattcaaatagagtagtttgtgaatatataaatagattgaaggtatttggactttaattaaactgatttagctagtatccttctggctatttttttgttcattttcagtgtagttgggagtcatagattccttctttctttctttataaggtcattcttatggcaaatagtacattcagttcttttattcagaccaacttgttattgaagcttgatagttgcctgacatacatgttatctgaagcaatgtctaggaaagccaaatgaggaaaggagacttatctagggtttttgatcacaggaatcatttccataatcaattcagtcaacactctcacatcacttctaggtatttgccccaaattacttggatatttatgttccctttcaagtttagttttctcatttaggaatttaccttatgtcattagttgtaaactgactatctagggctcggacaaaaataatttcaactgtaggaaaggcaagtcttccaacagatgcctacatttttcttgaagtcaagaaaaatgttcaggtattttgagcatctagggataggatttatacttgtggaattccaaactgagaaaaatgatgtaaggcattgtactttgactggaattagttaaataaaaaggatatgaggtatttggctgggaaaaggagattgttccatattataaaacctcatctaaactaacttcccaagatcgtggagaacaaaaaggaagggttggctttgaaatgtgatattaagagggttatgttgattcggaggtagtgataaagttctgttaaggtataacatatagtcccattaaatagaggataaaaataaaacaccatcacatttcatgttattaattcctatggcaacctactaggctatacctttatattctctttatgatgaaacatgaaacaataatccttttcagaaacctcttttataagtgataagaagggtttggctaactttattctgaatatgccctatatagctttcagtgctcctccagttttctctgataaaactaggaggaaaattatctgcacatcagattgaaaataatactgcatatcatttcatagtggtcaaaattttcccataccacttgatggggatgttttcccacaaggtttttgttctacaacaggagagaagactttgcctagttcttccaatatgtgcattgcttctgcttagaaaaaaacaaacttttaaattctctttgctgggttaatgactgttctatagattcccatctctaaggaatcttctttggtagtaaacactggaaaacagtcactacsaaaactcataaaatgtctagtttcctatacattagtccaacacatcagtctaattctgaatcccattgaattagcaaaggcttccggctgcagttttctaaatagactcagagccctgctgttggccaatgtgctgcaagaactggagcctgggatctaccaggacgatattctgttcagtcacagaagcaagtcggagagtggccaagacttgggctttctgctcctgcaaatctgattccatacggattggggtgccctcaaactgggagcattgagttttcyatgtatggaagtaaatattttaaaagcactttgtgaaacattttctcttaacgtcggagactgcagcaacgcatgggaaggatgggaaacagggtgaagcagagaagcaggacccggcagtggcaagcactcttccctttcctgctgcctttgttctgcggggcaccctcggagcagatccgctactctattccagaagaaacggtccagggctccgtggtggggaaccttgcggaggacatgcggctgcatgttcaggatttattgacctgaaaccttagagttagtgcagagaaacaatactttaccgtgaacacggagaatgggaacatacttgtgagtgacagaatagatcgagagtcactgtcttcaaaatcctctgtgtcatacccttagagattgtagcagagaatcctctaaatgtttttcacataaatgtgatgatagaagatataaatgataacccacctcattttccccaaaatagcattgttttacaaatcaatgaactagcaattccaggcattcggtttggcctggaatctgctatagatgcagatgtagggcctcactctctccagagttaccagctcagttctaatgaacatttctctctgatgatggacaagactaaaggcaagaacgctccagaattagtgctggagaagcccctgggccaggagcaacagagctctcatctcctggtcctggaagcaatggacatgggtgacccagtcccaactggcactgctgcaattcaaattgaggtcactgatgccaacgataatgccccagtttttagccaggatgtatacaaagtcagccttagagagaatgtgcccccaggcacctctgtactaaaggtgacagccactgaccaggatgagggtgtcaatgcggagatcacctactctttcaaatccctacgagatgatattggaaatatgtttgtgctagaccatcaaaatggggaaattaaatccaaagacttaatagacttcgaatttcgtagcagttataccatgagagtagaagctaaggatggtggaggcatgaccagcgaatgtaaaattatactagaaatcctagatgagaatgacaatgccccagacgtggtttttacttcagtgtccagttctgtaactgaggacgcagaaccctggacggtgatcactctgttcaaaacacatgataaagattcgagagaaaatggggaggttacatgcctcataaacgaaagagttccttttagaatcgaatcttccgccaataatgactataagcttgtaacagatgggaccctggattgggagcggatcccggagtacaacgtcaccatcactgccactgacaagggcaagcctccgctctcatccagcacaagcctcaccctacgcattggtgaagtcaacgrcaatgctccggttttccaccaagtctcctacgtggtccmcgtggccgaaaacaaccttcccggagcctccmtcccacaagtcagcgcctctgacctggacctagggctgaatggccaagtctcctactccatcgttaccactgacttggagctgcggrcactgtcgtcctacgtgtccgtgagcgcacagagcggggtggtggtcgcgcagcgtgccttcgaccacgagcagctgtgcgccttcgagctcacgatgcaggcccacgaccagggctcgcccgcgctcagcgccaacatgagccggcgcatgttggtgggcgacctcaatgacaatgtgccgcgggtgctgtaccccgcgctggggcccgatggctccgcactcttcgatatagtgccacgcgccgcagagtccggctacctggtgaccaaggtggtggcggtggacgcagattcgggacacaacgcttggctgtcctaccacgtgctgcaggccatcgagcccgggcttttcagcctggggctgcacacgggaacctgctggttgctgtgcgtgacggaggacagccgccgctctctgcgccgctacgcttcacctagtcttcgcagacagcctgcaggaggcactgccagacttcagtgacagtcctgtgccctctgattcccaagcaaagctgcagatttacctggtcgtggccttggccttgatttctatgctcttcttcctcgcagtgattttggcggtcgccttgcacctgcgatgctcttccagcccctctgcctggggttgctttcaccctggtctctgttctaagactagaccaggggtttttcccaactacaatgagggaactttgctttattcctgcaatctgtatgttccctcggattctagaaaaagaagatttaattttctcaccatgacaccagaaacagtccccccacaagatctttctaatgaagtttctctggtagcaagcttcactgaagagaataacaagataagctctaactctgttgctcctactcacgtgagttccaatgaatgtctttcatttacaaatggatgaggtttaattttcaaaccaatattttggcaagaaaatcttaaacatattatatctactattgcttcaggtttgtttgcccactcttaatatttcctgttcctttctgtgtgggccagtaacttcattattagctttcatgtatttttgaaacattttcaccatttttacgggagactttttttttttttggacggagtctcgctctgtggtccaggctggagtgcagtggcatgatctcggctcactgcaagctctgccttccgggttctggccattctcccgcctcagcctcccgggtagctgggactacaggcgcccgccaccacgcccggctaattttttgcatttttagtacagacggggtttcaccgtgttagccaggatggtctcgatttcctgacctcgtgatctgcccgcctcggcctcccaaagtgctgggattataggcgtgagccactgcacccggcccggagacattgtttatacacacacacacacacacacacacacacacacacacgtgtgaaaagtgggtattatgatactgctgtcattgagatattttaattgaggaataaatttttttcctgtgatgtttcttgggacatcaatatttgagtatataaggctttttctttaatccattaactataaattttgaagaaaatgcatgagaaaatggagaaaatgtgttttttttttwwaaaaaattgagattaaggtctcattatgttgcccaggctggactcaaactcttgggctacagtaatcctcccacctcaatctccagagtagctgagactacagttgcctgaaactgtgcctggcagagaaaaaagcttaaaaaaataagaacatggtaatgatttgataatattcagttacatttacttttgattcttgtaattcaagtaaactcaattttatgtctgatattttctcacagctacctatatatttcttcccaatttaaaatatattattttattttatgcctagcaaatatctttacagtataaatatttacgctcatgaaagtacgtagccagttatttcttagggagaattttttccctatattttgatgggcttccaaaagtattaccagtaattctcagtaattacaattaggtcagttacccaggaaaaggtaagtctgtaacattctttggactaccaattttcttttactaagtttcctgaacaataaatatttttgaaatataatgtattaatagaattctggagtacttccattatttccagtcaatgcaagttggaatgcttctactttatgctaaaaatattaatgtttctttttcacttgggttcttgttaagtgtgattctgataatgtatacaatcacatatcatttttaggtttccataatatcatgaaaatttgatttttaagygttacatgtcaacaacctggtaaagtaatccttccattcaggatcattcaaggaatctatttaaaaatattttccccaaattatagctgaatcagaaagtttaaattattatattatatgatttgtcaaaaagagaaactcctagggagacatctccataataggtgtgttgggggaacagtaatctcaaagcagatgcactaacattataagattaaaatcattgtttatagaaacttccaattcatttaaaagctcattggggaaaaaaaagctcattgggaaaaaaaaaaaaagctcactaaagtttctattaaagcgaatacggtagatttccatccccttttgaagaacagtaggtggagctatttaagatataaaaacgaaatatcctttctgggagttcaagattgtgcagtaattggttaggactctgagcgccgctgttcaccaatcggggagagaaaagcggagatcctgctcgccttgcacgcgcctgaagcacaaagcagatagctaggaatgaaccatccctgggagtatgtggaaacaacggaggagctctgacttcccaactgycccattctatgggcgaaggaactgctcctgacttcagtggttaagggcagaattgaaaataattctggaggaagataagaatgattcctgcgcgactgcaccgggactacaaagggcttgtcctgctgggaatcctcctggggactctgtgggagaccggatgcacccagatacgctattcagttccggaagagctggagaaaggctctagggtgggcgacatctccagggacctggggctggagccccgggagctcgcggagcgcggagtccgcatcatccccagaggtaggaygcagcttttcgccctgaatccgcgcagcggcagcttggtcacggcgggcaggatagaccgggaggagctctgtatgggggccatcaagtgtcaattaaatctagacattctgatggaggataaagtgaaaatatatggagtagaagtagaagtaagggacattaacgacaatgcgccttactttcgtgaaagtgaattagaaataaaaattagtgaaaatgcagccactgaratgcggttccctctaccccacgcctgggatccggatatcgggaagaactctctgcagagctacgagctcagcccgaacactcacttctccctcatcgtgcaaaatggagccgackgtagtaagtaccccgaattggtgctgaaacgcgccctggaccgcgaagaaaaggctgctcaccacctggtccttacggcctccgacgggggcgacccggtgcgcacaggcaccgcgcgcatccgcgtgatggttctggatgcgaacgacaacgcaccagcgtttgctcagcccgagtaccgcgcgagcgttccggagaatctggccttgggcacgcagctgcttgtagtcaacgctaccgaccctgacgaaggagtcaatgcggaagtgaggtattccttccggtatgtggacgacaaggcggcccaagttttcaaactagattgtaattcagggacaatatcaacaataggggagttggaccacgaggagtcaggattctaccagatggaagtgcaagcaatggataatgcaggatattctgcgcgagccaaagtcctgatcactgttctggacgtgaacgacaatgccccagaagtggtcctcacctctctcgccagctcggttcccgaaaactctcccagagggacattaattgcccttttaaatgtaaatgaccaagattctgaggaaaacggacaggtgatctgtttcatccaaggaaatctgccctttaaattagaaaaatcttacggaaattactatagtttagtcacagacatagtcttggatagggaacaggttcytagctacaacatcacagtgaccgccactgaccggggaaccccgcccctatccacggaaactcatatctcgctgaacgtggcagacaccaacgacaacccgccggtcttccctcaggcctcctattccgcttatatcccagagaacaatcccagaggagtttccctcgtctctgtgaccgcccacgaccccgactgtgaagagaacgcccagatcacttattccctggctgagaacaccatccaaggggcaagcctatcgtcctacgtgtccatcaactccgacactggggtactgtatgcgctgagctccttcgactacgagcagttccgagacttgcaagtgaaagtgatggcgcgggacaacgggcacccgcccctcagcagcaacgtgtcgttgagcctgttcgtgctggaccagaacgacaatgmgcccgagatcctgtaccccgccctccccacggacggttccactggcgtggagctggctccycgctccgcagagcccggctacctggtgaccaaggtggtggcggtggacagagactcsggccagaacgcctggctgtcctaccgtctgctcaaggccagcgagccgggactcttctcggtgggtctgcacacgggcgaggtgcgcacggcgcgagccctgctggacagagacgcgctcaagcagagcctcgtagtggccgtccaggaccacggccagccccctctctccgccactgtcacgctcaccgtggccgtggccgacagsatcccccaagtcctggcggacctcggcagcctcgagtctccagctaactctgaaacctcagacctcactctgtacctggtggtagcggtggccgcggtctcctgcgtcttcctggccttcgtcatcttgctgctggcgctcaggctgcggcgctggcacaagtcacgcctgctgcaggcttcaggaggcggcttgacaggagcgccggcgtcgcactttgtgggcgtggacggggtgcaggctttcctgcagacctattcccacgaggtttccctcaccacggactcgcggaagagtcacctgatcttcccccagcccaactatgcagacatgctcgtcagccaggagagctttgaaaaaagcgagccccttttgctgtcaggtgattcggtattttctaaagacagtcatgggttaattgaggtgagtttatatcaaatcttctttcttttttttttttaattgctctgtctcccaagctggaatgcagcggtacgatcatagctcactgcagcctcaaactcctaggctcaagcaattatcccacctttgcctccggtgtaacagggactacaggtgcaagccacctactgtctgcctatctatctatctatctatctatctatctatctatctatctatctattwctttcttgtacagacaggagtctcactatgttgagcaggctgatctgaaacttgggctcaggctagcctcctgcttctccctcccaaactgctgggattacaggcgtgaaccacagtgccccgcccttatcagatattcttttctggctgggcgcggtggctcacgcctgtaatcccagtactttgggaggccgaggcgggtggatcacctgaggttgggagtttgagaccagcctgaccaacatggagaaaccccgtctatactaaaaaaatacaaaattagccgggcgtggtggtgcatgtctgtaatcccagctacttgggaggctgagtcaggagaattgctttaacctgggaggtggaggttgcaatgagctgagattgtgccattgcactccagcctgggcaacaagagtgaaactctatctcaaaaaaaaaaaaaaaaaactttatcctctagtttcatccattgatgacacttgctttaatcacttattacaatcacctccaaatgaagattttataattccattgtttcttctacagttgttaattggctttctaccttgaagaagagttttatattctctatatatgtttgtttctatgattctggaagcatggttttctattttattcaatggcctgtaatctgttaatatcaattatttattttgatgctgaaattgtcccaggattggcctttgggactccctttaggctgatttctatgtcctttctgttacagcaagcttgggattatatccaagatttgtaattccaatgtacttacttctgtcagtgtaaacaaagtacgatttctggactagatgacttgggcattgtgggg

SEQ ID NO: 9957 - DNA, 353234 bp, Homo sapiens
  misc_feature (9697)..(9697): n is a, c, g, or t
  misc_feature (9745)..(9745): n is a, c, g, or t
  misc_feature (12812)..(12812): n is a, c, g, or t
  misc_feature (25932)..(25951): n is a, c, g, or t
  misc_feature (48652)..(49173): n is a, c, g, or t
  misc_feature (49724)..(49743): n is a, c, g, or t
  misc_feature (211447)..(211447): n is a, c, g, or t
agcccaggagttcaagaccagcctgagcaacatagtgagacctaatgtctacaaaaaaatataaaattagccaggcatggtggagtgtgcctgtagtcccagctacttgggaggctgagggtagaggattgattgagcccaagaagttgaagcagtgagctgtgatcataccactgcaatctagcctgggtggtggagtaaaaacttgtcaaaaaaaaaaaaagaaagaagaagaagagagatacctccccttttattcttcatttccatctagcaaaataataaaaataatattgatgattgargggtcgccttggacaattgccttggacttcagtagtgaaaaaagaggataaaagatcctaaggtattcatcaagtataacagagcaaaggctgaacaggaccctggagacgagaaagatgggagagatgagagccacacgttcgagaatgctccaggagtcagtttgttcagcagcaaagttgggggatgttggtgggggaaacagggagaagtgtactccatgatcctagttttggcaacttgattggttccccttccttcttgctccccctaccccccaacccccacctccacaggtcactgcagctttgagaaatggcagaggagaagctcaagggcagaaaataagccaggagagtctctttcccccaaatactctattgaaagggttgataatgaggcactgtgggtaaagcaaggtagcaacccaggtgcttgtatctgtagaagctctcatattctcrtggattccaccctggcccttcaggaactctgggaaatatgccatggttttgctccctctgggataaaaggggtgagcagatacatgttacacttttcacttataagttgccacctggaatccagactttgtctgcagtgaccagagggcagagctgagcggggctttcaagacggtatgctgcacagatgccagctctggccacagtgctgtgcacayggggtctttgctgcccagcatctatcttccaacttaaaatagataaaagaaaccataataaaaaccaacatcaatgggttctcttaaaaagaaagcaaatatgcttaaagtattaacacattggatctatgtgtagtttcacatyatatgaccacatgaggaatttgtgtggagtagcaggagagttccaagacatttcatagggagatttgagtgttggtgggtggcgaggggctcctgggcacctcacttattgtctggcaggatctccttggagccactggaattttaaggactttaagtaagggaagattggttaccctctggagagaatgctggaggttacctggtgaaattgttgctcttaacgcagaagggaaaattctgttttgatctatgagtcatatagaaatgtattatactatggaatctgygaaattgtttgttagtggggcttgtaatacggtccgtgtgaggctcacacctttgctctaattattgtttaagattaattattttttaattattgtttcagattcttttatagggtctttgttgggaaactcaaacagtatcattatgttcccctcacatttggaaacctaaggcgcccagagggcttatcttgggatcacacataggtggccatctgtgctggtttgccagggacagtcgtggtgtcttattgtccagttgtaattattaatagtgtctactttccctctcacaaatgctggtttatactaagtataaggtcaccctaaccacctgacayattgctgtcaaaactaggattggagagcccacatttcacatgcgccagatcatccatttaagcaaatgttatcccagttgttaaaaatcctttatttctgacttacagggcctcataccatagcagcctgtcttttagaaacagttaatgtggaacacatcaaacacgaggcctctggttgaaacacttttgttgacttctttgtttttcactttgttttaattgactctcacagttatgaatgcctttgaaaagtacattttaaggacttcagcaagcattaattatttcttttgtgtcctgatgtcaagtcattttcaactatctggttcttaataggatttaaagtgaaaaaatattaaatatgtatcagggcaattccacttactcttggttcttgcaatgatttctctgttgaaaaacttacataggccaggcacagtggctcacgcctgtaatcccagcgtgattactttgggaagccaaggtgggcgaattacctgcggtcaggagttcgagaccagcctggccaatgtggtgaaaccccrtctctactaaaaatmcaaaaaaaaaaaaaaaaaaaaaaaaaagccaggcgtggtggcacrtgcctgtaatcccagctactcaggatgctgaagcgggacaattgcttgaaccctcgaggcagaggttgcagtgagccgagatcgcgccattgcactccagcctgggcgacaagagcaaaactccgtctcaaaaaaaaggaaaaaatgcmgggcgcggtggctcatgcttgtagtcccagcactttgggagcccgaggcaggcagatcacaaagtcaggagatcgagaccattctgactaacacggtgaaaccccatctctactaaaaatacaaaaagttagctgggcgtggtggcatgtgcctgtagtcccagctacttgggaggctgaggcaggagaatcacctgaacccagaaggtggaggttgcagtgagccgagatcatgccactgcactccagcctgggtgacagagcaagatgctgtctcaaaaaaaaaaaggaaagaaggaaaaaaggaaaaatttacatgaaggaagttgacatgctttccacaaccctataattggcctgctgagaaatcatatgcaattgtttacgatttttgtgattaattctctttatggtgaatgccatttacgttgcgttatcaacaccaataatggtccagttctgtaacgggttagctatgactgcaaaatcaccatttgtctttacagcactcttttatctcrtcacttrtctttccttttaaatgacatttgttttatgtggtagctcattttgagtcatgaattgcaacatatggaaccactaaccaagaaatagtcttgcacctttccctgttaacagaaacggagttgaaaacttagcctcctggtattattattattctagttctttatatgactggaggaaaatcagatttcaagttcttcccgctttccttatgcctttcacagcaaatttcaaagtatagcagtaggcagattgcaatgtaatagcaatttttaagcccagaaattaaattaaaccagaaagaaatacacctacttctagttcaaatagtgtttcttccagaaagaagaacatctccacagtaacagcagtgacaataagagtattttcatgaagatcggagttaccaggtttatatagattgcagaatacagctactgttttccagagacactgacaatcagtgctaaattgttaggaaggtctctgtgctttggagaaagatatggaatagtcggtgcaagggcaaatagagtgccttctcaaattgttttcagttcctcttcttaaggaggaacaaaaggccagtaagtaatccaatagaagcttttccctatagaatggtcagaaagtttgrtcattcaaaagaacattattttaccataaatacatgtctaggtttcatgatccttaatgattcatgttaattctcttcccccaatgcctttttctgttgtgcatatcacagagttttgtttcctggaatatcagcagagagggcagtgggcttggcccgtatgggggaggggagggtcctagcagctggaaagcaaggtcggctgaccaagggggttccttgggctgcctggaaaatggtagttcagacctggtgggagacatttccctatttttgtccatctaggggtcaacagaggcctgaaagactgctctgacaccttccaaacagcccccaggaaatcttaatcagcatctgccaatggatcttttctgcctgggttgagctagccaggagggccctggggcagggtgctgtttgtggctgccaacggctgtggcagccctctgctgcctccttcatcctggggtttttgcctttgtgctacaccaaatgacaggtaggagctgttaagcacgggctctctggacaccagagcaaggggattggggtcacaaccaaaggctgcgggacatctgatttgggctgctgcatctcctgctacagtgtttctctctctctctctcwcacacacacacacacacacacacacacacacmtacttttctcccaccctcctccccactcttcctagcattaatactttaaagacaaatacacaacagtatacaagaatcaggatgatctggacctgaaaggctgaacacagcagggccctccttcatgaacattttgcacctaaggaaataataaggttaaaactagattcatctggcctttgcccaggggccaccaggacagaaactgtgtaagattagttcctccttaaagcaagattgccaggtaattctgttgcaaagtcatagagaccttaagttatctgccctgcaaatcccactgcctctattcaggctgccgaggcactgctttaattttttgaaagattcaccgcgtcttcttggatttcaagaaaaatcccgttaaraattgaggggctctcttcttcccctcctgaygtgagtgtaactcacttcctggtatgtctcctttccttttggcctacatcctttgtctgttaggtgcttccacatccttatgtcttaaatggccaaaatacgtcacccccactgccaaaacacacaggtcactcgaggtcacaatctggaacataggctggccattgttcagcacacattcttgatctaaatcaatctcaaaccttgctggaatgccctgtaaactggggcaaagtatggtcaccagactaaccattgtccttttttacccctcctgtgacggggctactacaggttacaaaatcgcgctcttcctcctagctactgtgttactctgagatatctgacatcgcagagctaatgttgcctaaattattttcccatcctcttttttttttttttttcggacatcatgcctcctattttcactctctgggaactctgccagtttttcaaggactgggtaaagaacaaaataaatatttgtaggtggtttaaaaggagaagtatgttggttgtaactctgcctgtccaaagaaatgcattttcactgtctttcaratttttggagtcgttaactgggagagcttcagaagattgactttactagtttacctttcaratttgtgattaagggctgggtgtgtgtgtgtgtgtgtgtgtgtaagtgtgttgggggagggaggagtctgagaaagtgagcaagtacgtagaaacttttttttaaaaagtccagattaagtgattgaaatcgactgtgtgcaaatgacgctatacctcttcatagatgttaatcgggccctaaaaagttagtgccggaaagtgcttacttacaacactcagcatatactctttctttcaaattgtttgggattttttttttaagggagttcactgaaatttgggaggttcaacaggttgctgttttttaatatgtggatcacccgatttgggaggctcactctgcctctgagattaaagagatgagggcactggctcccagcgaaggctcycggccttaatcatgtgtgaaatgttttccttcctcggctgcagagcctcggtggtttgcagcagtggaaccaggcaggcccagttgtgggtaggagaggccgtcacctgttgaggcctcccccccacacccccgcatcgscctgccctggcagagcccagcccccagtccccggagagcgcgcctgaggacggacggacggacggacggacagacctagggacggagggccaggggcaggggagatccaagaggccccgcgctggaatgcagttttctcgggcgagggagactttgcaccggagtggaaaatagtttggggtggggtttcgcaccgtcccctcctccccagccccgggccccctcccaggcgctttctgggagcttttagaactgcgctctgaagtttccagagagcgaggagcttttgcggcaggcagagacaatggaagaaaatgaaagccagaaatgtgagccgtgccttccttactcagcagacagaagacagatgcagggtaagtaacagacccattcaaagatggagttacagggacgcgtgccccttgccgcttgctgctttttataaactgcagctctgggacccggcaaaggaaaaaaaaaaaaaaaggcaatttcttgggatggtacattttccaaactgagtagagcatagagaactgtgatttcttaggcttgactttatctctggcacgattttcttaagcagcaaaagaggtggtggggtgatgtcacatttgtagtgcagtgagccatcagcatgagctgtatctctaagcaatgacaaataaatcactaagcagcttttaatcatttccccccggggctccagccacgggagaaaggagctgtttttgtgaaactgtctctaggacsgcagcttccattcattggttgggggattccatgtggcagatgcatgctggctgcaaagtttgtgcagaattttagagttaaatcacagaaaccaggcatgttttattttacagatccgagcagcaggggagggcttgagcatctgggtgatagatagaactctggatcttcttttatgttttaattcaaaacttgggagttgttggacaattttggtaaattttctccaggcagtttccctttaattgtgtttataatagacttgtcttttccgtagggaatttccagaagcttatgttgttccaaagaaatttcgcaccgggttgggtggccagaggaggtccctgctctctggcatctgatgcctgtgatgccaagagctgattctgtgggatcctataggcagcatgttcataawccacacagccctggaccacccgccccaccctccctcaggttcatgcaggggccagtacacaacaaaaagacgtgcgggagtgcagtgctgtgcgtgggagtagggattatgcacaggggaaaaggtgtgtgttttatgaaaatgtgaaagggaagtaacacatgactcatccacgctgaaaatgcaaagctaagccagtcaggagaacttacaatgacaagagatagaaatcccccagtgaaatgcagaaaayttgaagttttgtaatggctggagaatccctgagtctkaacagtcatctgycgaagtgkctgccttcrtgctgmcaaagcacagcactctccttcaggctaccggggtcartggcatccagtggaagataaggctacctcgtccccctgacccccgcaaccccccacccccattttmtaggacaggatcctacttcaggaattcaacctctgggcctgtcctgaaagagatgactcagattctagarrggccattagaaagggatccatttaagaaatgactttccaacaatcagggcaattcagaggcttcagaggctaggatggtcagcctgagacagtgtgctcctttgctcactaattcattcattcagtgaatattgagcatctgttatgtagacgtcactgttttagctgccagacatccagtggtgaacaaagcagactaaaaatacttgccttcatttaacttccagtgtaaggaccaagtttcaggggrtrgggagctggtagagacagacaatgaacaaataaataaaatatatagcatgttagatggcacggctgctggatttagcaaataaaaatacaggaggcccagctaaatttgaatttcaggtaaacggtgaatttttttttttttagtataagtatatcccatgccatatttgggatatacttatgytaaaaatacttctccrttatttatgtaaagtgcacatttaactgagcagtcctgtatcttatctggcaaccctatttgatggaaataaggttacagagaaaaataaagcaggaaaaggaataaggagtgaaactgtaaataggattattagaaagagcttcgctgaagtgatatttgaacaaagacaggagaggtaacagcarggatgtaatgttttcaaagaacagcaagaacatgggagaaggatgggaggaaaagagattgakaggtaatcccaggccagatcacctagggcccatgaaaccattgtaaggactagagcttttattttgaaagaggtgggaatctcctggcaggtgggactactyttttttttttttttttttttttttwttagagagggtctcatttgtcacccagactggagtgcagtggtgtgatcatagctcactgcagccttgaactcttgggctcaagcaatyctctggccttagcttccaaatagctgggactactgggacatgccaccatgcatggttgtattktattgtattgtattgtattgtattgtattgtattgtattgtattgtattttattttattttagagaaggggtcttgctatgttgcccaggtgagttacaaagggatttgtctttttaaatggggtaatactgggtgctgtattgagcacaatccaagtagggttgagggaagggcaggraggcctttaggaagcttctgcagtcaaggaggcaagaaccagggctagcttggaccaggcggtgwttagcaggcggtgataagccagcagattctaggtgtatattgaaggtaatgcccaaagyatttcctgtagcctgggcagcatagtgagaccccatctctagaaaaaaaaatttrgctaggcatagtgccctgtagtcccagctacttgggaggctgaggcaggaggatcacttcagccaggaggttgagactgcagttagccatgattacaccactgcactctagcctgggtaacagtgtaagattctgaaagaaagagagagagaaagacagagagaaagagaaggaaggaaaaagaaaaaagaaaaaaaaagaagagagrggaggggaggagaggagaggaaaaaagaaaagacaaacaagacaagacaaaagcaattgctaaaggattcaacttgggatgtaagagaaaaagaggagtcagagacaacttccaaaattttggtgtaagctgctgggagaacggagttgccatttgcctaagttggggagtatttacgaagaacagatgagagggtgtttatggtttgaggttctgaggagcaatcttttgatagattaggattgagaagtttatcaggtatccaagtggagatgttgactacaatttggatattaatcactagagctgaaggaagactgagaactgagagatcccctaagattgaatctgtgtgcagaagaaaaagtccaaaggatgccccccgaggcagtccagcatctagaggtcagggagattggaaggaagggctggaaaaaatagcaaaagtggaataaaaatccaaattagatttttaaaatcctgttcagttctgggtgaatatgatgctgtagagaagcatggcttcatttttagttctcccggtgagcacgagtgccgcaagggagancaacakctctgatgctaacatcacccakaacgttcatttctatcattncattctctcttgkgtctgcctgtgtatctgttttacccaatgacaatgtgatattccacagcaaggaccatgttttatttattcacgtttgcatttccagcacctaacagagcactgggcaacctaacagagcactcactgggcactgtagaaggcactcaataatcatttgttgaatgaaaggctaattttaccacttygggactttgagtttattatcctgctatagataaggatccctagggtgatcatgtaacttaytgtccaaatgagatccttttgaaagtgaaagggaacactcaaataattttactgggacaacagttgtaacccagagctgttttggcaaactggggtatatgatcaccctaagaatagctctaatcaaygaagcttccayggctgaatagcccrgctaccaggtaaataacaatggggaagtgtagcgcatagtgtgctttgcggagtaggcactcaacaattattggtggaacatgaatctaactgtatcatattctctttgaagcccatgggctctacattgtgaccctggggcataggcattccttgggatgactctgtccacagcagtcctgacgtgtgtgcttttgctctggttcctaaggtcttgaaacctctatgcaagtgaagtgctattagcccacctgcttgccttccccactgtctgattggcagcctcccatcgagtgcaagcctggggaatcagatatgcagmagcctcctctaaaacagccccctcagtctctgtacccttatcccgtttcattcttcaaagcacttaccgttacatgacatttagagtctatatgatttgtttgtggttggcctatttcaaatgtggactcctctatgagggcattaagtctgacttgatctacttcacactgtatctcctaactcctttcagtgtgggagcaggcagtcaataaatatttgtatgaatgaatgaatsaatcaatcagtgcttgacacagaatgcttttctgggaagaggagctcctgtctctattttgtctaagatctataccagaaatcctcttcatcactggtaaaattttaaggtactatagaggaatataatgacctrktttcagctgtaatttctgtgctgatttgyatatatattatgatagtaacaagggagctaaccccatcactttgggatgctgaggcaggaggatcacttgaggccaggagttctagaccaccctgggcaacatagtgagaccccatctctacaaaaaaaaaatgtttttaaagtagccatgcatggtgactatgcacctgtagtcccagccactccagattctgaggcaggaggatcacttgagcccaggagtttgaggctgcagtgagccatgattgcatgactgcattccaacctaggtgacagagcaagaccctgtttctaaaaacaaacaaagaaaaaaaacaagggagcttgaaaactgagggatgctgtaggattctgcggcctgctaaccgattatgtgtattaatcagataggctaattgttgtaaccaccctctaatcttgrtggctttgcatgattaaggttaattgttcactcagacacarcacagtgtgatttctgtggccaggtggatttcctgggtggccgmtgaggctcctcctgccttgtcactatggcatcccccacggcsttggagggttctgctggatcctttgtattcaactggccaaagagtaaagagagagagaacgtggaaggttatttgggaggtctaggggccccaacaaaaggtggcccacatggcttctgcccacaatacattgactggaattagtacaaggmcccagtgagatggagatggctggaaaatgtggtcttcctctgtgtgcagcagaagagcgttctggtcgaacacatagggctgtctctgccacggtacacccagagaggttgtacaaccagaccaaacagcaactccctatgatgctccctatgacaagagagcttctcagcacaattgagaaggagacagctaaccagaagccactagaaagaagtgagggatgccttccctaagagtctgtggcctacctaatcttgacccaggaataggatctcagggaagccatcagcactgttgctggctctggagcaggtgtggaatgcctgagtggtgcaaggccccaaatcccttgctgcaggtcagctgacccagccagagtaacccgagttgtggcaaagaagctggccttggcagcgcctgcagttgcctrcctgccggacttgcagtgcggctttctccttgaggaggccccatcttccatgagcctctgcgtgtttggtgtctgccccagcccctactttctatgctttctttccagaatgccaaatcctagcctgggagctccttggattcctgaagagtgtccctttagcatttctgcctgccttgtcctcacttctccagggaatgttccagggattttgctcggctttaagctcctatgttgctctttgccctgcttgaagtgagctcccaggaggagttgccctgggctctgcagaggctgggaggggcaggaaagggaaacaggactgcctttcagcaagcccaagccttgccttcatgctacagcttcattattttgtttgacaaggattcccagaatagcgaacagctagacacacccatatttaaatgttaacaccaaagcgcattccaaacaagaaatcgaattgtatttctgttttgatgacttggataatccacacttgagcttttctctattcatgtggataatgaggagttggccaggctcagatctctgacaacatggctgtggaattgtgactaaatgtcctctgcctgatccctctctagtttgtaatcattcttagtttttctccactgaaaagaccacattctccttaaatggctggaatggcagagttgttgcttctcccccaggtgtggggcttgacgcttccaagagctgagccttgtcgaggaaaaggctcaagtgacagatgtgstgaagtgcctttgtgtggaaagtggcgttaggtggctntgagtgytggtgacaggagagcaggtgcctcgaggtaggaggggaggcagacaggatgatagagcattgggcattgggtggaaggcacaaggcaggaaattgagacaaaaggaaggagtgagctccaaaggcaatccgatgtttgccaagtggctgcattgagccttctagccttgctagtggttgatgctttttgtacctttcctctaaatcgcatcaatccttgttaagcaactggagatattttggaaaaatccacaagaaagagaaaaaacagaaaagcaacatgaggtgaaaagtgctaggaaaaaaacaggggtctgatgagtctagtccagtaagtcagggctgctcaaagattaatgtggactgaagattggctctgacccccaaaactctccccttccatctcccttcccaactcatttcaaagaagaaagagggtttattgtcccggctgtcttgaactctcttgatgctctttggatgaaacagaatagatcatatgagcctgtgcagcatagtaaggcaggatgcgactttctgccgttattgccgttggacatgcatggatgtttatctgtatggctgtatgtgtgtatgtagacagatgtgtgtatgcctgcataagaaatcacctttccagaggctcaatcctgttaattcatctagctgtcctggataacttaaaatatattttcttaataatgtcaaaactaatcttccaattccacttaaaagtcaatagcattgctgggtgtgatggctcatacttgtaatcccggcactttgggaggctgaggtgggcagatcacttgaggtcaggggttcgagaccagcctggccaacatggtgaaaccccatctctattaraaatacaaaaattagccgggcatggttgcgcacggctgtaatctcagctactcgggaggctgaggtacaagaattgctcgaactcgggaggtagaggttgcagtgagctgagatcgcaccactgcactccagcctgagtgatggagtgagactctgtgtccaaaaaaaaaaaaaaaaaggtaaaaaataaaataaaatacataaaaataaaaataaatagccagatgtggtggcacacatctgcggtcccagctagtcaggaggctgaggcaagaagattgcttatgcccaggaggtaaaggctgcagtgagccatgatcatgctactgcattccagcctgggtgacagagcaagaccttgtctcaaaaaaaaaaaaaaaaaaaaaaaaaaaggcaagagtgttagatcaagtatacaacaattttggctgatatgaaacacatgcacagcactcaaaagataaagctaaacctcttcarattgcacaggtatttatcaacctgagagacagcatttttggcatctagctttrttcagtaratcctgttatttctctgttattaaggaagagatcattttaaaggtagccatgatgtgagtctaagtgttggaagcgcaacctaaataaatgaaatgacagtttagcccccaatatcttttaaaccaatagttccatcttcttctccttgtaaacttactgctgaaactaatgaaaagtagaagaattgactaatttggctgtgcttttccttcccttccccatcagtgtctgatggagatgctataattagcaatgtaatgagaattgaagggtaaacaagaagaattattcccagaacacayatcaagggttagaagactggaacaggaaaaccagcmtgagatgaaaatattttctctgcccaaccaacgggcatctatacctagagttctatatacagatctttctaggcaaagacaagggaaagagtggtggtcacattgctttcaggaaactggtttatgcctagaytcttaacacctgttgctttgcaaaactagtgtgaaggattggttctctgtttatctgggattcaactgagcagaactcccaaatattaaatctgtatttttctgcacttaacttgtaaagataaataattggcaaatatgcttctattggaaacttatttttaaaaaaattagaatagttttaaaagatttagaggtagaaggctctttgcatacctaatgttagttcagtcgtcttcattttattcatgaagagaatgacactgagagaggtcacatcatttgttctaaatgtcggattaaagccaagattcctgagatccagcctagtactttttccagggaattcagtggacaaggaaacattattctgcctatatcagcaatactttatgataagaactgttcttcrtgaagagcctgacttcatgaagagagcctgtctaactcctgaagtgcttctgaatgttttactttttctccctaatctatttgttttttttaaaaaagtaactcttttttctgagctagctggaatattcatacctgacaccccatctcccaaccatcgaggatgaatggagattccctytacatgctccccactctcagcattgacatcatatgacttggttgatctgttcttrgsagaaaccaacttgtcccttcaaagccagctcagaaggcaggatgtcttaggtccaggctatcaggatgtaccattgctcttccttttcactgtgttttaggtaaagtccacctcaagtaaaatttgtctaagcctttactttataactcctcgattgttactttttttttttttcttttgagacggagtcttgctctgtctcccaggctggagtgcagtggcgtgatctcggctcactgcaagctccgcctcccaggttcacgccattctcctgcctcagcctcccgagtagctgggactacaggtgcccaccaccatgcccagctaatttttttgtattttcagtagaaacggggtttcactgtgttagccaggatggtctcgatctcctgacctcgtgattcacccgcctcggcctcccaaagtgctgggattacaggcatgagccacggcgcctggccctcgattgttacttctgatggtattcttatgcttgcttggtttatgccaatatgagaaaataaaattttcaaatggttcacatgtgtcaatgattacttacgtacagggtgatagctatttttgttcttggtgatgaagcaaatgtttcagaaacccgactgagcttatataagaatcctgttaccagaatgcaactgttattaaaaatacagaaataatcagaatcactggagttaactctttctataattacagacaaggataaggaataaccctattgcctgcacacaagtagcctaaccaagtgttcttgagggttttcttgtttttgtgttttgagacagggtctcacaactgtcacctacccaggcttgaatgcagtggcacgatcatagctcactgcagccttgacctcttggactcaagcagttgtcttgcctcagcctcccgagaagctgggaccacaggcgtgcaccactacgcctggctaattttaattttttgtagagataggggtctactatgttacccaggctggtctcgaactcttgggcttaagcgatcctcccgccttagcctcccaaagtgctggggttacaggcaggagtcgccatgcccaatgaacatctttatttctaaagtacgatttttcatatttctttgattgtggattttctcccctgactgctgcaaagcagaaaaagaaagaaaaagaaaaaagatttgcgaagttaacattcatacattaacaactgccgcaaaccctcttggtgttctgcaaatgagacttctagtgtgaaatcattaattgtgaaccgaatttttttgtctttcagaacaaggcaaaggcaatctgcatgtaacatcaccagaagatgcagaatgccgcagaaccaaggaacgcctttctaatggaaacagtcgtggttcagtttccaagtcttcccgcaatatcccaaggagacacaccctaggggggccccgaagttccaaggaaatactgggaatgcaaacatctgagatggatcggaagagagaagcgttcctagaacatctgaagcagaagtacccccaccacgcctctgcaatcatgggtcaccaagagaggctgagagaccaggtacgaatatgctctcatttctccttgtgtagctcgctctctaatgaacatcgaggaaagcaaacttactttctttgtaaaaggtaaaggatagcttagtggactgtgcatactatttagttgttctggatttctttggggccttgggaggaggaagccgggtgtagaaaacttctgcctgcaagctcagtcttctttgccaatacagcaagagaacaggaggccaggccagagaggaagggcctagagagtatgcagttccccaaaagagtgttcccatgttcaaccacaaacacatctaaacacatctaaagtgcagggaatgaaggggtattatctactgaggaaagcatggcaccaactaccgtgtaccctgaaagcacggagtgcttagcactgtgaatgaatgaagtaatgaatgaatgaatacacaaatacataaatgtattttcagggtaaaatagatcttacagatacagacttgtggtaactccttttccttaaaaagctgacattagggttttgtttctgctcttcttttttttttttttttttttttttttgagatggagtcttgctctgtcgcccaggctagagtgcagtggtgcgatcttggttcactgcaagctytgcctcccgggttcacaccattctcctgcctcagcctcctgagtagctgggactacaggcactggccaccatgcccggctaattttttgtatttttagtagagacggtgtttcatcgtgttacccaggatggtctcgatctcctgatctcgtgatccgcccacctcagcctcccaaagtgctgggattacaggcgtaagccactgcaccccggcctttttttttttttttttttttttggagatgggttattgctgtattacccaggctggagtgcagtagtgccatcatagctcactgcagcctagaaatcctgcactcaagatcctctcatctcagcctcctgactagctaggactacagacatgcagcaccatgcctggctcattttttatttttggtagtagagacggggtctttctctattgaccaggttggtcttgaactcctggcctcaagtgatcctcctgcytctgtctcccaaagtactagaattacaggcatgaaccactgtgcctggcatttttttcttttgaatcacagatgtgctccttctgcatgcgttgctttgkgctagctttctgtcttcacctacctgtttcctctggttattttgacagtcatatagacattacccaactgtggctagggatgtttttgtttcttggctgtgtgcaattacttttagcagatagagcaagtttggggtcacaggagatttgaggcctcctctaccgacctcactggcgagttaccagattgacctttgtgtatggagaatgtagggaaggaagcagaaagcacttaaccatatatgtgacgggtgggggtgggaaggagggcaggatgatattgatttccacacaagggaggaaagctcagtgttttaagtctgctgtcttcccagttaggtgcaaaaattatgtctaactcactcagcctttgattatccatggaaatggagattggcatcagcccgaataattgaaatctatactttattctcaatctcatattcttccttaaattcaatcttctcttctagagaatcattatctgagtggctaaaaatgtgaaacgtgctttatggacttcatgtttgctttttgttcacacttccaacagtcagtaaacccagaagaggagaaaagaaaaagaatcctggttgctataaggatgggctaatgattaattctttgataattttaaaaagactctgggcacagtggttcatgcctgtaatcccaacactttgggaagccaaggctagaggatcagttgaggccaggagcttgagaccagctgggtaacatagcgagaccccatctcaacaaaaaaatttaaaaaaattaactgggtgtggtggcacacacctgtagtcccagcttctcaggagactgaggtgggaagatcactgaagccccaaaatgagaccccgtctctaaaacaaaagtatcaattttgctgagaaatatagaaattggcctgtcaaaaatggtatatttttccatgtcaaaaataatgattattgttactcttcttatttgtagtgttataattattgttattgctgtaataatggtggctttggttaaaacaattacaagggaagcctaattataattaaggttgaaaggagtaatgaatatattttggtgttctcaagctctgatctgctgttacatacattgctagytctgccatggctggccagctgtcccttctctgataatgagggatgaacaagtcacattctatctttctgcctcttttgtactcgaagctgaccatccaaaaggagagagtttttaatgcatgaatctatgtatacatttttattctcttattaacaggaaaggggtcctgatccagaccccaagagagggttcttgggtctcgcacaagaaagaattcagggtgagttcataaagtgaaagcaagaattttgtttgtttgtttttgtttttgttttttgagatggagtctcgctctgttgcccaggctggagtacagtggcgcaatcttggctcactgcaacctccactcacttcaacctccacctctcaggttcaagtaattctcttgcctcagccccccagtagctgagattacaagtatgcaccaccacacccagctaatttttgtagttttagtagagacggtgttttaccatgttggccaggctggtctcgaactcctgacctcaggcgatccacctacctcggcctcccaaagtgctgggatcacaggtgtgagcccccatgctgacaaaaggaagtttattagcaaagtaaagaaataaaagaatggctactccatagagcagccctgagggctgctggttgcccatttttatggttatttcttgatgatatgctaaacaaggggtggattattcatgcctcccctttttagaccatataggataatttcctgacgttgccatggcatttgtaaactgtcatggcagtggtgggagtgtagcagtgaggaccaccagaggtcactcttgtggccatgttggtttggtaggttttggctggygtctttactgtgacctgttttatcagtagggtctttatgatctgtatcttgtgatgacctcctatctcaccctgtgacttagaatgtcttaaccgtctgggaatgcagcccagtaggtctcagcctcattttacctagctcctatttaagatggagttgctctggttcaaacgcccctaacactgtcattgcccttctgcaagcaaaccccaaccagcattgtaaacaccagagatcggtgtagacatggcctatgaaattgctgcagacatcatctcatcttctgtcttttccactctttttctcctaccacccatttcctctttcctgtcttcctctctgcaatgccatttgttcctcctggaccttctcagtatggactatcccaggcttcctttgcaggaagattacacagccagctgtgagaaggaagtcagataacacacatctgatgctctcctccagatactgaggctcttaataccagatgctcttctggcagctgtttttctggcttcctctcagagaagtatccttgataagaagagagccaatcagcaagatagagaataagatgttgaaagtgatgtatctgccgtctaacatgaaatctcttaaaatctaggttcttttttttttttttttttggaagacagggtcttgctctgttgcccaggctagagtgcagtggcatgatcatggctcactgcagcctcaacctccgcggctcaagcaatcctcccaccccagcacccaccacccaccccgcccacccccagataactgggagtccaggagtgcttcatcatacccgactgaaaatctaggttctaatttcctgctattaaacataagaagaatgagagcatgccttatgtttccaaatctgacttcaaacactggaagattcacggttgcaaaacttctgtttgtctttaaaaaatatgttggtcaagagttttctttagtctaaaattattgaaaggctaagaggtcaccttaactcccttytacagtcttcaaaaaatgcgggtggcccttattgcaacataatgctgatctgcataatagtagctgtgatcgttaaggactcttatcagcataaccttagttgtgcagggcagtcaggctgtacagcctcattgcctggcagctaagggcttggtttggatgcaggtgggactcatcaggatccagccttcacaatatgctaattctrtgatttgggctaatagcttaatctttctttcttttttctttcttttttttttgagacagagtctcactctttcagtcacccaggctggagtgcagtggtgcaatcttggctcactgcaacctccacctcctgggttaagccattcttgtgcctcaagcctcccgagtagctgggattacaggtgtgcaccaccatacaccatacccagccaatttttgtatttttagtagagatggggctagtctggaactcaagtgatctgcgtgcctcagcctcccaaagtgttgggattacaggtgtgagccactgcacccgaccttaatggcttaatctttctctgtttcagtttcctcgtttgtcaaaggaaaatagtatctacatcatggagcactgagaaayacaacgatggaatcttttactgtttcactggcagcttttagcgtgataatattctggtttttagtgtcccaaagaagagtctcagaggctcttatttttaaattagtacttaaaatcatttgacttttttttttttttttttttgagatggagtctcactctgtcacccaggctggagtgcagtggcgcagtctcggcttactgcaagctccgcctcccaggttcacgccattctcctgcctcagcctcccgagtagctgggactacaggcgcccaccaccacgcctagctaatattttgtatttttagtagagacggggttcactgtgttagccaggatggtctcgatctcctgacattgtgatctgcccgccttggcctcccaaagtgctgggattacaggcgtgagccaccatgcctggcccaatcatttgacttttttattttttcaagacaagatctcactcttgtttagagtgcagtggcgtgatcacagctcactgcagccttgaactcctgggctcaagtgatcctctcaccttagcctcctgagtagcaactacaggcacacgtcaccacttctggccagttttaaaaattatttgtagggacagggtcttgctgtgttgcccagaytggtcttcaaagcctggcctcaagcgatcctctcgctttgacctcctaaagtgctgggatcatgagccactgcacctggcctcacttgacttttttgtcaacaaatatttgagcacctgaagaggttaattttttccattgttaaagaataactttattacatttctgaaactggtatttttctttcattcagtgcttagtattcatatttcttttatttatttatcccatatatatttatttggcacctaccatggtaaaggtatttgagaagaatgcaaaccattggacttaaccctgtcttcaattcagtaaaagaaataggcattcacatataaagaatagtctttccagatccagcccagatggcatgccttctgagatggtcataacattgcagtactgcagtacttacattgtagcatctaatcaggttgcattacatatattttttacatttctttttctcacctagaataatcttctggaggtagaaaccttgtcttaccacccatttcttctttcgcctctgtaaactcagcatttaaaggaatacacaacctagattaggctagatccaaaatttctgttgcgtgaaggaatgagccactatttctaatacagttagaatgtgatagatggtacagatagagaggggtacagagccacagaattcaatgattgattgcagtttgagcagtcagaaagaagagatttcttaactaagaagttaggaatggctaagtaattttcccctaagttaagaagtcaacatttgaaccagggccagaatttcctgtcctcagaggaggtctccaggaaaaaaaaaaagaatttccagtttatggtcttttcattcattatgggcctatggaccttggttttcttaaaggttttcttccacctctaatttttccaaagtttgttgacatcatgtacatcacattgggtcaagcaatagagccatagacatgacttccattgccgtttctttaaaaaggcaaatctgactgggtgcrgtggctcacgcctgcagtcccaacactttgggaggctaaggcgggcagatcacgaggtcaggagatcgagaccatcctggctaacacggtgaaaccccgtctctactaaaaaaaaaaaaatacaaaaatacagaaaattagctgggcatggaggcacacgcctgtagtcccagctactctggaggctgaggtgggagaattgcttgaacccaggaggcagaggttgcagtgagccaagatcgcaccactgcactccagcctgggtgacagagcgagactccatctcaaaaaaaaaataataataataaataaataaaggcaaatcttactccattccagagcatattaaataaccaataaccatagaaaatagattcctatctgtattttatataaaaagaaagttgcttcttttaaaaactctgagttcagaaagatctgtagtccagcaatccctcacagttgtggtcactgtgtaactgcacagtttggaaatgctattttttatgtcttcattaatgaatagatgttgatggcttcttacttgcagaaaccaactttccactcctagtctcagaaaccattctgaaattaatttttcaatctttactcccagttattcacagaatttctacctaacttacttggtatatagaatctactctgtggtttcagttagtctatgtggattcttttatctgatgtgctcagatcataaaagaaacgaataatacattttaacctaaaaatctgacatgtccaacaaagagtaagagagatataaagggattattattattattattattattattatcattattttgagacagagtctcgctctgtcacccaggctggagtgcaatggcgcgatcttttctcactgcaacctctgcctcctgggttcaagcgattctcctgcctcagcctcccaagtagctgggattacaggggtccgccaccacacccagctaattttttgtatttttaatagagacagggtttcactatgttggccaggctgatctcraactcctgacctcagatggtccacctgcctcggcctcccaaagtgttgggattacaggtgtgagccaccgcacctggtcgggattattctttaacatgaacattacagggggcaaaaataaggagataagaaaatgaacaccaatatgagcactttttttttcttttttttgagtcagagtcttgctctgttgcccaggctggagtgcagtggcgcaatcttggctcactgcaagctctgcctcctgggttcaggccattctcctgcctcagcctcccaagtagctgggactacaggcgcccgccaccatgcccggctaattttttgtatttttagtagagacggggtttcaccrtgttagtcaggatggtctcgagctcctggcctcatgatccacccacctcggcctcccaaagtgctgggattacaggcgtgagccactgcrcccggccaatatgagcatttgaaacagggtcagtgaggccaagaggtcattcttctggtttctcccatcagaccagggctttgctgctgtctgagtgcccctcaggcttccttagggtcccctcctcaaccatcccctcctttgaatgtgtttgtgtaaaaactgctctggagaccaggagagctggctcacacctataatctcaacacctagggaggctgaggtggatcacttaagtacaggaatttgagaccagcctgggcaacatgggaaagcccctactctacaaaaaatacaaaaattagatgggcatgatgactcgtgccagttggggggctgaggtgggaggatcaattgagcctgggagatcaaggctgcagtgagctgtgattgtaccactgcacttcaccctgggcagcagaacgagaccccttcttaaaacaacaacaacaaaaaatcaaatataggttatcataagaaagctgcaaagagaagtatgtcttaaagctgatgtagtaatcaggattgtctattaggttggcgcccccgccccccaccccacgccccaccgacacccccccaccaccccccacccccgccccccaccccgcgcccccccgccccccacccccaccacccccccaaaccacccccacccaacaacacacctcccacacacaccaccccgaccccgcccagagcccgcacgagcaccaccgcgacggccgcccaacagccccgcaggcgcggcgcacgtaccgccgcaccgacacggacccgcacgccgcccgacacgaggccgctgccgccccgtaccgcagccgcacgcccgggagctcggtgcgccagcgccggcgacgccatgcccccaactctccctctccccctagctgcattacctatgcttcttgctccgtcccatttcttctatcagctaccacccttgctgcttgctctcacctatcctttccacctcttctcgctatcctcccccttccttagtcacttctcatccctcattctcttctcctttctctacttatctcctcccttccttttttctcgctctttcctcctgtctcnnnnnnnnnnnnnnnnnnnnggataggataaagatagtgtgaggaagtaagtaggattgagtgttgttagagggagggtggtgaagagatgtgggggtaggggttgtagatggggggagtaaatgtagtaggaggagggtaggtggacggtagagatgtaagtagagatatataggtatttgtgaggggtgctagaagatagggtgggttggggattgatgtatttgataaaggatagtaggggaggtgttagtcttagagatgagtaagggagtagagtataatagtgttgataaagagctatgaggtagataaatacagaatagtagtagagggagtgtgggatggtgatggtggtggagtgttagttggattgtgagtgaggttatggtgttggatgtgaggtgtgtggtctagtgaagggtggtgtaatggagatagtgtgatttgttgtgtgtaggtaagttatattgttgtggccaacctaaataggttatgctacttaacaaattaaccctgtgatttattaatatttgtggtattttctgatatgacagagaaacattttatttcttacacacacaaatcttattctcacaatgacttaggaattctggctacttccctcttgcgatcatgccatctcaacacatggattccaggtcaccatgacagagagagacagagctgatgggttgtatacacgctcttaaatatattggcctggaagtggcatatgtcacttcacttcatagtagcttcttggttctagtacccactgggatatttgttgtattcaggttttggctgtggaatctagcttaagactaaaatcttcctgctctagtttgtttcatcagctctcccaatgtaattgattattttatcaattttgttatacctagcactttatctgtacaatgacgtcattggcattttyacagaatataaacatattaacagatattcctatctgtaagtaatggcatctatgtctttgtgacttatttttgatgaatttaattgtatcaaatcaaattgcagaactccagcatggactatgctgtatgctgtagatctcagggagtcagtttatacctcagggaataaacgtactaccctctgttatgtgtgaaaaactccaaattcattagatatgcatctgtcatatttgtcttggctctgatctatatctgtctattcaaaatttacrtacatgcatctatatttatgaaggtacctkccagtgaaggctgaaaagtaaggctaattgaaattaagacacatgtatactatacactgttcagtaagtcgcagcctttggccacrgtgaaggtctggatacaaggctaatgttgtagaaagtgtatgttttgaaaaactaggcatgttttgtaaataaataaataagtaaaaagtttagaaatggaactagactcagctaagaatttcctcttcagagctattaatttattctaatccaatggcgaaatgatgggagaatagccacrtgtagtagaagcagctacttagttgtgtgaactaatgactgaatatgagtttacagagctgtttcttttttatttttattttgtttatttatttattcttttgagatagagtcttgcactgttacccaggctggagtgcaatggcacaatctcggctcactgcaacctccgcctcccgggttcaagcaagtctcctgcctcagcctcccaagtagctgggattacaggtgcccaccaccatgcctggctaatattttgtatttttagtagagacaasgtttcaccatattggccaggctggtctcaaactcctgaccttgtgatctacctgcctcccaaagtgctgggattacagtcatgagccactgtacccagcctcagagcagttttttacctaaacttttgggaggaaaggacataaattttttagcaattaagaaatctagtatactgtgtgcacagcaaataataatagcaccaaaatctcacaaatcaccggtgaagaacttactcatttaaccaaatactacctattcctcaaaaacgtatagaaataaaaaataaataaataaaatattaataagccacaataggaagagggaagaaatatccttatgcaaactatgaagaacacagagaaagccagtaacatgctcagtattttttttagcactgttttctcaacaaatatttataatggtggaaaagactgtaaggagaacgtattatttgccatcagctaaaattgctgtgctgtttctctttacatgtattacaggttgagtatcctttatctgaaatgcttgggaccagaaatatttcagatttcaatttttttggggggtggattttgaaatatctgcattatatacttactggttgagcatctctaatttgaaaatctgaaatccgaaatgctccaccatggcctttgagtgtcatgttggtacgcaaatatctcagattttggagcttttcagatattgaatttcaagattagggatgccgagcctgtagtgtagtccatcctctctacaactctgttgggtaggcactactatttgttttgttttttttttttttttttttttgagacagagtctcactctttcatccaggctggaatgcatcttggcaggtgcgatcttggctcacagcaatctctgcctcctgggttcaagcagttctcctgcctcagcctcccaagtacctgggattacaggtgcctgcaaccactcctggctaacttttgcatttttggctaacttttgcatttttagttgaaatgtggtttcaccatgttgcccaggctgatcttgaactcctggcctcaagtgatccacccaccttggcctcccaaagtgctgggattacaggtgtggggtaggcactactattaactatagttaacagaatgggaaactgaggcacaaagcagttcaggcttgtctgargagacacagcaagtaagtggcagcaccagtatttaaatccagttatcttcctgtgggagccttgctcttaaattctagatcagaccacctctctgatgggggatgaaacagaaagatgttctgaaatgctaaggaaaagaaagactggactggggaccagtctgcctcgtgtcagtaagtgtgaatgagatttaacgctcatcctgcaatggatgaagtgccagcgtcctggttggatttgcctttaataatttgaagaagaaaaggagtttggcactgaagaagcagtagtgtgcctgcctgtagtcccagctacttgggaggctgagctggggggatcatccatgcccagaggtcaaggctgctgtgagctgagcagtgatcgtaccactgcactccagcctgggtaacggagtgcgactctgtctcaaaaataaataagtaaataataaagaagcagttgcatacatagtggtgagtacgcagaaagtgaaaactgagaaaaaaccattttcagagcaagcactgcacgtgaaaggagtatggtgtcataacagaatcacaagtcatagctggagaatttacaatattgtatgtgcgagtgtatatttaatggaatactggaggcccgtgagcaaagaatatgataggatcgaatcagtagaaaaacatctcttgtcctcagagaaattccagataatgttagatatgtctaaggaaaatcaggatgtggtcaatgatcaggaacaatagtcatttacatttggatatgatgaaaaacaaaagtaaaaaagaaaaaaaatgaacagaaagaagagcctaagatctaagagagatgatgttcctcaagggatgagatgaaggagctagcttggatgtgatacctggaggactgatttatttttcactcttgggtttttttttttttttgagatggagtccggctctctcacccaggctggagtgcagtggcatgatctcggctcactgcaacctccacctccggggttcagccttctgcctcagcctcccatatagctgggactacaggcatgtgccaccacgcctgagtaatytttgtattcttagtagagatggggtttcaccacgttggccagggtggtctcaaactcctgacctcaagcaaattcacctgccctggattcccaaagtgttgggattacaggcgtgagccactgcacgtggccgaggactgacactttgagttgtgactcaaaggtcgttgaagtacatctcagaagatttggaccattacatagtaggacatcttgcggcagagactgaacaattgaaaagactaaattcaggggttgtagttttacttgcaaaattgacgtacagttgacgttaatcacccagaatgcagaaaaacagcaaaggaatcctaaatggggatcattcataacacatcgcttttgatccatgtttaattgggtgccaccaacctcagcattagctttcattttaattagtgacatggaagagcaagagaacatatcttgagaacagtgctatattaaggaaagctctgcaagaaatcaaaataagattctactagaaaacctgctaaggagtgcccgggggtaggtggggaagtatggaaaggcaagaaccgaagtctagctaggcagtgtcaggagacacctggaaagtggtagtcagctagaggaaattgccacaaaattagatggaaattttcagtgttgagggatctaaaaaagaccaatgtgattcagtccagtgcatagatgcagaactcatactgcaaatgtccaaattgtccttcctgtcttttcttgtcaaacttgagcctttgccatttattcattcttcctgcagttatgttcttggattaattcattcaaatgcttatttatttattagggatctacatttcgaggttggcattgaacattatataaaaagtacaaggccgggcacagtggctcattaatcccagcactttgggaggctgaggcaggtggattgccagagctcaggagcaacatggtaaaaccttatctctacwaaaaaaaaaaaaaaaaaaaaaaaaaagaataaagaaaaattagccaggcatagtggtgtacacctacagtcccagatacttaggaggctgagatgggaggatcatttgagcctgggaagtcaaggctgcagtgagtcatgatcattccaccatactccagcctgggtgacaaagcaagaccctgtctcaataaaataaagaaataaaaataaaaagtacaaaacccaacatctgccctctcttagtccatttgtgatgcttccactcatgaccaaaaggggagcctctgtttgcagagatcacattgtctgagaggatgcaagagtgttgaagaggtgccaggctctttttaacaaccagttctcatgggaactaataaagtgagaactcattcacccctaagggagagcattcatcccattcatgagggatccaccagcctccataactcaaacacctcccattaggccccttcaactttggggatcaaatttcaacatgagatttggaggggacaaatatccaaaccatagcatgcactgccaaagagatatctctttagtggaaacagtacaaacctttgggtatgatttgagtatgggatgatccaggaatatttaatttagtattgaatttgcaagtagttgaggctatcattactcatttataattttgttagatgtgatcagagagtgcaatctctaaaattcttacttttaaatttcgcttaaagattggtttacaaagtttttcttagaataaaatacacaatcagtattgcatagatattcatggacatttatctattctgtattctatgcacatacatacgcacacatatatattgggtttgttgattgtattattcatttcttctcagtctttattttttaaggttgttcacttctgagcaaagtataacaaagtctcccatatcattgtatttttatctttttctccctgcrttcctaagaatttgtttcacaggtttttagttatgatcacaccttctctataagttatgtctttaacattaccagatgacctcttcattctgtttagtgtctgttaactttttaaaaatattatctctcttgatttacatttgtttgcatctgtcaggtatgccttatcattcattttcaatgtttttgtattaatacaggttgagtatccctaatctgaaaatccaaaatgaaatgttcccaaatctgaaactttttgagcaccaacatgatgctcaaaggtcatgctcatggaagcatttcagattttggatttttggattagggatgctcaactggtagctatgtactgcaaatattctaaaatccaaaawaaaaaaaaaatytgaaacctgaaacacctctggtcccaagcattttggataacagttactcaacctgtaatgagcgtgtttattagaaactacatacatatatatcggccgggtgcggtggctcatgcctgtaatcccaacactttgggaggctaaggcaggcggatcacctgaggtcaggagttcgagaccagcctggccaatatggtgaaaccctgtctctactaaaaatgcaaaagttagctgggtgtggtgacgcatgcatatagtcccagctactcagagctgaggcagaattgcttgaacccaggaggcagaggttgcagtgagccgagatcatgccgctgcactccagcctgggtgacagagcaaaactgtctcaaaaaaaaaaaaaaaaaaaaaaaagaaactacatacaaaaaacttggctttgctttttcagcctaattcgttaagtctgtttttaatgggaaattccgtccactagcatttagtgtaacaactgatggacttaattatattcctccatcttaatttgacagcaagtactgtatgtctattcttcttctctcttaaatgtggctcmtgctatttaaatgcgaaacaatggcttgagtttaggtcttgacaagctgtatctgaaatgacagtggttgctccaagtgaaaatgactgttagacaattggagataaaataggactggaccctatgccaggaaacaagactagacagatacatgttggagggatcagctctattagtcacagttcttcagaatatcagagccaatagcagaattcctttttctttgggggacctcagtctttgcttctaaggtcttcaactgattaaatgaggtctactcacattatggtgggccatctgccttactccaagtctactgatttaaatgctaatcacacctaaaaaatacctttacagcaacatctacactggtgtttgaccgaacaactgggcaccataacctggccaagttgaaacatgaaattaaccatccccctctgcaccaacagttgacagaatgtgaatggataatttctaaaaacaagtaacaactacaatcaaacacagagccaaagatcaagggtttagcattagagaattaccacagttggggtccatgtttcattaaagaatccaagcattcttatcttttggtgatacttgtagtgtggtcttgacttacgaaatgtatatgtgttgttttmtacctttttcatgtttgacagtttttctttagaccagaacttcggattgcagctatttcttaagagttgctatttcattagccttatcaacatcctagagatctgtttgccctggggttttgagggctaagccctgagttgtaatgcattaactctgttctgtgcagtccttctaggactaaatacagcctgcagctaaatacatactgcttctccaaggctgctgctgtgctgatgtttctgtctgaactacccyagactccagtaccgtctgttaactccgtatctcggaggatctgcagaaggtccgcgttgaccctttgcaatccagtatgcactttcaggctcatctactaaataaatcctttcagcatggcttcgtttagttaggctcttagtatcccaattatgagcaattttattaaactaggagtatcagtgcctggtagttaagtacaggtgttttgggtttaaatctcgggtcagcctgagttcaaatctcagctccaacacttaatagccatgtaaacttactgtaattacctaacctctctaaagctcaatttctccatttgtaaaatgggaataatgattgttcttacatcatactattgctgtgaggcttaaatgagataagggttggttatttgaatgataaaaaaattgatattttgcttgaaagaaagtattccttttctacctgacaacttccaattcatatttcttttctcttttcttttccattctttttctttttctttttttcgacggcgttttgctcttgttgcccaggctggagtgcaatgggcagtctcggctcactggaatctccgcctcccagattcaagcaattgtcctgcctcagcctcccaagtagttgggaataaaggcatgtgccaccacactcagctaatttttttgtatttagtaggtttcaccatgttgggcaggctggtctcaaactcctggcctcaggtgatccaccctactcagcctcccaaagtgcttggattataggcgtgagccactgcgctaggctcatgtttcttaagaaacaaaaattcaggccataaatagttaagtctaacctctttccccagctgtttgtgttcttttatctttgtgagctttttcagtgaggagtttttttttttgttttttttttgaggcatgttcttactcagttgcccaagctggaattcaggggtgcaaacatagctcactgcagcctcaaccttctgggctcaggcgttcctctcacctcaacctcccaagtagctgggactagaggcacacaccagcacgccgggctaatttttgcactgtttgtagagacggggtattgctatgttgcccaagctggtctcaaactcctgggctcaaaagatcctgctacctcagcctcccaaagtgctaggattacaggcatgagccactgctcctggcccgttttctacctctgctataaaacaggtttgttgaagcgaattcaagacagagagtcttatttgctctccaagtcaatcataggtacccatgatgttgctaaatttagaaaaaatagctcatctacatgcatttattgagctctgatttgattagtatgatgctaaggttgccatcaggcaaatcacaatgtcattaaggcttagtgagatgtttttctcattcagggatggtaggaaaaatcgtcactggactggccacctctaatcaactcttggcatttctgcccagccttcgtgtgttgtccttattgctgggatccttgttgccaaacactttcccagctctaagttgttcaagatctctctgtcttgatcataataatgtcaatgctggttacaaatttttctcttgggtttacctctgcctgtccactgaggaaacggttaawggagttgctttcccatctgaattctttctggactctctccatttgcctttacattctgactcttctcgctctcttttccaagcctgaattcaataagcaaaagctgagatactgtaatttcctaaataacccaaagggaagatctggcataatttataaccactctgactgctgaatcaacttgcacttgctcttctctctaatggaactttgaagaataactgtaattgaatagtgcctccaccccatcttcagatttgacygaatcaagcctagatctggttatatctggtttttgtttgtttcatgttgtgtttgtgccccactgagtataaagcccaagtgtgggcttcatctggatgtattttcatctcacagagacattaattgaatctctgacaatagtcttgcctccgaggagtgctccaactctggctgcggtattaaaccaaggtagttcttggttgccttcaaaggtaacctcccatctgttgacagtgaactacggcaatgcaacgcttacagaatcattggaggagaggatccaaagcgtttacaattccctgctatgcaaagagtcattctgagtttttttaacctatgattgctctctgtaaatacctgggtgcacccagcaaggtgtagaggttaatgtttgctctctgacctttgaagacagatgcactgaatatgttgcagtttgcaatgggatccgtggcaagttaacagcagactgctccttcagctactgctgtttccaaaactctgcagtgtcacatcttgctcgcggctgcctcctcagaagtgcttctcagcttccattcagctccctgctgagttcctctgaagaactttgtactgtggcatatgacagcgacctgataacattatgataaactcctatgggtttgaactcagtcctattcaaattttctggtgcctagtggtcagcagtcttagacctggggagtaagaggtgtgtctgcagtgaatttagaggtgagaagaaagagggctggactcagatattgagtatcttagagcctacggaccatttcccaaagcctagaatagatttcagcgtaattctggtaatttacataaactaggatagacatgcaaaatatctggatatgttaggaaggagttaaaaagttctccacaccttttcctaccacctctgcagccatagaagccgaggggaaatgcacacacacacacacatacacactctggcagggaacctgttttgcaagttttgctggtaaaaagttctaggaagggggctggtggagaacagagtggaaaagaagtatcaattgaaggtttttcaagacctgagttttcaaggtaactttatcctgcagagagagacacgcatggccgctgtaggtttttcttccaccaattaagtgcattgttagacagggaggggcagattaacgaacgcctataattttgatcattgttttttgcaaaacagctcaggctttgaaaatgaagccatcgttcccggctaagtttctgccaacagcacaaattatactgtgcagagatccaaagcccctaagaaggtttcattaatgaacaatttcagacgattgtttaagtcttcgcctgacaggtaatgttggcatgtcggcaggtggggttagggtttccatggagatttatgatgtcatgcttgaaagagcatgtcaagacagccgatttaacaagtagctactcaaaaagtcctataggctacaagtaggttttatgcaaatgacgagagtttcactgggaaaaactgcaaaagaaaacagcccagacatggaggggggttttacctgacagctccgaaggaagaccctggagtccgttccagacaaaaacttccagaagaattagattttctgctttaactgccgcctcacctgtggagctctgggtacaggtaaatatgcggggtttttttcttccaagtttttgccaaaaattatttggaaacatttcgctctgtttctcggcattgttctcttggcaggaagaagtgaatcaataagcccagctttcccatagcaatgttcgtgctaaagggctgtttttaagggctttttttttttttttattgaatgaactgagatttttgaatagagctgaaaacaagcgatgcattrtgcgttctgctgattgtgcccggtgaatactgctataaaagtgccacagataagggttagatggacaatctgaaaattgagatgctccatgtatttcttatttattcccagatgtgtgtgtgtgtgtgtgtgtgtttgtgtgtgtgtgtgtgtgtgttcttttactcttacgacaaacctgaaattgagactatgggtagttttgtattttcacattgtaaaaatgccaaaaataaaatccatggaatgttgcagaaataatctttgaatcaggtttatgaacattgcacttttttaaaagtatgtatctgatgcttttctcaccgaggcatttttcccagactagaaaaaaacagtcctgatagagacatccagtttttgagcttttagggaagcaggatttctaaattccaagaagatagataaagacttcttggaggaaggtggggtgtgggtgataaaggtagtttttaaagcatggtttaaaagaaaatactggtcacttgggagtatgagggttttttttgtttgcttcggctgccagtgaggataagtaaacagtcttgccagccatttggatgtgatagcaatcactggatgcggctgtggatctgtgagttagctgaaaggggttagttcagaggcatcagttgccctgtgagtagttagttccaccaagcttaaaaagaacacaaagaaagcctattgtttcttccacacagtgcatggcagcgtgtgaggttaaagcggagttcagaatcatcgaaagatacctgtgaaatgggaatttggacttttgaaactaaaactacttaggrataagtggataggctttcaaaatgttttaagaactgcctcatgtgtgagaatgagacctcctgaaattttgcagttagataatgtggattaatgccagaactcacattcatattaaattgttaccacagttattgcaaaacagtgagtgacaaagaactgtgcctccaacatcggaagttctgggcgttgagttctggcttcaccacttagtggctgtataactagaggaaagtaaattcatgtccttaggcctcagtcatcatgtccataaaatgggatkccagtagctagctgtgttgtgaggattaaataacaaaacagacgtagcacagttctaagcattcatgttccaaatgttaatgattgtttttattgactgctgaaatggcattggatatttagaaagtgtttttatattctttacttcctcttatcattacaagtaatgactagcagtcaagtaaggctagtagtcttttttttttwaaaaaaaaaagacagggtctcactctgccacctaggctgaagtgcagtggcgcgatcttggctcactgcaacctctgcctcccggctaaagcaatcctcccacctcagcctcctgactactggtgcatgccactgtgccaggctaattttttgtatttttggtagagatggggtttcaccatgatgcccaggctggtctcaaactcctgggctcaagtgatctacccaccttggcctcccgaaatgctgggattacaggcttgagccactgcacccggccttggctagcagtctatttccactttacagatgcagaaactgtggctcagagagttactgggaaatacgacataataaactatcctatactgcctgcactttttctcattttaggaggcatagaaaaaaaatgaatgtgttattgaaataactcccagcagcagcaatgattctgtaaagtaattaaaatacaaaatgttaagtatgccaaaggagccagggtatttatatttttatattaattatgcttttgccacttttttctagacaggctacagaagtgatattaatttactttttactggtacctactgataggagctccagtactgcacagacttaaaattttaaattctacctgcctgaaatttttcttggccatacaagtagagtcggattttaatgttacaggtattttcggagtgagaacccaagtcaccaaggggctgtggttgctacagggtgcagaaggagcctaggagtcgaatatactgtcctttattccttctgtattctagacgttggcacttcctcccttgcctctatcccagacagaaacacagcccataattatatcctacatccattgtatgtaagagacaaatatgtttttcattgtgctatttttagccacagtgtttctagctggggaaaacactctcttcattccagggttttcttaacaatttttccagtttttccatgtcagactattcagaattattcaggttccacactcctgggagaaggctcttaatgaagtattgagtaggctcatcgagggggattctagagggattttggcatctgagctgctgagcctgaactcattctatgacagatgatgtctgtggtcccatgaattaggctgcattgaggactctcattcccagcactgtttgggggcactgggaaaaggttgagttaccttatcccaagggtagatctataaggagaaaagcaaatatttatttatttgttttaaatttctgcttttatttttagatataggaggtacatgtataggattgttgcatgggtatactggatccagataatgagcatagtacccaataggtagttttttaacccacatcccacctccatccccactctagtagtccccagtgtattttgttcccatgtttacatccatgtgtgctccatgtttagcccccacttgtaagtgagaacatgtggtattgggttttctatttctgcattaatttgctaggaaaatggtattcagctccatccatgttgctgccaaagaaatgatttcattcttttttatggctttatagaattccatggtgaacatgtaccacattttctttatccagtccaccattgacggacacctaggttgattccatgtctttgtggatagcacggwgatgaacatagaagtgcatgtgtcttctcggtataatgatctatattcccttgggtatatacccaataatggcattactgagtcaaatggtagttctgttttaagctctttgagaaatctccacactgccttccacggtggctgaactaatttcactcccaccagcaatgtataagcactccctttcctccacagcctcaccagcatgttattttttgactttttaataacaaccattctgaccggtgtgagatggtatctcattgtggttttgatttgcatatctctgatgattagtgacgtggagcattttttcatatgtttgttggcttcttgtatgtcttcttttcagaattgtctgtttatgtcttttgtccactttttaatggggttgttttttgcttgttgatttaagttctttacatattctggacattagacctttgttggatgcattctttgtgaatattttctcccattctgtaggttgtttgctctgttgatggtttcttttggtgtacagaagctcttcagtttaattaggtcccacttgacaatttttttattgttgcaattgaaagcaaatatttatttcattcaaagttttagtttcaaatatgaatcacaaagctgcaattttagggtagaaaagagttttgaactcaaacatggtgccaaaactccaaataggttttgagtcactgatgaaatgtttcttaaattttattttattttcttttagattcagggggtacatgtgcatgtttgtttcatgggtacattgcctactggtggggactgggcttctagtgcacccattattcaactagtgaacatcataacccataggtaatttttcaaccctcacccccttcccaccctccctccttttgcagtccccagggtccattatttccatctttatgttcatatataccaattgtttaactcccgcttaataagtgagaatatgcagtatttgttttttttgtttctgagctagttcacttaggataatggcctccagctccaaccatgttactacaaaagacgtgtttcattcttttttatggctgtgtagaatattcacatatatacaggaatatatatatatatatacacmtctatgaatgtgtagaatattcatatrtatgaatacatacgaatgaatayatatgtgtgtttgtgtgtatatataggactatatatacacatctatgaatgtatacaatattcatatatatgaatatataagaatgaatatatatgagtttgtgtatgtatatatacatatagatcctgttttagaagcccagtgaagctttttattacacttaattgtcgtagcgttcagagattatctttgatcaataagtagcgatcgcattgagcagagcactttacacctagtgggttttagcaaaggcttgtaaatcagatgggctgcgtgcagtgactgaagaagtctcctgcctggattcggatcctgccttcattacttgctcgtagcacaggctttccactgaagagcatatgaagttttgttcatattccaaataaaatagagcatctgaatttccaatgcctcttgataaaggaattagtggtctttaagtattacattattctctttgaatgtcatttttggaattttcacagaaatgatttcttcagaaagaaaggcactgaaaatttaactggaagttcctctcggctggctaccggggaggtagagagcagagagttctcctgggtgggagggatttctagaagctctttacagctgaggcccttttcatcgctatttattaatttgacttgatcagaagcaatccagttttgaaggtgtagtttctaaaatctctttatttcaaagaaagtcatcctgaagaatggtgtcatcccagatgaccttgctttttctcttcagatgtctggccacagaagggatcagcaggtagaatgggaaggctgttttcatccttgggcattaattgggcttccctcttttctttctttctttttttttttttttttttttgagacatgtcttactctgtcacccaggcgggagtgcagtggcgagatgtccgcttattgcaacctccgcctcccggattcaagtgattctcctgcctcagcctcccgagtagctgagattataggcatgtgctaccatgccctgctaatttttctaattttagtagagacagggttttgccgtgttacccaggctgatctcgaactcccggcctcaagtgatccgcctgcctcatcctctcaaagtgctgggatgacagacatgagccagtgcttccggccagcttatcctaacggcaggaagctttgatacttttacttcctgaccacagacttagtaggcagcaggaacagtcttcaactycctggttgtataattacaagagccaatgtgaaatattatgcatttggagaagcccttctctagagctcttatagaaaaggaatgtacagccaagtttatgggaagcatgaggatggtgagtccaaagtcaaggtaggtgatagcattggtggccccttgcagcrccgggagtctatatggyggtctaacttcgcaccccctatttgtcacttcatagcactcttcactttcactccgtttcacttgctcatgattaagcaacaaacgtggtaatggtgtttcctactctgagtttcactagatttagtaaacgcacatratcatgctggtcccgtcgaagtgacgataggagtcctcggagctgtggtctccgccctggctggttgcacctgctctgtgctctgctcagatcatacaagatggagagagcagagaccccatcagagagaggcttctgttggctgcagtgtgacactgtagacttgccagaaagggctctctttggacctactacttgccactcagaagcaaatgggctgcagcctcatacgtttttggartgaataagagaactaagattctgatggacccttggtgattttctctcttcaatattatgaatgttcatgaatgcccctcagaaggtcacagggatgtcagatctcattttctccccttccccttccccttccttttcctttccgagacaaggtctctctttatcactcaggctggagtgtagtggtacaatcatgtctcactgcagcctcaacctcccgggctcaagcaatcctcctgcctctgtctcccaagtagctgggactgcaggcatgtaccatcacaccaactaattttttttttttttcttttaggtagagccagggtctcactttgttacttaggctggtctcagactcctgggctcaaacaatcctcccactttagtctccccaaaagtttagatcaaaggtgtcaaccactgcacctggccaggtctcattttcatagcagtcactggtagtaaggtaaatgtgctgcagataatcgtttggcctgtgttttggagggacctttttgttttttaattgtctctttgaattttgcacaaagaagggttgcacgggctccgttcatctttaacttattatttgcatccttttttatgataagttttaagactactgaagaaagcagctccggtaaagagcctcacaaaggccaattttcaatttctcccttgtgggctgtgtgtgtgtttatgacggtcagaagaagacagactctcatttaaaactattctctcttcaaagcaattataaagtggccccatcatagataaacttgaccccttttaattgctggttagattgcttcttttttctctccctgttgtgaacaggactgcagtgaccatccttgtatctgtgcatgtgggaacgaatctgaaggacaaatttctagaatgtcaagttggattgctagttttggaaggtattgcccaaactttttctcaaaaacactcagtttattctgtcgatatgaatgttgcaggggatattatggtacrttcagagaatacagttcactacagtgatgccaatgtgtgaaatacacttgacatgtgggtaggaacacataaccaagttatatttagtaaacaatctaccgagcagtagagttaatatgatcccatttattattttattttctaacaattactagtgatactttagtttggttcttgcttttctaaactgttaaccgtgaacatgtaactatttaaaacttatgctgggtttgctgggtcatgtctgtaatcccatcttggaagccaaggcaggaggatcasttgaggccaggagtttgagaccagcctggccaacatggcgaaacccgatctctactaaaaatataaaaattagctgcacacggtggtgygcatctgcaattccagctacttaggaggctgaggcaggagaatcactggaacccgatggcggaggctgcagtgaacggagatcacaccactgcactccagcctaggtgacagagcaaggctctgtctcaaaaaaaaaaacaaccatatattattcattaaatgcatgttcatgcttacttaaccaacagtatggccctttggcttagtctcatagtctatctgacccttattttcttttcttttttttttttttcaaatgcccctttcattatgaaactcttttttaacttttaatttaagttcaggggtatgtgtgcagatttgttacataggtaaacttgtgtcatggggctttgttgtacagattgtttcatcacccaggtattattttattttcattttagttttttaaatttctttttagaggcggggtctcactgtgttttgcccaggctggtctcgaactcctcctggtctcaagcaatcctctcgcctctgcctccccaagtgttgggattataggcatgagctactgcactcagcccaccatttgttttaaaaagggtggatcctatttgtataaaaagccatgtgcattttctgtgtacttgtctacacattaatttccaggctgggcgtggtggctcacgcttgtaatcccagcactttgggaggccaaggggaggcagatcatgaggttaggagatcgaaaccatcctggctaacacggtgaaaccccgtctctactaaaaatacaaaaacaaaattagcagggtgttgtggcgggcrcctgtagtcccagctactcaggaggctgaggcaggagaatggcatgaacccgggaggtggagcttgcartgagctgagattgcgccactgccctccagcctggacaacagagtgaggctccgtcttaaaggaaaaaaatttctggaatgatgtccaataaatcagagagagggactagaagactaatgaggacagaagcttttattcttaacacctatattttgctaccatttatattgtcatcatatgcatataacattttaacatttaaaaactagtttaaacagaaatggttgccctggaatgtggcctgtgttctttcaagggaggccagcagtttctacagtggctgagatggtaccttcatctcacacacctacrcaggagtgcatttgtgctttgatgtggttgtcccttgaagaaggaagcagttctctttttcttttttcccttttccattataggatcagtcacttcttggggcattagtagtctcatttccagyggcatcttcccttggcaaaaggaatcccagataggacctcatctttctaaacaaatgctgttttgggtcctaaccatcccatgtttgstttgaatatgtttaagttgcctggaattatcaacaaaagaattaaatttattgtaggtcagggcatcttttgactcattgtataaaacattcactttaaatgtataccgaaatgtcctttaggccgggcgcagtggctcatgcctgtaatcccagcactttgggaggccaaggcaggtggatcacctgaggtcaggagttcaagaccagcctggccaacatggtgaaatcccgtctctactaaaaatataaaaattagccgggcatggtggcgggtgcctgtaatcccagctactagsggggctgagacaggagaatcgcttgaacttgggaggcggaggttrcagtgagccgagatcactccactgccctccagcctgggcaacaaagcaagactccwtytcaaaaaaaaaaaaaaaaaaaaaaaaaaatgtccytcatacctaaaccttacctcttgctaatttgctgagggttcattttagataaaaggtgtttaggttttcatattatgtttgtaactgtatagctatgattcagtttcctaaatgaaaaaagaaactgttttaatgtacagactatttagatttgaaaagactgtgagagctttttcttttatagcaagacaagtcaagaatagaaggcacactgcgagagggatgtcttttgaaagaaaagaaacactactttttatattctcaaatcactgaagaaagctttagacataatttcaaacactagctcctgtttaattcagatgcacagaatgcattaaaaccacgagtgtagtggacgtgatttatacattctcttagcacaaatcagtacctatcttcactgtaattagacttttcttcctttctccttctcaaaagctacttttgaaaccttatgttttccctggacatattttctgtacttcataaaatagctcagttctgcaactaactgcaaatatttgcaaaagggaacaaatgtaaaataaacgtcccctaatgcagtgtttggtgaagaaacatatgtctgacattagttggttaacctgaaaaatagtaagaaacaactctacttaggggaaagggggtagaattgagcccgtactgtgcaaatcaagagaaagctataatttacgcaatttttattaaagagaatacaagtgctgtaggcttggggtggtgctaggtcatatttaagcctaattgagctttttctatatcattagaaaaatgggccaagtttcctatattatagggtaaatacaacattttcttcctgcaaatattaaataccactggctttttaagacgtaaacatccaaatctcaaatgtctttattcatgccaatgcaatacaataaaaatattccccatatacacttaaatcactgcaagtaagccttagaatccccacaagtattattacttactatatctcagaaactttcacacacattatttcaaatatagttctcccaaaaaaaccctgcggagagatacctgtaaaccaaggctgagactagcctagacagttsgttctttagacaacaggagtggagatttgaacccagctattgtgactcaagcaagcctagggcatgtttctgagatctctaaggtgtgcgctgtgaaaccggtggctcattttatgggttggatttccaaacacgactatcacaatcatgccaggaatcaatgactgacttcttgcctccgtggcctgaagttctcctctgcacctcctacctttttgccatttcagtgatgcaccaaagggtggagttgaagaacatcagttttgctgctgcttgttggcaatactctcaaaaaggcgtggggagggagagrtgtaactcacccctgaagtcaagcctggagattacttgtcaggaatgtcaaaagcatttgttaagcaaccttcttcctggcattttaagaagaaagccgcatacatagatcaaatcccttccttcagaaacctgtactctctgaacagagccttggaattcagcctagagaaagaatacttggtggttcatagaacttggttcacaaaagagtgcttgctgcccacgcattttgcacaatgactcccaaacacacagaatgcacattggcaacaattttacgcgtgtttccaaaagtgctgactggaattgaagggacacatttggcactttttttttttgaaatggggtctctctctgtcacccaggctggagtgcagtggcgcaatctcggctcactgcaacctccacctcccaggttcaagcgattctcctgcttcagcctctggagtaactgggactacatgtgcctgccaccacgccttgctaatttttttttttttttttttttgtagagacagggtttcaccagtnnnnnnnnnnnnnnnnnnnnnnnnnnnnnnnnnnnnnnnnnnnnnnnnnnnnnnnnnnnnnnnnnnnnnnnnnnnnnnnnnnnnnnnnnnnnnnnnnnnnnnnnnnnnnnnnnnnnnnnnnnnnnnnnnnnnnnnnnnnnnnnnnnnnnnnnnnnnnnnnnnnnnnnnnnnnnnnnnnnnnnnnnnnnnnnnnnnnnnnnnnnnnnnnnnnnnnnnnnnnnnnnnnnnnnnnnnnnnnnnnnnnnnnnnnnnnnnnnnnnnnnnnnnnnnnnnnnnnnnnnnnnnnnnnnnnnnnnnnnnnnnnnnnnnnnnnnnnnnnnnnnnnnnnnnnnnnnnnnnnnnnnnnnnnnnnnnnnnnnnnnnnnnnnnnnnnnnnnnnnnnnnnnnnnnnnnnnnnnnnnnnnnnnnnnnnnnnnnnnnnnnnnnnnnnnnnnnnnnnnnnnnnnnnnnnnnnnnnnnnnnnnnnnnnnnnnnnnnnnnnnnnnnnnnnnnnnnnnnnnnnnnnnnnnnnnnnnnnnnnnnccgagatcacaccactgcactccagcctgggcgacagagtgagactatgtctcaaaaaaattaaattaaaattaaaattgagcctgatgtggtggcacatgcctgtagttccagctatgcaggaagttaagatgggaggatcccttgagcttgggagatcaaggctgcagtgagctgtgattgtaactactgcattctagcctaagaaacagaaagagacactgtctcaaaaaaaaaaaaaaaaaaaaaacaagaaaaaaaaagaaagaaaaaaacagatcagaggccctggcctggggtcagtttctccagaaaggcctgcacaatggagttttcatgtaaaaaatttcttacatcctgattttaaaaaatcagatgatcaggaaacattgagttccgattcctttgttacaacctccactaaagctaagtaacagctgctgtattaagatggggctccccctctccatcccacacctgcctcccttacatgcctaactcctgttgtaaatagggaccctaatctgatgtttttgtagtccctttcctannnnnnnnnnnnnnnnnnnnagtgcttgctgcccacgcattttgcacaatgactcccaaacacacagaatgcacattggcaacaattttacgcgtgtttccaaaagtgctgactggaattgaagggacacatttggcacttttttttttttgaaatggggtctctctctgtcacccaggctggagtgcagtggcgcaatctcggctcactgcaacctccacctcccaggttcaagcgattctcctgcttcagcctctggagtaactgggactacatgtgcctgccaccacgccttgctaatttttttttttttttttttttttttgagtagagacagggtttcaccatattggtcaggctggtcttgaactcctgacctcgtgatctgcccaccccccgcccctcggcctccaaaagtgctgggattacaggcgtgagccactgtgcctggccacatttgtcaactttcattggtcaatgattgatgcaagccagaataagaatagattgggccgggtgcagtggctcacacctgtaatcccagcacttaaggaggtcgagagagcagattgcttgagaccagcaatctgagatcagcctgagcaacacaggaagaccctgtcttcacagaaaaatgaaaaaaattaggccaggtgctatggctcacacctgyaatcacagcactttgggaggctgaggtgggtggatcacctgaggtcaggggtttgagaccagcctgggcaacatgatgaaacctgtgtctactaaaaatacaaaaaatagctgggtgtggtggtgcacccctgtaatcctagctactcaggaggctgaggcatgagaatcacttgaacccaggaggcggaggttgcagtgagccgagatcacaccactgcactccagcctgggcgacagagtgagactatgtctcaaaaaaattaaattaaaattaaaattgagcctgatgtggtggcacatgcctgtagttccagctatgcaggaagttaagatgggaggatcccttgagcttgggagatcaaggctgcagtgagctgtgattgtaactactgcattctagcctaagaaacagaaagagacactgtctcaaaaaaaaaaaaaaaaacaagaaaaaaaaagaaagaaaaaaacagatcagaggccctggcctggggtcagtttctccagaaaggcctgcacaatggagttttcatgtaaaaaatttcttacatcctgattttaaaaaatcagatgatcaggaaacattgagttccgattcctttgttacaacctccactaaagctaagtaacagctgctgtattaagatggggctccccctctccatcccacacctgcctcccttacatgcctaactcctgttgtaaatagggaccctaatctgatgtttttgtagtccctttcctaggggcactgtggggaggtggaaggaatttcacctttgttgttggacagacttagatttgagaactggttctactacttactgtttgtgtggtctgggacaagtcacttggtccaagtaagcttctgcatctgttaaaaaaaaaaaaaaaaaaaaaagkggcggggagctaagaattcctgcccagcaagttggtttgcagatcagaggcagtgtgtgagaagtacttaacccagcacctggcatatagtagatgttcaggacatygtagcarsaataagggagacatctcacaaaacattttgtgagaaaggatcagtttctatctagtcaatgtcttaaacattcataggttgttcatggtgggagctgctcgaggaatcatcctagttttatggaggaggaatctgaagctggaggaattgtctccttcaagattacttagttaaaggcaaacaggttcatagccagtggctcttcaccaacccacaaaaaggcctcagattataattttgaagattaagtatatgaaagtgctatttgagtgattaagtgtaagcatcagatcattttgaactggtgagatggctcacacctggaattccagcactttgggaggcccaagagggaggattgtttgagcccaggagttcaagaccaacctgggcaacattktgagagcctgtccctacaaaaaataaaaaaaaattagccaggcatgctggcacacacctgtggtcctagctactctagaagccgaggccaaaggattgcttgaggccagaaggttgagcctgaaatgagctctgattgcgccactgtgccacaagctgggcgacagcaagacactgtgtccaaaaaagaaagataattttgattagcacaaagatgggacagctacatgtgatcagatttggaaaaaaaaaataaccattcattcattcattcatttactcggcactgattgagtctagtttggacaggtattgccctagtctctgggatgacagcgagaggcaaaacacagacactcactgcctgcatagagctcagaatgtaatggtgggaaggcagaggaggaaacagatatacagataattttagatggagatacctgccatgaaggaagtagaggaaggccaggtgcagtggctcatgcttgtaatcccagcactttcccagcactttgggaggctgaggcagaaagatcgattgagcccrggagtttgagaccagcctgggtaatatagcgagaccccgcctctacaaataattaaaaaaaaaaaaagaaataggattacstgaaaaggagccagtcttgcaaacagccgggcaaagagtgagcaagagttttttgggaagaggtgcacacagcaagtgctgagacccagaggaaggaaggggcttgtctgctgaaggacccaggtgccctgggagaggtagccagaggcgcttagtaagcttcaatcaggattttaatcttaatatagtgctgagggttttaagcagaagagtgatagaagagagttagcttttgtgcaagcactattattcatggaagtcccctttcgatggggtagtggggactcctcactaagctgtccttctatctctgtggctgtctcagagaagcactgtggaactccagggtgctacgtagctcaccacggtgacccccaatgcaggccacttacagaagcttgaagatctgtgatttgctcacccaggctcccatgccgagtgttcttgtcattaactcaaaagccaaatgctgktatttctgttcttacttgcttgattgtttgtttaccagttctcaacatcttcagtgtccacttggttactaaaatgtttactccttagcccrgtgtgtaggcatgtgcctgtaatcccagctactcaggaggctgaggcagaagaatctcttgaacctgggaggtagagattgaagtgagccaagattgtgccactgcaatccagcctgggcaacacagcgggactctgtctccaaagaaaaaaaaaaaagaaaagraaagaaaaaattatccaggcatagtggtactcacctgtagtcccagctgctcgggaggttgaagcrggaggatcacctgagcccaggaggttgaggctgcagtgagccatgatcaggccactgcactccagcctgggtgacagagtgagactctgtctcaaaaagaatataaaaataataaaaataaaataaaatgtttcctcttgatcacaaaaaaaaggatatagttctatgcaatcatgtctgaaacaggataygtgtgtcatgcatccctgagttcgggttacctcaatgacatgaccatttacctaatctttgctttttcatctgctctcaattgaaaagaaagaaaccattaattatattgaaagatgctgacttgtaagcttctcccctctcctggctcaggtcagttgctcagaatgcacccagcaaagattggctgaacaaagacagggagatgttgtgagtcccactgatgcccttaacaccgggcattgttcaacttggggtcatttgtgaaaatgatgggaatgcaacttcctcactttacagatgagaaaacagcctcagagaaatgctgggatatgggatatgagttggtctcatagcctgtgagtgccagagccagctcgaatccaagtttctgactcacagtgactcttatccagcaggacgtattcttcagaggccatgtgttgaaaacagttaggtgggttgggggctgcaggccataccattaggaaatggggggcatgtcctctgggtggttcctaagcatttggatgttacagccctgcctttctttattctgttgttctagaagctccaacctggtatgcttttaaggcagatatgrccacaaatgaagcacattcacatgactgcactgcctttctggatgaaacaatttgaccaaacactggtgttgagacagttggtgatttgggctttgccacgtggtgggaatgacacaataaatatattttgatatgaattaggtaaagatctgtctctaaccttgggctatatgtgaacattaactgcccattggatactggggaactataaatgtctccgtccaactctgttcaactctaatttttttttttttttgagacggagtcttactctgtcacccaggctggagtgcaatgacgtaatcttggctcacagcaacctctgcctcctgggttcaagtgattctcctgcctcagcctcccaagtagctgggattacaggagcccgccaccatgcccagctaatttttgtattttttagtagacacagggtttcaccatgttggccaggctggtctcgaactcctgacctcaagccatccacctccctcggcttcccagagtgctgggattacaggcatgagccatgacacccggcctgtaattttctttaaagactgccactgggtggaacccactgggcccagtgagaactacggaaaagagacccattcttgccctcattgttagtgtccacatccggatttacctaaaccccacccaggtggcatttgcatagtaatgaaaaaccggtattttctagctgtgaatcacacttcaaatcctgagcggctgactgtcaggggtgcgtcaggcctgcttgctgggagaatggacgagctggttgtggagcgggcgggtcccgccacccgtgggctcagcactggactgctcccagaacattaaaggtctggctgatgttccatgccacatctggacatgaagacccatgtctgcccttctgtagaagggccaaagaagaaaggaggcatcacatgtttctgctgtggggggcccttccgagcagcagacaggagcaaggtacaggagtggcctgattctggggtttccctgccccccctggggtccctaaactgctgtgtgatatgtttctaactatctggacagctcacccaagagtcagttgttcccagtcgcttcttgctgaggataagccaaaagagggccgggggccaatctggtttctttcaagtgaaattatgcttctcaagcagagaatgattgcccacagcagttaaaccttgtttaatggtaattaaattgcttttcttcactttgaaaaatctcttaattttctgtacaaaggcaggaagcatttttctttgattctacaggatgtttctaagtatggtgtaatcagttcatcttaccttgccgggctctgaaagaatgagtgtgtgggatcagatttagaaatgcctcaaaggttagaaagccgagtgctgccgattaactcaagctcagatgaccaaaaaaaaaaaaaaaaaaaaaagctgcttttcccctcacttctccctctggttctgcctcagtactttgcttaggagtttctwaaagcaggcacagttgcctgcggggctggtgtgtgtcaccttcgcaaagtgcagatgaggtctggcatgtcccatcttgttcctgcctgactacaactctgcacacagacagtgttgatctggcttggagcccayagtggcaatccttggagtggaggcagcagagatctcagttcttcctagtgcttgagaagttaactaactgtctttcccatgaggaaaatgttttgagactgtagaagcagagaagagacttcgccaaagcccatagaaaataaaaagcaaaccctcaagcatgaaaatccctggccctrgagtaagtgcaggtgataaggcttgctatctgatgcctcattccatgtctctggcttccyattgcctaaattaagatgtcctgaaagaaaccttgggaaaaaaaaagcacagtccccacatttgaagtagaaatmgaatkaaggagaaattgtgattttcctgaaggaacagaaccaacactggttttcaaaagscttagttttacattttagtagaaactgttagcagtaggaggatttgctttgtgtgtgtgtgtgtctgtctgctttgccttattttggttctgaccataccactgctatctcagtcttagaggctgattttgtggcccagagtgtttcgttcagatatctttgtgttgaggtgatattgagccagcwgccaaagaaatgcatggccaagatatggaatatctggtcaacagagaataacaacaaagtgggacgcatcataaggtcataggtcagtgaaaacagctgctagccatttatatgcaggagagaaagaaggcccagggagttggaaagactgaaggtattttggactgagcagagcaaagggatttggggacatataaatgtatgaaacaagatggtcaggaaaacaatttttttcaaaggtagcatgaatagagtgaggtaaggaaacccatggccatggtactggtggcctaatgggaaaaggcagtgtaatgacttctacatggagacttcagttctgcccctcgtactgttgaagaatattctgtccagagaggctcttcagtttctacctggttttctaatggctttaaaaaactttggtgtattgggggaatggaaacaaagatatttactagagaagtgtttggcaaaaagtgccaagcttattcctgagaaaggatggaacggcgtggggggtggagggagggttggaaccatactccaaattcccctgaggcccacacgtgttcaccagacatctgtggggagcccggatgagatgtggggcccttcccctttctcattttcttttttacttttagatcctggatcaaaatgagtccttgattccctcatcccatcccaggacccttttttagttgcattaccacctagtgaagtctaccaagtcttgatttgagaatcaaaacaaactcagatcaaagtcaacctcagggaatcagagaacacagaagytgaaagatgtatccagccttccctaaatggcagatgaggacactgaggccaggaarctcaggtgacttatccaggagcgtgccagtacttagccaaagatctggaactgggactgatgcttcctgaaaacagattcctgcctggagtgcatgaccctgcttgagaaagtgcagagggacagtgacaagrcgggataacgtagcagtcccagcgacttgggcacccatcctgatgcttcccctaggccccagtgttttattttctggtaaggccagacctgagtcaggtcctgcctcctaactcctttctcttccttcagtgggcaacaaagatggccacagaagcagagaggggttcctcccaggtayatatttaccagtacttgtaccttgcgcttttaaaaactctttagccagggatagtggtgcatacctataatcccagctacttgggaggctgaggtgggaggatcacttgagcccaagaggtcaaggctgccgtgagccgtgattatatcattgcattccagcctgggtggcagaatgagaccctgtcccctcaaaaaacctaactctgatgaggactatattacaagtgttatataccagattctggatggagaagggaaagtgattgtagacaagagaatattatacttggttgctgtgttctccaaacccaaacgcatagatacacacagacccacagacacacacacacagacatgagcgggacatatttgaaatcctcactggttttgaaaatctgaggctaatagttggaggaagtgaggggtgactgtgagagaacaaatgtgtaacagatacaccctgagaatcagggctcataaataaggagtagagtctattgcacctaagccttactactagcctaagccttcatactagagcaaaaccgtgggcagacagcacacaaaagcagcccctgtcactcaggggcttacttcttttttttttttttttctttttttgagacggagtctcgctctgtcacccaggctggagtgcagtggcgcgatctcggctcattgcaagctccacctcccgggttcacgccattctcctgcctcaccctctcaagtagctggcactacaggcgcccgccaccaagcccggctaattttttgtattttttagtagagacggggtttcaccgtgttagccaggatggtctcgatctcctgacctcgtgatccgcccgcctrggcctcccraagtgctgggattacaggcgtgagccaccgcrccyggccggcttacatcttaatgagcccacagctgcctgttgacctggtgtcatcacgagggtgatcactatttccagcaagctctttgtccctcaaagcccagggatcaggggcagcccgtggaagacgagccactggttccagcgaggcacaaggagagaggttaagctgcttctaccctgttcaactgtgatgagattccagygaaaatcagcattgagggcctcaggtgtttgcagggggctctggtatgttagaaaaactagagggaggggtctgcctttgtgtctgtttgtgagcgtgtctactcaagtaggaaaggggagcacagatttttacaaaatagatgtgggcggtttcttgtagtcttgcctaactgaaaccatgtttgccagagattacttggaattaccctaataggtgctttgtcaaaatacttggtgctggccagatgtggttcatatacctgtaacttcagtgctttgggaggctgagacaggaggattgcttgcggccaggagtgcaaaaccagcctaggcaacatagtgagaccctgtctttacaaaaacaacaacaaaattacctggctgtggtggtatgtgcttgtggtccccactactccagaggctaaggtgggaggattgcttaagccctggtggttgcagatgcgatgagctatgattgcatcactgcagtccagccagggcaacagagcaaaatcttgtgtctaaaaaagaaagcaatacttgacggtgaaagcgagtcctgctcaggggtcccttctggaaagtcctggagcctggaactgaactccgtgattcccctgtgccttccccctgggagcctgagcccccttgaaggtgacagacacgggggaacctgtgtcctgtgggatcactcctytcagtccttctctaccacatagagaaagggatggatggcaaagtaaagccaacaaacctccacttccttcctcctccccactgccagagtggagattcttctttattctgtggaactggattctgaaatgccaaaccattccatctgttgtgttttggcacaagtgctcaaaagagctcaggtgtctccctttgcaatttccccatggcttaaaattcagtcctggagatctgtctcttgtaggaaatggaggggctttccttatgcttgtttttctctgtaaagaagcataaaggtttaagttttcgttgggagggcctaaattaggaaggaaagattatttaaatcaaagcactctcattgtagagtcataagcttggattttgtgtgcatgccatgctagctcaaaaaacaaagttgagagtcagagctctttgaaggatgaggaaggggacccgggaatgagtggctctgcttcaggaagcatgttttaatgtgtgttcctaaaaaagcctctggaaaagtggtttaggaagcttctgggctaggagagacaccatgaaaaacaaaacacaaagtatgtgagtcagttatgatcaattgtgccataatcgacatttcagttgtatagtagttacactatgaaaagcacagacatatttaaaaagacaattttgaggccaggcatggtggctcatgcctgtaatcctagcactttgggaggctgagtcagaaggatcaattgagtccagaagctcgagacgatcctgggcaactttgtgagacctcatctctacaaaaaaaaaaaaaaaaaaaagccaagtatgctggcacatcccagctccttgggaagctgaggcgggaggatcacttgagcccaggagttcgaggctgcagtgagctatgattgagccactgcmctccagcctgggcaacagaatgagatcatctcttaaaaaaaaaaggagaaagataattttgagattcaacatagcccactaacagcttcatttagacatcataccttttgtctagacttgacagaatttgttaaatactggaaagttgtattttttatcttgtttcccctgttctgtctgtgaatagagacgtttgttctttacctagtttataggactgtcatgaggaaaggtgacataataatgggttcacagtattggaagggggaggacaaaatgcctgtttacaagagacccagttacagagctatgtgaagtaaatactgaatgtcaattctaggtaacgatcctcaatgtcacaggtacttcacgtattaatacctctttgccattatacatatgtccttctccaaatgatggctctttgctgtaaaagtttgtcttctaagctggttgtgtggaatttggcccctaccttccacattgtcttataggagtgcatttaggccaggtgtggtggctcatgactctaattacagcactctgggaggctgaggcaggtggattacttgaggtcaggcgtttgagaccagcctggccaacatggtgaaaccccttttctacaaaaatacaaaaattagctggacctagtggtgggcgtctgtaatctcagctacttgggaggctgaggcaggagaatccttgaacctgggaggcagaggctacagtgagccgagattgcaccactgcactccagactgggtggtagagcaagactctgtctcagacaaaaaaaaaaaaaaaagcatttaatctggtgctgagctgacctcttgtactctgattttttcattgtttagattggaaataggtcctgagttctaattctgtatttgggacttggtgactgcttctatcccagtctttgatggtttagacagtggaaccctccatgggggcatgtgggtgatcctcttgtcggggaaaaaagagggtgagtgactagggggtgggctaccgtaaccaggactctgaggataggtgcagggtcactgatgactgggaagagttgtaggtcctgccaccatctattttgcatgggaaggacatttgcctgagctaagccatgggaaaaatctaaatttagatacctgagctctccacagcaactaagccaagacacagtagacagaatgttttggcctttcagaatcagtattttacatacaaggactcgatttcacagaaaacccttctcaatgcttatgtgtatatgaaaagaaagtttgacctgcaggaatcattgtaatgtatcagatccatatcacagctcaattattcccaaggattcagggaggaaaagccaacaaaaacaaaaaaaggaataaaggaattgggttgttatggaagagaaagctaaaggggatttatttgaggtctggaaggctacgacgggttgcattcagatgtcatccacatgtccacagagaaccgcacaaggacttcaaggtgaaatagtggctgatcaagtcctaggagtctgagcaatcaaacattggcatgtgttaccaattaagtagagaggtggctgctgttttagaggcttgatgattgtctgtctttaagagtcaatattggccgggcgtggtggctcacacctgtaatcccagcactttgggaggccgaggtgggtggatcacaaggtcaggagatagagaccatcctggctaatacggtgaaactccgtgtctactaaaaatacaaaaaattagccgggcgaggtggcgggcaactgtaatcccagcttttcrggaggctgaagcaggagaatggcgtgaacccaggaggcggagcttgcagtgagcccagatcacacaactgcactccagcctgggtgacagcgagactccgtctcaaagaaaaaaaaaaaaaaaaagagtcaatatttgtgggagtctcaatttaaggtgctaggtaaattgggagttccatctgaggtttctttcaagataaaatgccttataaaagtactgtaagtccacctggccaacatggcgaaacctcatctctgctaaatatacaaaaaaattagctgggcacaatggtggctcatacctgtaatgccagctacttgggaggctgaggtgggaggattctgtgaatctgggaggtgkaggctrcagtgagccagtatcgcaccactgcactccagtctgggtaacagcaagaccctgtctcaaaaaaaaaaaaaaaagagaaaagtattgtaagtcacttcagtattagggatgggggccaaagtccactcacgtataaaaatatccctcagaggaagacttctatgtgtgtctcatgcaaccactttatgctgtctctgaggttgttcattccagttttcctgcttttctgttccagacttgggctgataccagagagtgtggattgcctgcagggcttcatgcgcatttctctgtgtatttaaatactcacggaagattagcaactatgcataaactttccagttgtacttccttaataatgattactgctactctttgttggtagctaagggaagcgtctgcatggaggtggcttagaattgacaatgtgcaaaattctgggtcgtttcatgggggctgggggaaggcttggaaataaaggcttgggtcattcccttgtgtttagctcttgcaggaaactcttgcaacaccatgctgttgtgttatcatctgcctgggtttcgtccccaggacagaacggcatgaatgatgtctttagtgtctcacagaaggaacactgggttcttgagtgcctgccatctctgtctcatcttgactccaaggacattttaacctctcaatgccttgttttgcagccaaaggtatattatctgtctcccatatgcgttctgggagattaaccactaagcattttgctttttaggtgtgaggcgctgtttccttctaagaccagtattgtttctgactaactttatccagttgagtggggttgtgtctctatttcatgttacgagatgcctctaacatttttattatgaaaataatttttgtgtccattgaaaaggtttgggaggagtatttaagttttgtaggataattatagatactctatcagtcatacattctatcttttttatttttttttgagacagaatctcgctctgtcaacccaggctggagtgcagtggtgcgatcttggctcactgcaacccctgcctcccaggttcaagtgattcccctgccttagcctcccgaggagctgggactacaggcacgtgccaccacaccaagctattttttgtattttttagtagagatggggtttcgccacgttggccaggctggtatcgaattcctgtcctcaggtgatccgcccacctcggcctcccaaagtgctgggattacaggtgtgagccaccgctcccagcccatcacacactctaaatccatacaacgagtacagcgggacttttctttctgtgttttgtggcaaataagttggtagaaatattatcaaataaaggccaaaactgtgttcagagacctggaagttcattcttttcctggttttgttgtatgtctgagacatgcrgagggacagacaaaaagatgcatttaaaaaagagctgccagggaacacataccaaaatggaaatttgggaaggggatggacaagatgagacaaagcagacagacacagattttctcaggtcaacaaagttgtgtcagactagtaagaccagctttagagtttaaaaaaaaagaagaggaaaaagaaaagaaaaaatacacacacaaacagaggtgcacagaacattccaggaaaccattgaactgtgagtgataacgtgtttccttctattccttcaaagatttgttttagaggatagctgggtaagaacttgtgctgaaaaaacaatgcaagggatttgtaaagaaacagggaaatgaatgatctgacaggccrtttgttaccaccaacatttttcttaatttaacctgaacttacttgctcttgtggtggtcggtcggtctttctctctctctctctctctctctctctctctctctctcattctctytytctctctctctctccctttctccctttctctytttctctstctctytytctctctttctttcttgtctcattctgttgccctggctagagtacaatggcacaatcctagctcactgcagcctcaacttctgggctcaggtgatcctcccacctcaacctcctgagtagctgggactacaagtgtgtgccactacccaccacaccctgctaaatttttgttgttgttgttttgaggagaccaggttttaccatgttacccaggctggtctcgaactcctgggctcaagcaatccgcccaccttggccacccaaagtgatgagtgctaagattacaggcatgagcctctgtgcccagcttggatatttcaaagacattagccatggccttcatgtttatctggacttgagggcttcatatctttgaccatagatgatgcttaagttggtctttcaygtggtttcagatccacagacattttgattaggtcaaataacaatcgtcttcataatgccaccatgtatgtatgtagtcctttggagactattttgacatcatttataactgacaacactgtgactttcatcctcctcttagctcacatgccttaatcccacatgtactgccctgtagagaaatattcctccttcctcttggcttgctttcttagctttgtctctatcccaggacaataactgaacaaaggctcttcattcttggtgcaactcagagttggaagagtcaagggtgaaggggcattgggcagccggccatagctgtcttcttcctctcttaatgtctttgtctctcccatcttcatgtggacattttctctctccttcttctctttttcctcccctcgctgaaaaaaataggattactgttttgaaccgggcattatgctagatgatagatgtacaggggtcagcaagatgggcaaggtttccatcttcatgtatattaaagtttggagggaataaaacattaaaataaatagttacaagggtggtgagtagtaagaaaagataaggaatgcttagcaagggggactgaaatagtgtagaggtgggatgaggagtcagcgaagtctgagtaagtaaattcagagagaaacaaaagaactacactctagatttccctttaaaggaaaggaaggggaaagaaataaaattccaaagagaaaagggcagaaagatactttgttttatacagaacactggaggccccagtgtaatcaacatcaaatttgtgtatctgcaaaggctgatcttttttttttttttttgagacggagtctcaccctgtcgcccaggttggagtgcagtggtgcaatcttagctcactgcaacctctgcctcccgggttcaagcaattctcctgcctcagcctcctgagtagctaggattacagacatgcactaccacacctggctaatttttgtatttttagtagagacagggtttcaccatgttgaccaggctggtctccagctcctgacctcaggtgatccgccagcctcagcctcccaaagttctgcaattacaggcgtgagccaccatgctcgacytaaagactgatcattttttatcagttgtccaaagacttcatcttttctccttccctgataccattgcattcagccatggtgctgagaggtgaagccagctggacttcctgggtagaatggggacttggagagcttttctgtcttataagaggattgtaaaacacaccaatcagcactctagttaggaatgtaaaacgcaccaatcagcgctctgtagctagcaagaggatggtaaaatgcaccaattagtgctctgtaaaacacaccaatcagcgctctgtaaaatgcactaatcagcactctgtaaaacgcaccaatcagcaggagtctaaaagtagccagttgtggaggattaaaaaaagggcattctgataggacagaaatcgaatttgggaggggacaaataagggaataaatgctggccaccccagccagtagtggcaacccgctcggtccccttccacgatgtggaagctttgtcctttgcttttcgcaataaatccttgctacygctcacgctttgggtcggtgccatctttaaaagctgtaacactcaggactgcgaaggtccgcagcttcattcttgaagtcagcgagaccacgaacccaccagaaggaaccagacacagtgccacctacccacatcttcccctatggctagatggcaggaatccacaaacacctgccaagatagtattgtgatcatgttaccagctataattggaggtgaggagtttggagtagaaatttgtctgtttttataataacgaggttgaattatttatagctttgtgtctttcctcttctccataagtataattaattttattaggcatctattcctaagagccaggaattcacatagctgctgggaagatgaagacttataaagaccacttgtggtctctcaaggagtctgttggcagagactggcatacataaaacaaatggaataaatattctatcaggaatatgggtaaggtcttacagaaacccagaagaggaaagagttctcccaaggtaagggaacctagaaaaagttacaaaacggaaagagctatccatctatctgtatctgtatctataactatatatctacatctatacctatatctgtagagatgggatcttgccatgttgcccacgctagtcttgaactcctggcctcaaatgatcttcctttctcagcctcccaaagagctgggattacaggcatgagccaccatgcctggccccaagaagggatatttgagttgatcctaagagaatgatagactgctgataaagctaaatagacttttttagagtgttccattatttttgtattttgtagttaatgcttaatatgagtaatcatgctttagaaagagaaagcaccaatcaaaacaagcctattttcttttcacctaggcatagtacttggtatgagttggcctagaaacaactgcatattctactcacactgctgcatggtttgcctaagagtactccatagatggactattgaaatttgggtgtgggttaaattttcataaatcaaatttcatttcccattatcttacacctaattaaagagataatgtgccttctgatgaccctgtaattggcagttgtaactggccctttaactttgtttccctgcgctgcagctcctgtctccagcagttagttcatcatctgtacactaacagtaagctacgcgggcaggcactattttaaaaaacacacacaaagctgtctgtgaatggcaaaggaatcagagcaagtcattactctctagttcatttggctagaaaggtcaggtcgcctatattgacttttcatgaaaactaggcgaactagtagttttcatgcacaatatgtcaacaacctgttatatttgaaattctttttaaattaggtgggtgaatggtgtaaaacttcactatattttctccctgcctgttaattgacttgctaatctcctgccaatatatgtccattttaaaaaacaaacaaccccatcaaaaagtgggcaaaggacatgaacagacacttctcaaaagaagacatttatgcagccaaaaaacacatgaaaaaatgctcatcatcactggccatcagagaaatgcaaatcaaaaccactatgaggtatcatctcacaccagttagaatggcaatcattaaaaagtcaggaaacaacaggtgctggagaggatgtggagaaataggaacacttttacactgttggtgggactgtaaactagttcaaccattgtggaagtcagygtggmgattcctcagggatctagaactagaaataccatttgacccagccatcccattactgggtatatacccaaaggactataaatcatgctgctataaagacacatgcacacgtatgtttattgcggcattattcacaatagcaaagacttggaaccaacccaaatgtccaacaatgatagactggattaagaaaaatgtggcatatatacaccatggaatactatgcagccataaaaaatgatgagttcatgtcctttgtagggacatggatgaaattggaaatcatcattctcagtaaactatcgcaaggacaaaaaaccaaacaccgcatattctcactcataggtgggaattgaacaatgagatcacatggacacaggaaggggaatatcacactctggggactgtggtggggtgggggrrggggggaaggatagcaytgggagatatacctaatgctagatgacgagttagtgggtgcagcgcaccagcatggcacatgtatacatatgtaactaacctgcacaatgtgcacatgtaccctaaaagttaaagtataattaaaaaaaaaaaaaaaaaaaaaaaggattgtggcctggcgcagtggttcacacttgtaatctcaacrgtttgggagaccgaggtgagaagatcactggaggccaggagtttgagaccaccctgggcaacagagcaagakcctttctctacaaaaaagtaaaacatatgaggcggcctgttggcacacatttgtagtcctagctactcgggaggctgaggtggaaggatggcttgagccctggagtttgaggctgctgtgagccatgaccgtgccactgtactccagcttgggcaacagagtgattccctgacttaaaaaacaaaaagattgctttaaacattcatcaaaaaacagagcaaattacactttggcagaaacatgaaggctaatacttgaatccaagcacccattccctctgggcttaccacactgaaggcaaaatgagtggggttggtttttctcctcaagaaatgttgttctgggacagtgagtcattggtttttgttcttgcaacccttcatcatctaacaggtttggttaactcaagaagttctaggaaatgttcaaacactgcagatatttatcaaggggcatttttaggagtagcagagtgtcaagaactcaaattgacatctagtggcaacacttctaaagattggggmcccgtactatatacaatgctaaatttccaatgctgtgattggaaaagactatgagaaggcctctagtctcttcccactaccatcatctgcagcaggcccacaccacccaaatcaacacaggtatggaagaatcgccccctgccacaggagtgggcagtaagcgttagaacrcagattgccgagttctggttctcagtccacccaagtctggtctgtttccctaactgtagaaggaaggtgttagaaatggaaaatccttaatatattctttgattttttcaaaacagaataattgatttttatcatctttcttagtatacctttcacgttctgcacaattattctagattcaaactgaagattgtggttcatgtcaagagtcagtttggtcactgaacactgtctcatccagctgtgggacactcatatgagcttggtcataggtggctcatcttcccccacttactgggtttccataatgccattctcttgggctgttagataaaatatttacaacccatccctccatcatcatcaaagcaatttatttgcacaaactccactgtcactaaatcacatgaatgcatccatctttcttattttcatctttttgaaaattagccagcatgaaaaataacagcaatcgattaagctattgcattgtgaagagtagcttagatttctttctttctttttttcaccctgttgcccaggctggagtgcagtggtgcgatttcagctcactgcaacctctgcctcccaggttcaagagattctcctgcctcagccgcctaagtaactgagattacgggcgcctgcctccacacccagctaatttttgttttattttttttagtagttatggggtttcaccatgttacccaggctggtctcgaactcctgacctcaagtaatccacctgccttggcctcccaaggtgatgggatcataggcatgagccactgcacccagccagatttctttcttttgatgatatttgggagtaaytgtggaatgtgtccccccacctatatcatacagcaatatttttttgatctacaaagcacaccatatacttcactatttattctgctgaggggaaatgggtgagactgccagatttctatgagaattacagggttttcaagtcattatggagaaaatgattgaggttcagtgtcattggaaaaagcatattcttaatttgtctataatttttcctttaattggtagtttggctccattttcaaagtacttttgaagctttcttttccaatttggcatcaaagttatttttctaagtgccattcaatttgggacttattttctattttgattgacataaaatatgtcattctgaaaggaaaaatatcaacacagtttttgagtaagaaactcagtaacattgaacttagtaatcacctccctaggagtgaaatttcatggtcatatatattgaaaaaacctcacaatataaccaacatgctatctgaatcttgattgagattccacatcataagtgctaatttcagttctgactataaccaatttgttagtttatacttactctttactaaaggaaagaagagtaggaataggatggtgcggtggctcacacctgtaattctagcactttgggaggccgaggtgggtagatcacatgaacccaggagttcaagaccagcgtgggcaacgtggcaaaaccccatctctgcaaaaaattataataattagccaggcgtggtggcatgtacttgtagtcccaggtactggagaggctgaggtggaaggatcacctgagcctggggaggttgaggctgcagtgtgtcgagattgtgccactgcacttcagcctgggtgacagagtgagaccctgtcttaaaaaaaaaaaagagtgagaataatgaaactgtgcacacgcaggccttttaataaacwttccccctgtacgcagcccattctagctatatatatttcttggtcccagcctcttcaaataaaaattgttttattcaaaagtatgacctagccttatacaagataagatagcccacttaaaagtggcataaaaggccacttttatgcatctccattttaggttggttacaagaggcacagagagaccaaagcccatgggatgctcgtgagagtaggaaattgggtgggaagggtggactcgggagacaacctgacatctctctacttgaagcctagcaataaggttcaaaggttcctcatgccttgttttcccttctctctacatgattaagatcccattcctgtaacagatagcaatgtgtttatgcagtaaaattagataagggagattactagggaagtcactactcagttagggatgtcagtggtgctcactgcaggtccaggttagtaataagaactctggactagtagctaggagtgcttgaatctagattagttctactttctaactcgatgtgtgacattttttccacttaatttttttggccttggttatcttattggaaaaaatattcaagttgcacaaataactaaatgatgcctgagttttcattcagttctaaaacttctcaactgagcaatctgttgttgaaaggagagtacgagttctaaaagctactctagggagctctgcattcaccaagccgctccatcattgttgggaagaaaatactaaggttgactcattgtcaaagccacattctactcaaactcaatgtacataactcgaattctagccacattccagccaaattgagatagctgttcaaatagtcatggatttatttaataactgacttcgaaattctttacttctttcaaggtggcattaacaagtatttcggaatttcaacagagatcggttttcacgtgctcttcaatgatccctgtgaaataaatcatattcaagggtttttttccccttatgagttattcgcctgaaggaagaattcttcatttctttttcttttaaatgcatgttggaataaagtcttctttgaaaagtcttaatgaaaagagcaaacgtggaatagcatccaccccagttctttctctggtccttgcactctgagaatgaagtcttagacagcagaatgtcaggggactctcattgcgtaaaagtctgtgcccttctgcgccttggacagttatggacagaagcctttaagaagaagaaaattaaaactagttaattttttagttaattttagcaacactacatatatgagagagagaaaagatggcattttctgaatgaatgagatgcctctgcattttgcccaactcattggagactcaggatagagaaaagggagaaattatgtttagaggctgataaatttccctatggttactatcaagagatcagactcttattaacatttgcaaagtgtgagcagagaagagcatttgaacaataagcatagattaagtactcctctttccttcattcccttttctctagtcatattctcagacagtccaggctaagtattaatgatcttctttgaagttaaacatacccttgctactttcattacattattatttttatgttcttccttttggagtactcaaggtaaatgacatggcagaatctgtcccagtccagtgagggtgtcacataagaggcccttggcttacctctatgcataactggcccacgtcacatctttaattagaagtccaagttattggctggacrccatggctcatgcctgtaatccaagcactttgggaggccaaggtgggtggatcacctgaggtcaggagttcgagaccagcctggccaacatagtgaaaccctgtctctactaaaaatgcaaatatcagccgggtgtggtggcacatgcctgtaatcacagctactcgggaggcttgaggctggagaatcgcctgagcacacgagatggaggttgcagtgagccgagatcgtgccactgtgttctagcctgggcracagaacaagactctgtctcaaaaaaaaaaaaaaagtccaagttactgttgcagggattgggacatcttgcctttctcaagttgagcaatattcccaaatataaaaatgtaggatcttagtccaatcagagcagatatttggtgtagggcattttctaatgtagtaccaataaattagacgcatacctcaaccaaaaaacagcccatatccagtaagtaataaggcaaygatttacatttcacatattaccagagtaatgactaatagcatacatgtataaactgaaaagtgactgatgcttattttcagatgggtccaaatttattggataattatggagaataatgtatgttttctgagagttggtagtaagaaaatattgccattgctggccaggcacaatggctcacacctataatcccagcattttgggagacttgaggtcaggagttcatgaccagccacctcagcctcccaagtaactagaactactggtgcatgccaccaagtccagctaatttttttttttttttgagacggaatattgctctgtcacccagattggctgtgttctccattctaagtccagtggttagaaattgtcaagttctcacatctgcaaaaaaagtaaaaaagatgaacctgctacatctaaatatactttgttgtcttcctacaagtcctattttacatacttatggcatttttactgcagtttgaaaatacagtcaattcttgttattcacagtattgatgttctataaacttgccctaaatactgcattagtgagtcctgaatttattagttaatactgaatttcctaggggaaatacagggttaggttcctgtgagtctttggttacctttttatcaaccaatcaacaaaaatccttattttacctgtgtttttgtttgaagacaccttttaaaatatatattattgattcattagcattgaactaagcttatctaatgcacttattttttgtgtaaggtgtatcacagccttcttgagcctaggaatgccaaatagtacttccacaccatacttaagggccatttcattttatttcttatttttaaaatttattctcttttcttatttaaagaaaaaatttgtagatgccgggtctcgccctcttgaccaggctggagtgcagtgacacaatcacaactcactggagcctcaractcctgggctcaagtgatcttcccacctcagcctcccaaatatctgggactacaggcacacgccaccatgcccagctaaytttttaattttatttttttgtagaggcagggtctggctatgtttttgaggtcttaattccccaatgaacatgactagtatattccaggctggtcttgaactcctrtcacaaagcaattctcttgccttagcctcccaaagtgctgggatttcaggcatgagccactgcacctggcttggaccattttaaatagtgaagtcactcacacacacatacacgcatgcaggtgcacacacagacacaaaaagacacaaaaatgcgaaacttgtggcactaaaaagactgtggaaagggtgcttccttacagtatgaaaactgaaacaaaaaagcagagtgttgtttagttagacgccacctgggaacgtgcttgttgggaaactccagttgtccactgtcctgccatgtctatgatgactgcaaacatttgggagtattaatttgagggtcacaaacagattttaggtgatgggcatatttacaaatacagaatctgctagtaatgaggactgactgtataatgctttagtagtctcaagtatgttttttttctcattaagcctttgcttaagatgcaggcaagattgatgctgttggtttggtgcaaaagtaattgcagtgyttcccatttaaaagtaatggcacacactgcaattacttttgctccaacttaatacttggctttattgacttttagcatcagtgcagtttggttaatgataaaattttccaaagcagtgtctcatctgcaggagcaaactatagcaagggccctggccatcagttctcccttctggtcytgatattcctttttaaactgtctttccrtacccctccctccagtgggcttggcgatgttgcattaaatagcaaagagaaggaaactcctccccagtcctcactgaccatttctttttccactcagtcctgctcagaatgtagaagagaagttgaatttaattcataaattcagcagcttgaggactgtcagttttgtcgttatttagtgaaatagtaattgaattgggctacaaggtcattggaatctgctgtttcatttcatatcattttacgtgttattattctaataagaatacaaatggagtttgatgccatttgctgatcatccatcttattgatgccattgaamagaacgcagaaacacaaagggatttataaggcatttcagttttgatgtcctttgaaaaatgaaagtcttttcagaaatgcaaaagacaaaatgacttagaattccrtctcgttctgcccggtttgagggcatcccttcctattccttagatagctgttaataagartcctgaggaaaactgggtttgaatttaaaaacaaaaaatttttaagagacagggtctcgctttgtcacccaggctggagtgcagtggcacaatcatagcccctgtaaccttgaagtcctggactcaagtgatgctcccacctcagcctccctagtagctggaactactggcacatgccatcaagtccagctttttttttttttttttctgagatggaatctcactttgtcaccgaggccgtagtgcagtggcgcgatctcggctcacagcaacctctgtctctcaagttcaagtgattgtcctgcctcagcctcctgagtagctgggactacaagcatgtgctactacgcccagctaatttttgtatttttagtagagacagggtttcaccatattggccaggctggtctggaactcctgaccttgtgatccgtccgcctcagcctctcaaagtgctgggattacaggcatgagccaccacacccagccaagtccagctaattaaaaaaaaaawaaaaatcrtagagatggggtctccccgtgttgcccaagctggtgtcaaattcctgacctcaagcaatcctcccacctcggcctcccaaagctctrtgattatagatgtgagcygccatgcctggccttaaatttttcaaaagcttttaaaccaatcttaaaatgttttatcctcttagaatcatgtccctagttttatagcttggaaattcttgctcttttcaaattgctstttaactctggcctgattggaaggtggcagcttttcaaatacaggtcatggcagcrctcaacstggattcctcagttgcagaagactgcttttgctagactgctgaatttacttccaacttttcagatgtttctgaggttgaccctggtgtggttcccactcaaagtggagcaagcaggtgggtggcaggtctcttcttagcggcttcctagagggaagcctcgtgagtgggatgggggacaggttgccctgggggagcccaggaatggggagacaaggccacctgctatgcagatgatatagtttggctgtgtacccacccacttctcatcttgaattgtagttcccataatccccacatgttgtgggaggaacctggtgggaggtaattgaatcatgggggckgttttccccatgctattttcataatagtgagtgagttctcatgaaagctgatggttttataaggggctttccctttcactgggcactcattcttctccttgctgctgccatgtgaagaaggacgtgtttgcttccccttcaaccatgattgtaagtttcctgaggcctccccagccctgcagaactgtgagtcaattaaacctctttcctttataaattacccaatctcaggtttgtcctaatcgcagcatgagaatggcctaatacagtaggttttcctgagtcctctctctgactcaccctctgacgggcaaaagacagtggcagcactgccagcaatcagctgggaacttctcccctgtgatagaaagcagtgcttgctggcttccctttgtgatgcttttggacagcagctctatggacctatgccttttgtcctttgaggacggacgcacagtctgtgcagctcgaggacgccgtcatgggtgagatgctgtggagtgtgatgacgccacctcttaggctgtgtgtgaaagtagcgaggagaggcagggtctgcatgagccactttggagcaggccaaaacactgtggagaagcacattacagccacagtggcggtgtaaagggtcagactgaccactggcttctggaamgtcttcatttctgaaagactgtcaggtagaagatggatgagagttactctgtgaggccggaaacctagaactcagaccattgtgtgcagaccagggagaggcagtgtttggagtgagataagcaggaattttgaaattacacagacccggttttgaatttactcatgagctgtgtggcttagagaaagctgtttaatcccactgaccttcatctgtgaagtgtccaaaaataatacagagcttgcagagttgtgtggataagggataatctatcgaaagcatgtggcaagtggcagacacaatgtgggcactaggcaagtggcaagtcccttgtattgagtcttatttgtctattcagtgaatatttggataccaactctgctgttctgggcatgatgttagccactggggagacagaaggaatgaaagagatgagtaacctratgtgtgctgtctagtggggactgcaaataaagtgggtgttaccactagcgtgctctacagtgttatgctagagagaaatttacttcctttggccactcacttccttgtttttaaataagaactgagttaaagttgctaactgtgaagactgagtaatttgaatctgctgttggtgtactcagattactttttttttttttttttcttggagacagagtctcactctgttgctcaggctggagtgcagcggcccaatctcagctcactgcaacctctgcctcccaggctcaagcgattctcatgcctcagcctcctgagtagctgggattacagtcacgggccaccactaatttttgtatttatagtagagacagggtttgccaggctggtcttgaactcccaacctcaggtgatccgcacatcttggcctcccaaagtactgggattgcaggcataagccaccacacccagctcagattactgtttactcaaattaatggggatgattgaggatgaaacagtgcagggattccccattgttttgttttcttctttgcatttctagtgtctgttttttttttgttggtggtggtggtgttttttgtttgtttgtttttttttttaaaaaaagatctgcagaggctattgtgtcctttgcataacccaagtccagtagcatccttgacttcaaagtctgttggcattgatggcatctgactcagtcataactatctttaatacatcattataaaatctacaatattgctcaagtgaagatattatcatgtaactgggagatattactaattaatgagtatgtggaaaattttccctagaaaatgaagtgtttgtgaaagggactgaaggatttttgcagaagagtctatgagaaagttattataaaccaaagggttatgaattctgcatatgaaacataaatagctattaaatattttatttcaatcaaaaagtgtaatgaaattagagcttctcattatgaatctgggatttatatggaaacttataaaactaaaaggtaatacattcaaaatagaagcacagatttaccaattaactggagttaaaactttttacttctctttacagtgacaggagaaaaatacatcctaaatatgttattatggtaaaaaaataatattgctagtggacagaaaaaatagtcgttaagagggtacaagttcatctgatagttgcaactaacattctaagggggttctctaagtttagtgtttgattttcttaaaaaccgatttgaaaattcatggtgcatggaactcagtgaaggcwcctctgttgaagaaataactctctgaaataaaatgaacatataggccctttatcttttttaatgggatggcgtgcttaggcccatgaggatcggtttggtagaggttgatgttcttcctttatccttaatcattgatgcctctctagaaaagaaatgctcatgtcttttaggtggaaccataggatattggtgattacgtatgtcaaaaacagtcaaatatctgcagtttcatgtcattcatgctaatgaattctaaattggatgaagaccttgactcaccagatttggcaaggaataggggtccgtattttaaggacaaaaggctagaagcctgtttgcaaaactctaacaaacatttttgcttttctaagatttctgaaataatctggagtacacacaggtgaataatgtaagtgaaggaaagtgaaagggtgctataaagtaaaatgaaaagatgctgaatttcagcactaatttgaatatacctagattctagattgaaaatgaccttttccgcacaggtaaataaaatgtttccataaaggaataaacctggccgggcgtggtgactcatgcctgtaatcccagcactttgggaggcggaggcgggtggattgcgaggtcaggagatcgagaccatcctggctaacatggtgaaaccccatctctactaaaaaacaaaaaattagccaagcatggtcacaggcgcctgtagtcccagctactcaggaggctgaagcaggagaatgcagtgaacctgggaggyggagcttgcagtgagcagagattgcgccactgcactccagcctgggcaacagagcgagactccgtctcaaaaaaaaaaaaaaaaagaataaacctaattatacttcttcaacttaagatggacatttctctacctaagaatataaaattatcaaatactctagagaaagttgggtttatattcaaatascacaatatcaacacatgtgaaggtcagtattccatagatggggatgttgatagctaatttcaaatcagtgtgttttgtttattaaagctagactgctgataggcaatatttgctagaaaataatgtaatttttaaaactttgatgtgtatttaaaataaagttttcattttagaacagtttgagatttacagaaaaattgtgaagatagcacagagctcccacatacaatgtatgcagtctactctagtattagcatcttacatcaatatggtacatttgttatgattaatgaaccaatattaacacagttattatctaaagttcatattcatttttttgccatcgtttttacctatgtgtgatgtaagtaatcattccatttcagtatacatgaattacaagatcagaattgttaacccatgccctgtgggaaagaactttatcaattagggtacagtgtgtttggacagtttcttttgtcttttgtcttacagaaatagtttgtttccaacattaattaggtcagcatcttctccccatcacctttccacatacacttaccctcagtgagactgtttcatatatttatgatacagttagattgcttggtaagatctgttccttaggctcttggctatgacagtttctcagactctccttgtttttaatgaccttgacaatttggaggagtactggtgagttattttgtagaatctccttcaattgagacttgtctgatgattttatcatgagtagactagggttaatatgtttttggaaggaagatcacagaaatgaaaagccattctcattatatcattatatcatatcaagagtaacaataatcggccgggctcggtggctcacgcctgtaatcccagcactttgggagaccaagacaggcagatcatgaggtcagatcgagaccagcatggctaacacggtgaaatcccatctctactaaaaatacaaaaaattagccaggtgtggtggcggktgcctgtagtcccagctactcaggaggctgagrcaggagaatggtgtgaacccaggaggcggagcttgcagtgagcggagatcacaccactgcactccagcctgggtgacagagcgagactccatctcaacaacaacaaaaaaagtaccaataatctggccaggcatggtggcttatgcctataatcccagtactttgggaggctaaggcaggaggagctcttgaagccaagggttcaagaccagcctgggcaacatagagacctcacctctacaaaattttttttttcaaaaaagaatactaataatctatatgatttattgctataaatattagctttcatcacgaggctgaggagtctttttcaggtttctccactgtaaggtcacacacacccccacctcttttctatgttgtcttctttggaaagaagtcactacgtgttatccacacttgaggagtgtgctatgttccccctccttcagggtggagaatctgcataaattatttggaattctctgcataagaaatttgtgtttatttatccccctgtgtttatttattcaatcattcgtttataacagtatagactcatggatatttattttcactttgggtttgaatccagtattacttgattgttgctgacattcatccagctttggccactgggagccctttcagttgacccctgtgttcctttgatataccctcttcccctcttctttgtggtttgtgggttctttgttttttgttgttgttttgtggctcttctttatggcactgaaagatactccaggctcatcttctacatttcctgycacaatcctaaaatcaaccatctctctaaggasttctaaaccaagatgtgttctttgctactgaggtgttgcttctttttttttttttttttttttttttttcaracggagtttcattcttgttgcccaggctggagtgcaatggcgcaatctcggctcactgcaacctccgccttccaggttcaagcaattctcctgccttagcctcccgagtaactgggattacagacgtgttccatgatgcctggataattttgtatttttagtagagacggggtttctccatgttggtctggctggtcttgaactcccaacctcaggtgatccacccacctcgtcctcccaaagtgctgggattacaggcatgagccaccgcaaccagcctgaggtgttgctacttttagggcctttgactgatagagcaaagaaatatatgtgtggatactaaaccatgcatagacacatatctatatttccttctttcttttgcctttcccagaatgtcatataattagaattgtacaatatgtagccttttcagagtggcttcttccacttggcaatatgcatttaagattcgtccatgtctttttgttgcttaagaacttttcattgcttcataagaaactgacaaactggctggratggtggcttaygcctgtaatcccagcactttgggaggccaaggtgagcagatcacttgaggtcaggagttcaggaacagcctggtcaacatggcaaaatcccatgtmtactaaaaattcaaaaattagccagaagtggtggtgtatgcctgtagtcccagctactcaggaggccgagcatgagaatcrcttgaacacaggaggtggaggttgcagtgagccaatgttgtgccaccgcacttcagcctgaggaacaaagcgacactccatctcaaaaaaataattaaaaaaagaaaagaaactgatgaactgtcctctaaatttgctgtaccatttttgcatttccattatcaatgaatgagagttcctgttgctctgcatcctggtcagcatttgatattatcattttctggattttagtcattatagtagtgtgtagtagtatcacattgttgttttaatttgcaattccttaataacaaatgatattgagcatctcttcttttcttttcctttwttttttttttatgtttttgagacggagtctcactctgtcacccaggctggagtgcattggtgcgatctcagctcactgcagcctccacctcctgggttcaagcaattctcctgcctcagcctcccgagtagcaggaactayaggcacaggtgaccacacctggctaatttttgtattttcaatagagacagggtttcagcatgttggccaggctggtctccatctcctgacttcgagatccacccactttggcctcctaaagtgctgggattataggtgtgagctaccgtacccagctgagcatcttttcttttttaaaagaaatwttaattttagattcagggggtacatgtgcagatttgttacaagggtatactgtatgatgctgaggtttgggcttctataaaacctgtcacccagatagtgaacacagcactcaataggaagtttttcagtctttgttcctctccctcccactcttcccccttttggagtccccagtgtctsttgttcccatatttatgtccgtgtgtttattagctcctacttacaagtaagaacatatgatatctgattttatttctgtgctaattcacttaggataatggcctccagctgcatccatgttgctgcaaaggacacgattttggttttttaaaaatgactgcrtagtattccatggtgtaaatgtaccacattttctctatccattccaccactgatgggcccctaggttgattccatgtctttgctgagttctgtgtctttgtcaatagtgttgcaataaacatacaagtgcaggtgtctttttggtagaatgatttattttcttttgggtatatacccaataaggagattgctaggtcaaatggtaattctgtttttagttctttatgaaatctccaaactgctttccacagggactgaactaatttccaatccgaccaacagtatatgagtgttcccttttttccacagcttcgccaacttgttactttttggctttttagtaataaccattctgactggtgtgagatggtttctcattgtggttttgatttgcrtttaatgatcaatgatgattagctttttttcatatgcttgttggccttacgtatgtattcttttgagaagtgtctgttgacgtcttttgcttactttttaatggggtggttttattcttgttgaattgtttaagtttcttatagatactggatattagttcttgttagaggcatagtttgcaaatattttctctcattctgtaggttgttcagcctgttgatagtatcttttgctgtgcagaagctcttcagtttaattaggttctacttgtcaatttttgcctttgttgcaattgcttttgaagacttaatcataaactctttgcctaggccaatgtctgaggggtattccctcggttttcttctaggatttttatagtgtgaggtcttacatttaagtctttaatccatcttggggtaatttttgtatatggtgataagtagagatccagtttcattcctccgcttatggctagccagtttccccagcagggagtcctttccccrtggcttagtcttattgactttgttgaagatcagttggttgttgctgtgtggctttatttgtgggtttatttcttattctgttggtctatgtgtctatttttgtaccagcaccatgctattttggttactgtagccttgtagtatagtttgaagtcaggtaatatgtttgttctttttgtttaaggttactttagctattcatgctcttttgtggttccagaattttagaatactttttcttctaattctatgaaaaatgacattcacaatttgataggaatagtgttgaatctttagattgctttgggcagtatggacattttaataatattgattcttccaatccatgagcatggaatgtttttccatttgcttgtgttgtccatgatttctttcagcagtgttttatagttcccttacagagatctttcacctctttggttagatatattaatatttctgggtattttattatcgtgtgtgtgtgtggctattgttaatgaaatagcattcttcatttggctctcagcttgaatgttgttgctatatagaaatgctactgatttttgtatgttgatttcatatcctgaagccttagtgaagttgtttatcaggtctaggagccttttggcaaagtctaggtttttctaagtgtagaattgtgtatcttttcatatgtttatatgcatctgtttgtgttctttggtgaggtggttgttcagatcttttgcccatttttttaattggttttttaaaaattgaattttaagagttctttgtataactttacttatttttcacacccaaattttctaagtattttgagagaccttaaatgtgatcatcaacttcttaacttcatagattttaaaagttagttcagaataaagtttacccttcctcattaatacacttaataatgcttagttttaacaaattatatacatacacacacacacaygcatatatatatatacacacacacacacacatacacatacacacacacatacacacaatcactccttaaatgtgcaagaccgggacttgactttgagaaatttcaattcaggaaggaaaattcaatgggaggtattaytatagatttaatttgatgggaaacgaggcagaaaatttcaaggacattatcccctttatattctcttcatcctttgctgattctggctttaaaagacttcagaagtcttccagagacatttatgcattttctgaaggaatggtaaaaatcctaattctgggtaactttgttttactccaaactcttggtgctaagattctgttccgtagtttctcaccaaagcattctgtccccttcagatagtcaaacatatgacaaacaaaaatacccacaccctctttcctttcctacctggtgctaattggaaagggtacctggtcagcgcatttatttcacttycagtcatgggggagtctaattatgtttgatttaaccaaataatacaaaattcctcagttcttgcttatggatttggacttcaaagcatcttgcctttacctctcagaagctgttctcacttgttttttgttttgttttgttttgtttttgagatggagtcttgctctgtygcccaggctggagtgcagttggtgtgatctcggctcactgcaacctccacctcctgggttgaagcaattctcttgcctcagcctcccaagtaactgggattacaggcatgcgccacacgccgagctaattttttgtatttctagtagagacagggtttcaccatgttggtcaggctggtcttgaactcctgacctcaagtgatccacccgcctcggcctcccaaagtgctggggttacgggcgtgagccaccgtgcttggccatctcacttgttttgaatcaggatgcctaggtcagtgagagcctgtgtgagccaaaaacagccacgttcatctttgaaaaaacttaggccgacaaatcaagtttttaattacaggaaataatcaccaactactggagatgcaattaaaggcatttttctctgagagtagcttgtttgtcttttatatttttccccaaagctcattataaaaaatactatgttctttcatacttacagtctcaactctatcacttcctgctgtgagtatggaaatgaattttgttgaaatcaaagaaattagttaataagattttttttagsctgttagtagaagtggcttaamgtttataaagaatatttgctttgctcataatttaactgaatgagacatctgacctctgctgtctatcaaattcattaccgctttctgggacccatgaactgccttacattgtactagttgagaactgatgaaataaaaccataactcgattcatcaaactgtttagaattcaaatgttgagacatatctcacttaataacatgagggtattttgtttttctttttaaattgttcactctggcctttagtagccaccagggagacatgtgagtttggaagggcatctcaggtcaatcctaaaagcctgcagaagaactgagctggcagaatataatcctgcaggttgaaacttagccagcctttgaaattattttcatcgggaaagtactacaggattttttaaaatgacatagtagacaccctactcagaagcctactccctaatttttttttctagttactcatttgccaagatgacttgtttatttgaaagttgttgtgatggaagttggattrtgtatattatgattgcttttcttcctgtgtattattttcatttgaaaatgtcaaagtatctcaccattttcctattttatagactagtaaactgagttatatgattttggtgaatttaagcttccagggctagatctccatttagctttctcttctactatttagcgcagtccatacaaagctagctgcaccagagagcattttatctgaatcctattcttgttcaccatgccttcagcaagcacattttacagagcgtccacacgccggccaatagaactgcaggtgtgagcagttccattaacctgycctcaagccttagtgggagagatggcacagaattgctatataggatgtgaatgctcactcaagggacagagcatacaaggagaccagagaaacagaccatgggaacactagagggaacaaaaggataagaggcagtttgggtcagggaaggctgaggcttgaagagtgagttggagtttgccagacacagaagagacccttggaagcaaagagatcatggtatgtcctgtgcagagtttaatgagcacagcgtgtgtaggggacatgcttggacatgagacagctggggctgaatcaatgaagtacctggttaagatgtttggacttaatcctgtaggcactgggaagcaactaaaaggtaaatagggaagtgacatatcaaatttgcactttaggcaagtccaatgagaagggtttgagttccatcttatgaaaagctgcttctagatgccctgcaatttatacagctgccatatattaatctcctactgtgtgcctgggcwtgcccatacatgtttttctttactttttacgsttttttctctactggctcttaacctgcctcatcctatgccaagtttataaacatatttcaatttaatattataaataaaataataatacaaagccattaagatgaagagattgccattgctgttgcattcagcaactgggagtccctgcaaatttgggaagagctggttcagtggagggcacgggcactggggtggtgactgattgagaggtaaggaaggggaagtgggaatatagatgctccttctggaaggtggactgtgaaaggaaggagttaaccagtgaaggctataagatgtgtgggccctacagaggcctgagaggagagaccctgaaggcatggaaacagttggtgggtggatttgcttttaataggggaaagaggaggagaaggtggaggaggagggatggaaatattttttccactgccaatgatggaagatcgcagttggggctgaattgtcctcatggaggaggaggaggaggaggaagttgtagaaggtttactgcttgccatcgaattttccaacaaagatcttccactgaaaatgagagaagaggttgatgaggaaggagactggaagagaagggacaagcttgagagagtttccgtgtgggaaggagaggggaatgttgagaaggattgtcactagggccctggcaagggtagggacctctagtaggtagtctcagtaatgaccagcaacacagtgtgggaacaggaaaggatgctgggaccccctgggattgagattgggctgtgtgggggtggtaggagggaaggtaagtggtcagaggagctgaaggctttgagaaaagtatgggcaagtgctagatcatggcacccagtctttttaatagtaggctgaaagaagatacagatggtcaaagatttggggattgtgggagccaacaggttgttatcaaaagcgaagagaatagagttgaagatttcagatgtagagcaacagttccgagtgatactaagctccaaggtatggcagttcgtgtgcagaggctaggcaagagtcctaggagataaggaggccgaaaaacctggagaccaaagaaccaggaggtcaaagaatctggaggtgccaagccttgtcctaagggccctgaaaccctcagggtgatggcaaaaattggagggaagagagagtgraagtagaactcccaaatcttcaatgaacagtgggctcattatctgcataagagtgaggattcatgggaaatgtgctccccagaagaaagcttcttacttgcattaaaaatattaagagtaactctgaaaacatgattttaatcacaatttctctcagtggattttagggttttggaaaaggccacaagtgccctaaagtagaagtctattgagataatgaaagtttactgaaaattgtatctgcaaacattacctgtcattcatctctcaggtgaggttgtatgagtgtaaaaaaaaaaaagttctttcttttttgctaactttcaccttatcacaataatgcaacaggaagagagtttcaacaaagcataatataaacagatgtctctcttttttttttttttcagacggagtcttgctctgtcacccaggctggagtgtagtggtgtgatctcggctcactgcgacctccacccccagattcaagcgattctcctgcctcagcctcccaagtagctggggttacaggtgcccaccaccatgcctggctaatttttgtaattttagtgagacagggtttcaccatgttggctaggctggtctcaaactcctgacctcaggtgctccacctgcctcggcctcccaaagtgctgggattacaggcatgatccaccgtgcctggccatgaagtctctcttaagaccttttattgtgtggggcagggggttgtttaaaatacatccagtgggaatggcaaattgtgccctcttttcaaagtttgtttttcctccatcatctatatttgagttgttctgtgtgaataagttttggaatgcttcctccttcttgttgaccacagtggttgttgacatagacagaggttgttgggataggaagagatccctgaggttgtcttgtggacaacaaagacccacgataacttttcttcccatataagcatgggctatcctagagcccagtcccctgtgggatatgaccaacaattatcttagaaaatttcactcaatcggctgggcatggtggctcacgcctgtagtcccagcactttgagaggctgaggcgggcggatcacctgaggtcaggaattccagaccagcctggccaacatggtraaaccctgtctccactaaaaatacaaaaaagtagccaggcatggtggcaggtgcctgaaatcccagctattagggtggctgaagcaagagaatcacttgaacctgggaggcggaggttctagtgagtcaagatcgcaccattgcactccagcttgggcaacaagagtgacactccatctcagaaaaagaaaacttcactcaatcatttcacttctacctctcccagtcctctttggagcgtgaggacacttgtaaggcagtctgtggggacagtaacttataggttgtgtcctgtccggtagtgggctttcatcagaagtatgcttttggtcacactacaccatttttttataccaccatagagttgacaaacagcattcacccatttcattttgctttactactccgatgtggagaaaaaaaaaatctaaggattacatttctcttgcagattttttagatcaayagctattatttaaatacagggaatcctgaaagtctaagactaaaaaatttgggttccttttgtatatgttaaattctcccatatacacatgggtctgtaaataaaaataaataggtggcccctacccttgcagttgcatagagaaactagaccctgaaataaaatggaacaacattggaggatttttgtttagtggattaaaaattcaataatacttgaaaactttgtccagctcttcaacagagatatttggatgagttttctggcttttctaatcaggaaaggcttgttggagaattaaaggagatatgattgaggaaataaaacacaatacaagatttttctggatttattatgaataaaaagggaccccagaggattaagtggatgtagtttgcagttgaggttaagtggtcatggcagtttaccgtggacattgtttaactgatggaaaactccaaaagactgaccaaggaattgaagtagaccaatttggaccaataacttggagctcagaattaaccactgtatttctctattccaaatacccattcctcttccctggaacctcaggctggccacacaaactttcttgaaaattcttggggttctgcctttacaggaaggccatttgcctcactcatcagaagtattagaggtttattctgcacaaccatgaagaggttaaagagaagggtagggaggccatgagggttcttacattccatcttgagtcaaccatctcctgttaccctctgaaaagtggcagaatttgtcccagacttttttttgttgcacttcwwatctaytatggaattacatttatagctaatgcattaactctaaaaatggagaaacccattgctctgctgttttcatggtaaggaaaaactgctgagtcatgattgacatgggctgtttcaagagtttccacggartgaaggtaaacgcttaggatatcgcagcctgagtgagaggcactgcaaagtgtggccgctacttgaagttcttcatggtgagtggagagggaatcctgagcgcatcctggattagaaaaaaaaaagaagaaaggtggcctgaaatatgatctgagtatatctggaaatacgcagacatctagtacttcasttgcagcactctgtgaaccagaaggccaatttctacatgctacaagctgcacttcaagatgcacccaaaatgcatgctcgggaagttgttttttgtttttgttttgttttgtttctgagacagactctccctctgtcgcccagccaggagtacagtggcgtaatcttggctggctgcaacctctgcctcctgggttcaagcagttmttttgcctcagcctcccgagtagctgggattataggcatgtgccaccatgcccrgctaattttgttgttgttgttgtttgttttgtttgtttttgtttttagtagagacaggatttcaccacattggccagcctggtcttgaactcctgacctcaagtgatctgccagcgtcggcctcccaaagtgctgggattacaggcgtgagccaccgcgcctggctgggaagtcttttttaatggcaataaccaaatgaactctcttgaccttgctgcctctgcaggcactgccccgccccggcccttccactctagaggaaagcacctggcatttagcatctttacacacaggaaacaacagatatgctcagggacttttcctctagcttgtaaccagggatggctgttgggcttggcagccgtcaggctgagagtgactcagcttaaaaggtttcattgttgatatctgccctgagcattcccctttggacttggagttccaggatgtctygtgtctgtgcttcagcatctgaagccccttgttgcctgttcttaaggtagactgcattatcaacggtgtcttaaattaatagcttctctctactgactattcacttgtcacagctgacatgaaggttctcagtcctgagtgcctattaatgaagctcacagatagagtgcagaaaccctttgcaagatctgttttgccagcttgctggtgtcctggcatgaaggtctccgaccgacgtctttgaaatagttcctggccgggtgcggtggctcacgcctggaatcccagcactttgggaggccaaggcgggcggatcacgaggtcaggagatggagaccatcctggctaagacggggaaacaccgtctctaataaaaatagaaaaaatagccgggcgtggtggcaggcgcctgtagtcccagctactggggaggctgaggcgaatggcatgaacctgggaggcggagcttgcagtgrgccgagatagcgccactgcactccagcctgggtgacagagcgagactccgtctcaaaaaaaaaaaaaaaaaaaaaaaaaaaagaaatagttcctttccacgtggagtggactggccaccttggggctctacatttgcctgcttggttcaggcagttctgtcccatttcatgtacatttcactcttttcccctactagcttctcacagtttaaattatcgatgtgattgcctacccagacatctaattctttcaacaggtagtggtttacagactccagtttctttatgatcatcaagacagggattgaacaactggcaccttccctgtctgtccattgaggggcatgtgtttgatgtgtgtggatgctactttcattaggcaagttaatggcagttagctacgttcacactgaggaggaaatagaccaccgtgtatgcatttagtaaacaccagcgtagtcagtggatctgtttccttaacagaacatggttctgctccactgtacacttcaaccaactgcttcagagcaagctttttccttagaaaagttttcatttaattargatttagaaaggaacgtggaaactttaagatctccatttagtcttctgcatacttcagagacttctgatgtctcctacagggacaggaaaggagtcaggggtctgaaactctargacctgaaaggcaagtgcaattcggtcactgtccacattgccagggtgtcaaatcacacataccctgcctgaaagtctgggaattggagaatttaaaatgacaatattttctactgtggaataccttgcattctcccactctgtaaactactattctggaggcggcccctctcactatatttcaaaaccagatgcttttctctggaaatactagaaatgtctctcttctgggctgacctaaaaccaacatagtattgggcattgaagtaaggagaaatatggtcagtgaggctaagamctcctcttctgagaatgaaaaatgactgagtattttgtgttaggtgggacactatttgttaatagagaacttatatcttaagtctcttaaaataattatagcatctcttagttatttccagcataatccaggagtgagcattccaagaacatcatcttacaacttttaattaatatatctttctctaacccttaaagaaatgctggtaactgcttgtcagatgaggaaaagatggatcattattcaagtaagatccaatatgggaaactcagatataaatagttcagcattttcgtttcttatcaaagatttatgactgtgtctaytttaggatttatttcttctggactatttcaggagccccttcactggtctttcagcctcaatttcctttcctccgcccctttgtttgtttctcccactgctctgaggacagttgtcataaagctcagttctagacttcttgatttgtgtcccgggtgcttccccagttgttctcaggccaatttctcaggcccctgtttcaccattttatccacacctccaacaggcattccctcctggtggaacttctccctcttcatctgagggtgaagggtctctttgttgacactggtccctctgccgggcatcctctcccttctatacctccctattgctaccaatccttccttcactaagaaatcaacctaaatgccaccttcttcatcccagacatgctaccactcctgagccaggagtaattaattctttgacctgttgtatcgctcttatggcacatggctcttctgtttgatttggaaaaacgtatatctccttatgcaaattgtaagttctttgaaggcagggtccatgtttaattattttattctttaatgtgccttagtacttaaaatgtcctctgctggccagcagtaagggtgtcacctgtgagcttgctcaaaaagcagactgtcagcccccatctcagatatgtgggatcagaattcacattttttttcttttttctttttggagacaggggcccactctgttgcccaggctggagtgcagtggcacaatcattgctcactgmagccttgacctcctgggctcaagcgatcttctcccctcagcctcctgaatagttggccttacaggtgcacatcatcaaacccagttaatttttaagtttttttgtagagaggtgtctccatgttgccaaggctggttggtctcaaactcctggcctctcaagcagtcctcccgcctaggctttccaaagtgctggaattacaggagtgaatcactatgcccggccaggatccacattttaacaaggggtctccaggtgattccaatgcagctgagttgggagttctggctttgtacattgcacagaaccttgtataaagcagagactccctggrtagctattgaacaactaatgaataaatcacattaaaagctgagtttcttctcattgacttagagggaggttacctcataattactcaaacatagaaaacgtaacccaacatgtaccattttcctatgaccattttgagtcttaaaaacgtggaaacccttttcttcttttaaaatcttggatttgttatttcagatcacctttgatagtttttctttctttcattttttgtgtaccctcactgggtagtgtttggccttcgcgaagaaggatagagagaaagcttgctaattggggctaaatacagattaygtgcaaaaaaagaaattgctagcatctaaaaataagcactctacacgtgtatagttttataatcttatcagctgtgatcttcaggaccaagtacgtggcaactacaggaggatggtctctgtcgctgtcaaaagctgagtattccaactctcacttacttgataccaaccacagaaggacatgagactgtaatacactgggattttcaaaatgcaaaagaatttgatattaaaggcttgttagctgtctaggaataaaacaagaatggggagaaacatataaagtaaggaagattatctctctacagctaaaaccaggcaaaaggaccacccactatggcatattgtgaaaattttgggggctacttttgtttgtcacaataattggagcagttggttgaagggtacaatgcagcagggccatgttctgttaaggaaacagatccactgactacatttgtgtttaataattgcatgcttagtggtctgtttctcctcagtgtgacgtaagtaactaccatgagtttgcctaatggaagtagcatccacacacatccagcacatgccccttgatggacagacagggaaggtgccagttgctcagtccccatctcaatgatcataaagaaactggagtctttagactgggtgcagtgtctcatgcctgtaatcccagcactttgggaggccaaggcaggcggatcacctgaggtcaggtcaggagttcaagatcatactggccaagatggtaaaaccccatctctactaaaaatataaaaattagctgggtgtagtggcccatgcctgtaatccaagctactcaggaggctgaggcaggagaatcacttgaagctgggaggtggaggttgcagtgagctgagatcatgccactgcattccagcctgggcaacagaacaagactctgtctcaaaaaataaaaaatttaaaaatttaaagaaagaaactggagtctttaaatgactgcctgttaaaagaagcagatgtctgagtagacaatcacatcaaggattttaactgagagaagctagtaggggaacaaagtgaaaggtacatgaaataggacaaaggccagggatactagataccttgcaaggcataggatagtctcatactgtgaagaattgtcacttgaggccgtgactttagaacatcyggcctgacattttggtggtgaaaaagtgtttttattaatagactctaaaaatatttttatataaacaaaaattaaatatatgctaaatttttcaggaatgcaattaccatttcaattgagaggatactgtcctttgttttgtttagaactttactatacagtaatgtctctgctcatatcagtctgcatgtgtaactattgaattcacactgattctacttagaggtagctcctgatgtcattgtacctgagcatttgtatattgaaatgttccttatttgtttagaaattttttttttctcatttatataataggatattgtattgatttttttaaatctatgtgactaagcaagttttaaaataagtatatctcaggatataaaaagaggccttgggtctgatgggtttgagaattactggcatggacagcctcattagttcctgtcttaagacagaggataataaaagttaaaggctcagacttaatcaaagggttagaaataggagtagcgagccgggcgcagtggctcacgtctatcattccagcactttgggaggccgaagtgggcggatcacctgaggtcaggagtttgagaccagcctggtcaacatggcaaaacctcttctctactaaatatacaaaaattagccgggcatggtagtacctgcttatagtctcagctactcaggaggctgaggcaggagaatcacttgaacttggaaggcggaggccatggtgagccaagatcgcmccactgcactccagcctgggcgacagaggaagactccatctcaaaaagaaaaaataaataaataaaataaaataaatagtaagagcatatcccacaggaaaagaagctgagagacaatcttggagggaattcatgtatggggcaacttgtcagaatgaacagagcttgggctcaggaattaatgcactgagtttggtgctcttctcttcaactttcagaattcaactatcctgaattctggcttctgggggtcccggcagggtcagaatgaatattagagataatgaccttaaaacacctagcacagagttgcaaaaaatgttacaaattgtaaatactgtatataataacgctaatgtcatctggctcttcaaaatggaaaatgatgaagctatcttactggcttttagagaagttgaccgagttttctacaattgctcatggctagattttggggccaggctctaaaatccaggttctttagattattttgagcctaacaaccaacttaggtttgacctgacttgaatcactctcttcctctaaaattccctgtacycttggctttgtccatacagaacctgtacatcaaattacaccaaatatcacaatcctgtagctttctcatggcaacgtaagtgcctttgatatgtgagttttttcctttttttctggaaacagggtcttgctctgttgcccaggctctgatcgtagctcactgcagccttgacctccctggctcaaacagtcctcccacctcagcctcccaagtagctgagaccataggtgtgcaccaccacgcctggctaattttttaatttttttgtagagacagaatctccctatgttgctcaggctggtttgaaactcctgagttaatgtgatcttctcaccttggcctcccaaagtactgggattacaggcatgagccactgactcaatctagttttttccttttcagtagtcacttttacgcttatgagtaaactacaattttatgaagcctgtggatgctggagtgatacttacagccctggtgtgtcctctrtgggttcagcctgccctgtgaactaatgaaatttaaccagtgtggtgcctccctcccatttagacttctctctctgaccaaactgcctctgttttccttccctttagasccccagaagctgtgcatgctccatgtccagcaataacttttctcctagattctttactgcttgttcgattccagatgcaagagatatagcttcacccgtgcttcctatcttcctgtgatttctctgytaccgcagagggtagtcaccaacctttagctcaaacactgatgccgaggctacgtacagagagatgctttaccagttactcaccttcctcactgggcatctgcagagactcctagagaaatgtttgtargacaacatgagttataaattttgcattcaaaatcttttaaattggtaacaaaatgaatccctgtcccacagtgtgaagagatcactgcttrgtcagtttccttttgggagaattatttccaatttttttaagttaaatgctagttattagaaaagtgaccacatggccacctgagtctgttcagatcttttggaccattttccttctcctcttctgcacacctcgatttgcttgtcacaggtgttccagagattccttctgttcttgtctttggcaggatcatcttgaattgagtagtataaatatatcctgcctctgtttctactatgaaagcccctctctctgcatttcctgcatggtttccttacgctgttctgtgcattttgggtggcgtctgcattcttttattatttttttgagatggagtctcattgtatcacccaagctggagtgcagtggcaygatctcgactcactacagcctccacctcctgggttcaagcaattctcctgcctcagcctcctgagtagctgggactagaggcatgcaccaccacacctggctaattttgtatttttagtagagatggggtttcaccatgttggccaggctggtctcaaacccctcacctgaagtgaattygcctgtttgtttgtttattgagacaagagtctcactctgttgcccaggctggagtgcagtggtgttatcttggctcactgcaacctctgccttccgggttcaagcaattctcatgcctctgccttcygaatagctgggattacaggcaccagccaccacgcccggctratttttgtatttttagtaggcacagggtttcaccatgttggccaagcctgtcttgaactcctgacctcaagtgatccacccgcctcagcctcccaaagtgctgggattacaggtgtgagcccccgcaactggccaggtctgcattcctaatgctacttttgagyccggcaatctcagacaataaaattcagtgcagctggggcagataagtgcccccctgctctcacatttctctttagtcttggcatcttcaagttagaaccaggtcattatttttgtatcaatgacatttcattatgccataaatactgaggtgttaaaaacaccaaaaaagccctaaaaatgcctagaaaattatccgaagcatttactattaaggctgataaactttttcttctcttttcaaatataaattgattataaagcatattgagtgacttcaagctgaaggttttcagtatctggaaaactgaaatttaattgcagccttcatgtcaccacagtgccaggtgcagcatagtgctcagggccccacgcaccttctaacttccattcccaaacaggtcttccctcctctccattccccaaaccccaaccatctccacctgctgacactgtagcttcatccccagatcacttcagctgaaagtggttttccyttttctggattccaagaaggactttgcttgcaaaaaatgtttatttacttatttttttttaaaggcaacagaagttccacaattaatcttttcttgtaagtagactttattttttagaacgggttggccaggcgcagtggctcatgcctaaaatcccagcactttgggaggctgaggcaggcagatcacctgaggtcaggagttcgagaccagcctggtcaatgtggtgaaaccctgtatctacgaaaaatacaaaaattagctgagcgtggtggcgcccgcctataatcccagctacttgggaggctgaggcaggagaatcacttgaaccggggaggcggaggctgcagtgagccgagatcacgccactgcacttcagcctgggcgacagattaagactccatctcaaagaaaagaaaagactgagagacagcaaacgagacatagggtttatcaggggaacttacttacagggatggtccagtggtggcaggttggacaggagaaccactaccatttgtaaaaagcatacagtttatatagcattttcacttagcaccctccacctagcaacctccatttaacccaaaacaaagggacttgatcccctgtatgacctgcatttcaagagacaggccaggggtttggatgtccatcatgggtaaggagtgaatccctgggttggccactcctggattccttagctcagaactctgaatgcacattcttcttgatcatagtgtcattctcagggcatgcctaggttaagttattgctgtcaggtgcatctctatacacttcctaatgtgttgctcttttatgagtgaattacctttaatttggccttatgttttctatgtctatgttgtgcttctcttttattcttatttaytcagtgtatatttcttaagggcatattaggcactgctgtgtaggtctggaaaaacagggaacacacaaagtacctgccttattagtgccaggatttcagagaaaacaggcaggtgacagacaaaccaatagatggcatgcagtataagtgctatgaaaaaaaaataagacagtgtaagggaaatcgacacaggagaccttaaagagaaggccttctggatgaaaggacactttgagcagacaccagggagcagtgagggaggaggtggccatgtggatatctgtctagtggaagagcccagaaggcagaggaaacaacacaagttagacagttaagaccaaggccttaggtggggtggcaggatggctacatgggactgagggaccatatgggggtgggacatagtcaaggtcaaggtcatgtagggtcttaacaggctgtagtaaaggcttgaatttttactctgagtaagagggaaaatcattggctttttatttttctagaaatagggtcttgctctgtcacccaggctggagtgcagtggctcaatcatagttcactgcagccgcaaactcctgggctccagcgatcctcccatctcagccttcctagtagctgggactgcaggtgcacaccaccaagcccagttaatttttaaattttttttttagagacaggatcttgctgtgatgcccaggctggtttcaaactcctggcctcaagcgatcctcctgcctcgatctccctaagtgctaggattacaggcatgagccaccacacctggcctccattggagggttttaaagacttatatacttagttaaagcagtctgtagggggataaggcaagcctggaagcagggagacccgtgaggaggctcctggacaacgtagggacaacaggccatgactagggtggtggccatgagaggtgagaattaatcagatcccagttcacagagttgatgggatttactactggtctgactgggaaggactgtaaagaaaagcagggagtcargaatgattagaaacaaggtttgtgccctcggcaactggaggaggattcctgatgtcrtttacagagaatggggaggggatctgaggtgggattaagcttgaggaacaaactcaagttgggttttggacagactacwttcgaagttcctgttggacgttgaaggctgttggctgtgagtctgccttccaaatccctgagtccttgaattcaaggtcgtgtgttggccgtctttgtattaggacatctaactcttgtgtttgacttaatgggattcaaatttgcacrtgtgtggttttctgaatgtggcctacagtttcacttggatcttcatattctttttcatcataatctgtaaaagcagaaaaaaagaccattggaaagaaatgctgtatgaaactttctgaaaatggatagaaccagaaatgatgctgacaggagttttagaaatgaaaaatagagagtattcagaccaaatataagtaaattagcataaatcagcattctctgatttccacgcctacttacccaagttggttgactcaacagctgctaagactacagctgtgtgaatyctccayattttttttttttttgcmtggaaaagtgtttcagtttgkcattgsttcatcatttcgaattccatattaggttaccyttttttttttttttttgcctgaccatagtacttaaraaaaatcttgcaactgtccttcattctgttgaaccaactatatcttatgttttcacttgacattttgttttagatctacttggggctttatttaaatttttttaacatttaaaaaaatttttttacttaaataatgaggcagtgtctcattattatccaggctggactgcatggggcattcatagytcctgggctcaagcaatcttcctgtctcagcctccaaagtaactaggactaacagcatgtaccaccacatccaactagtttttttcatttttttatagggacggggtctcgttatgttgcccaggctggtcttgaactcctggcctcaagtgctcctcctacctttaagtgctgagattacaggcatgagccaccagacctgaccttggggttttattatttgccttcgagccccttcagacagttcttcttggaggtttggggaaggcttctgtaaagaaaacttccttayacctgtttgatgatggtaaaaggtccaggtggagaaagacttcctaggcagaaggaaaaggaagtgcaaagctatgtagcctctacaagagcacatgtgtagtttagggtggctgcataggacctgggaagagagctgggtgatgcagggcagatgactggcaggtaatgaaggtacttatgggctatgctaaggagtatggaaaatggggagtattcaaaatttagagcccagggtacagtgatgggattgcattttttgacaaagctactttgactgccatgtaaagaacaaatgggaggtgagggagcctgattagaaggtccttgatgatgcaggcaaaagatgatgaaggtctcaaagttctttgagccttgactggaacacatttagtgtgacgtgtgtttataacataaaattaaatacgaaagcagaaacattggtgatggagaggagagcacaaaattggggagatattgtagccaggttgaaagcttgtactgctcactgcacaacagccagtaagtcaagagacaaggagttagagtaaggaagatgactttatttggagagccagcaaaccaagaagatggtggactggtgtcctaaagaaccatcttaaaagacatgaatctcaagcttctttttatatttgggaaaggggaacaaggagagggttgaggtgacaggtgaccacagacatctgagcattagcaggcgtccgagggtgttacattgaatattgcattgttacttgtgtctatgccctttttatttcctcagtggttagttttgggaagggactattatcatccttgctttaaactktaaactaaatcccccccatggttatcttggcttatgtgtgggaatgagcaaagatagtcagcttgagcggttagaagcaagatggagttagttagctacgttatgtttctgtaactgttacgtcttacttgtaggattacaacatctacttggatgaatggtgatgtcattctagcatgaggagcaggtgggattaggttgaggttgaatgggaccatagttctgtcaggacgtgtcatctttgtggagcccaggggtcatccattaagcagctgggaatacagttctggggctcagcagagacctcagcctggaagaacatgtttagaagtcatcaacatctcattaggaaagagaaagagatcgcccaggagaggaaatagagcaaggagagaaaatggtcaacaagggaaaccatgctgggattgagtctctgtggtaccaatggtcttactattgacgtcagagttaaaaaagaagagagttatattcaaattctggttgagttaktctcttattaacatttcctgactcaccaactggtaaatgtccaagaaaaatatatctttttgttttatcagaaaatatacatgctatttgatcactcttcaggcattaacaaatggtgtctatgagaacattttaacaaaatgtcctttctactgttaatacccacagcaaccaacttggaaatcagtcatcatagaagatgactgcaggttctggctttcccaaatcaccaataattcacacctttgtacatggttctgtgcatgatctgttcctaatattatgcaacacttgtgaaatctttaggactttaagtaattcatcgttttgccccaaacctagacactactataagaaacccaacaggctactcttaccagcaataggggttcctgaacaatatcacggaacaatgagaaatcctgcactcatgaattctctttacaaccccaggtgctcaagcatggtttttaagggtgactccctggccacctggtaagtctgagtgacttgcgggcagctgtctttctggagcgggagttattctctgaagccatagaaagtgtcagggaaggctggatacacatcacgtatgtgcatgagaagtaatactttcaacagcagcagcatcttccaagtgataaaaataactcagctttagtcagtagcccagaagccaagtgtcccctttcactgcttgttctctgttggtattcttcaaagggacatcgtrtctttcacagtttggaatgtgatgtttctgttctyactgacataactgtcttagtatctgctcctcctcttgtcatatatttggaaggtcttcacctcttgatcacttgcattttacattctacttgtctattgttcattcacacggcaagaaatgacggctacctgcygggcattagttagcaaagctgcttatactctgatttctattgttctcccagtttttagactgtagccgtttaattacaatgcagcagctttcaygtcagtatttctcctgaaggtcttagtttattttattcctccatcacagaaggttccttgaggtcctgtattctgaaaatagatgcatttcttccaaaatactggatagcttttagatttttcaaagttcttggcaagtctacttttggaaaccttgactgacttgcgaatatgatttctccttttttcttagctccgggttgagctccttctcaagagctcttatgttataaagcttgtgttcatgagcagagaaggactgatagtgggtgttattaatcattgaaagatgtggctgtgactgctattatttcctgtgttaagcttcccaccagcaaacctggccaagtgctttggcgctgtggaaacagccttcgtgtacacacttcttgacccttcactcccttcatgcccttcttcccatcaagacttaatgattggctgggcatgrtagctcatgcttataatcccagcgctttgggaggtcaaagtggaaggatcacttgaatccaggagtttgagaccagcctggaccacataatgagaccccatctctccaaaaaaaaaaaaaaaaatattagccaggcatagtggcaacatgcctgtagtcccagctacatgagaggctgaggctggaggattgcttgagcgtaagaggtcggggctacattgagccgtgattgtgctactgcacttagccttggtgacagagtgagaccttgtctcaaaaaaaagaaaagaactggaaaagaaaaaagaatggtgttcatctccacccagcatgctagagcaggcatgccattcattgtggaggcaaaactcccgcatagctgccaaaataactgctgagtgctttgcgatggagagaaacaaaggaatgttgggtcactrcccgagtcatggggtctctgcctgagccatagaaagcttttgatttctggagccacattgaatgaactgattatgtttaaaattataaaagaaaaatatagcctaagwtaattgagtgcaataaaccaatttaacttatttgttcttacgtgtaacaattgttgagtaggtaccatggtacccactctattgctaakctgtggaaggagccttgctttggaattctctcagctcctctttcccatcatttccttagctgtgtcccttttcagcctcctgtgctaactgatagcacatgtgtttcagaatggaacctggaaaaggaatgtgtgcagccctcgtaaggatataccgttccacattccatatgctgttagataatatgctggctagaccgtcaacagttaccccaggaagggggaatttggattggaaagaaatcaaaggaattggaggtaacataatggactgcagttaaacagtaatagggtggtctggacaactggacgaaggccagtttctaaattgcaggcaatcccctctgcccttttagaacaaggcaaggtccactgaatggagaagaaggcaggccatcagccttcttagggtttaattcagacacgggctctgagctttgtcttttgttctctttaaaggaacaaagccattgaatccagccagaaaaacctgtgcgtatccatcataaacatccacaaactcttctttaatctcccttgttattctccctaagaagtaaggctccaacataagttcttggttgcatctgacaagtgtcagctgatgtccatgaccccttcgtttcctgtgtcccttctacttgatgcaatgactggcataacgtatttgttggaatgaatgaatgaatggcattggtggctgggcacagtggctcatgcctctaatcccagcactttgggagtccgaggtggctagatcagttgaggtgaggagtttgagaccagcctggccaacatggtgaaatgctgtctctactaaaatttcaaaaattagctaggcatggtggctaatgcctgtaatcccagctacttgggaggctgaggtcggaggatcacttgaacccaggaggcggaggttgcagtgagmtgagatcacaccactgcactgcagcytgggtgacagagcaagactctgtcaaaaaaaaaaaaaaaaaggaaggaaggaagggagggagggagggagggaaggagggagagagagaggaagggtgagtgagtggaagaaaacaatgaaatccagttctgagggtaaggagcatgccatcaatatgatgggggatgtgatatggtatgaggatggggtctttcaaactgtattgtgtagaccagtagaccatgacaaataggcgcgcgcacgcgcgcrcrvrcrcacacacacacacacacacacacacgggcttccatgttcttacaaatgttgcacactatatctgactgtgggatcacagtrtacgtttgtataccaaagtctctgtaaagacctgcaatgaagtgaacccckttaacctttcttttactcagtgttcccctattgtatttgactgtggaaccctctgcgtcatacccttttacatcccagaacccaccgaacacagtttcttcaacattggcagaaatttacaaaatcatcgtagtcttgagtccagctgacctgagtgtgaatcaaggtttaccacatagtgtgtgatcctgagccaaattaagtaacctctggttccctccttcctcatctatatgatgaggataatgtgcatctcctaaaaggagagaatgaaggcagttaatgcaggtaatccatcttgcgtgcrcccagcacagggtggctcttccctggttaatttccaccctgatgtgtagaatttccctgcaacactctgctaccacaaagaggggcttcttaggatataacctattgtccttaaactttatgagcagtgcaataattgttatttgcacctgtaaaatgtgaataactggtctttctttttaaaatactttcccaaaggaaaattatggcaaagagatcatgtcctaactagtttctcacgtgttggtgctatcacctcctgagttttggcaacgttatttctctgctttttttcttgactcccctctagttcttctaaattagatattaagcaggagaagtatttttaatatcctggaaatgtgttttattaatctaccaaacaaatggctgtccaacaactccatgaaacaggaagaacggccactagcattcattttgcttttaccaggcaccaggtagcgctgtaaactctttatgtgtgtaattcatttcwtcttcacaacaactcgatgaggtaagtgctattatctgcagtttgcagagaaggaaaccgaagctggtggagtaacatgcctaaggccaccctgccaggataagatgaatgaccacgactctgagtgactaaagccttaggaacaaagatgagttgaaaatgggagagccacctggggtagaaccccagagtttttattttcttgcaaagttttagtaaaactttctcagttttcaggaaacaaaagttatatattttagagtttgaaatcacaaattacacaccactcccccatctctagcctctacatttttaagcaagatcaacagaacccagtggagttccatggagttcagggaccttgctccaggtgtgcctctaacactcagtcccttttccaaggcagggcacatataattgaatataggctgggtgtggtgtctcatgcctgtaatcccagcactttaggtggccgaggcacgtggatcacttgagcccaggagttggagaccagcctgggcaacttggtgaaaacccatctctacaaaaaatgcaacaattagccaagtgtggtggtgcacacctgtagtcctagctatttgagaggctgaggttggaggatcacgtgagcctgaagaggttgaggttgcagtgagccaagattgtaccactgcactccaacctgggcaagagagtgagaccctgtctcaaacaaaacaaaacaaagcaaaaaaatgaagattgccaaatatttaaatgtcagttactattaatttaaatgtccatcaggrttctccttgaagtcaaaactgctgttttccccaatgccagaactcctaacagtggaccccaggccgtaggaggtgatctagaattgcccctgaattaaaggctttgtgttctgcacacgtgatgcaacctcaggatcggacatgtgttagttcccagcctgtgtcctgtgacaccttggagaacaatcgagactggttgatatttggagggttaagcaaaggacctttcttttgccagctactctgccgtggttgaagtgtcttgagggtggtgaacgggtcctcgctgggcttgtctctgagctgcacacattgacttgacacaggagtcaagtagtaagtattggttgaaggaatcagcgatgtttggctacccattgtgtgctctctaatatttgctagggatatggtgataagggaggaaaaagacccaaggagtaatgaccgagcagctatgtaagtgaatcaatgatgtgaccacattgctttttcttagccgatagttacagctctatgcaactttttctacttattgctgkaggtaatcacattccaaccctgaggactgctcccatgctgggcggtactgcagtgacctctgcatttgagctggggtttcttgtatctcacgagggtcaggggcctgtgggaactttttgtcatctggggggacaaaggctttcttgggaaaaaaaagtctcctttttatcctctgcgggtgaaaaagaagtgcygttagaataggaaggggcttcttgtaggcttgaaaagagaaggacttggcaggtggcacctgggctttgttcagcagaactgagagggcaagagtatagctggcttttttgtaagactsatgaactctgtggcccattgatgagatgctctctgctctacaaagtggactttcctygaggtggaattttattttcctccctgtgctggtgttagattctctggatacataaggtgacccgaggagaagcaggcaatgtcatcacagtttatttgtaggatctgggcttcctccttcagaggaggtgccactcacacccgagatgcctgctctctccctgagcctttcagcacaagggcaggacggagaggagcccagctaacgaggggccagctcaaagtcattcaggaaaaacagatatacacagacatggccggaagcctcaatgtgtttttctactgcaggaaggttaaagtggaacttcatgtcatagatttaaaaaaaaaaaaaaaaaaggctggggccaggcacagtggctcacgcctataatcccagcactttgggaggccaaggcggscgaatcacctgaggtcaggagttcgagatcagcctgggcaagatggtaaaacctygtctctacgaaaagaaatacaaaaattagctgggcgtggtggcgcatgcctgtaatcccagctgctcgggaggctgaggcaggagaattccttgaacctgggaagcggaggttgcagtgagccaggattgtgccactgcactccagcctggtgacagaatgagactccatttcaaaaccaaacaaaaaaaaggtgggcatggcggctcatgtctgtaatcccaacattttgggaggatgagagggaggattgcttgartccaggagttcgagaccagcctgggcaatatagtgggaccccatctctacaaaaaaataaaaattagctgggtgtgatggtgcagacctgtggtcccagctactcaggaggctgaggtgggaggatcacttgagactgaggaggtctgggctgcagggagccttgattgtgccactgcaatccagcctaggtgacagcgcacatccttgtctcaaacaaacaaaaccctacatatcttaagaggtattggaaggccttaatacatgccaagcacataggactcaatgagcaattctgtctcaaaaataaataaataatagatatttaagaatacactactattaagaacctcagatatggaagttcatgaaagatacttttatttaataagacatgaagggaaatttagcgtcactgatggyatccttctctctcctcaccgcgatctcttccagttaactgctgaatgcaaatcaacagtagagcgggacgtattttgcagttcagttattgatttttagggagcctgggtgggtacccttatctgtgtctctttgaggacaatgacaggagccctcattgccaacagagataacagtgagattgtatttttatttgttccacaaacactgacgtgacaaagtgctcttactggtaggcttgaggagagtagcctggcgattaaatgttcttatttcgagtgagcagccgggctgtgttcagaagagcccattagcagagcacgggacccatcaacagtccaattaagagcaaagggatgtgactgcggaaatattaatgggctgtgttggtaaagctgcccggggttagcgccagatggagtttttctgtatacagtttgtaggaaactcttgtgtattttcacgcgggatgtccttctgcagagggggatggttttagataatgactgttgtgctttttggggataccacctgcagagatgtgtttattttgrgtgtttatagattgcagaaagctggtgaaaccaccttgagagaggtgatcctttgattgaatgtttttttcatccaacaccaaaaaattacaggccatgattggattttggagctgattcttgctttgtaagactgcatggttttggtgaacatccatctggttgttttttttttttttttttttgagtctcactctgtcacccaggctggagtgcagtggtgcaatctcggctcactgcaacttccrcctcccgggctcaagtgattctcctgcctcagcctcccgagtagctgggattaccagtgcccaccaccgcgcccagctaatttttgtatttttagtagagatggggtttctctatgttggtcaggttggtcttgaactcctgactgaacatccttcttgaatgatgaagtcaaccttatttacccttgaaagatgacttaatccttaccaagagagcttcaaaaatacctgttattctgtaccttcgtttaaaaaataagtcctattgccttaactcctgtccaatgcctactgtagctctgtttacatattacaaaataaatagaaccaaccacatgtctttgaagtaccagccctgttagtccatggtaagatttctgcctaaaatttaagcatcttgacaacatgcgggagacttaggggcagagaaggaccatttctcagaagaataacccctcagctcagcacagttgtgtcatctgtccaaggyagcactttagcagtttcctaaatgagggagggtattcatgtgtgtatgcatgtatggtgtctgtgtgtgcacacgtgtacatgtgctcacgcatgttataactgtagaaaacaggcaggggagcctgtgatttgccttgtgtttctataaacccccctacagctttaactaatttccatggttgttgatggaggttcagatgtgaaatctaatggtatctgtgatctgcaaaatatacatattggccgggtgcagtggctcacgcctgtaatcccagcactttgggaggccgaggcaggaggatcatgattgtcaggagattgagaccatcctggctaacacagtgaaaccccatctctactaaaaatacaaaaaaaatcagccgggcgtggtggcaggcccctgtagtcccagctactcaggaggctgaggcaggagaatggcgtgaacccaggaggcagagcttgcagtgaactgagatagcgccgctgcactccagcytgggcgacagagcgagactgtctcgaaaaaawaataataataataaaataataaaataaacccattgttcatctaagaacctacccatgtctttcgggaggctttccatcttatcttgtcttggttcagacagtcttccatgggacccactgataccctggagcatctctggaaggttgaagcggaggacagaggaggcatggaaaaggtgtgcagtaatacataggaagcttccaaagasaagtgggtgcaagacagcacagaaacatgttcagttgcctcagctgctgatgttcaaaatacctgcagaaaatcaacgctgctacacccaaaagaaaaggaagatggaactgggggcctagagtgaattttttcaaaggtaaaaaggagcccaaatttcacagaatgatctcccrcttcagaaagggaaaccctctaagtacactatacacttccctgcctgttttctggagagtgataccgagtgttggcactgtctgcaaggaaggaagtaggactttgactaattgcacaaacagcaattttgtgtttttgaagtgcgaggactcagtcctgtgtccacgaagcctccttcaggaggttacttcttgacatagcccatcaaccggacctccygttgctaggttctgagccttagggtgctttcaaatgcaatatctaggccaggagtggtggcccacacctgtaatcccagcactttgggaggctgaggcaagaggatggcttgaggcaggaggatcgaagtcaaggctgccgcgagctgtgatcgtgccactgcatgctagcctaggcaacagagcaagaccttgtttcaaaacaaaacaagaaaaaaaaaatatgtgcagaatccactaatggaagtcatcataaatttgttgccagaatgggaatgtatcagtttatacttcctacattttgttttttgtgatgactttaactttggatcattttatcagtgactggatgaaagtttatctttattttatctaatggggggggggaatccaaggagctttttaaagacagccagtataattgattataaagggtagttccctgctaagctgaaaatgctgtcttcgaacactttaggcatctgtttctacctaagagatgcattgtggwgcccagtctayagcacctgccactggtcttcaatgtgttcagtatgtatcctgataatatatgaaacatcagggtccgctcacctgcttcaggtgctgtgtgtactccaacaggtattctacaatccgagctgttcatcagttgttaaattactgtgatttgagtcccttcaaagtgagatccattggcagcaggaactgttatatagtattatgtgtgtgtttaagggcagagggatggtgttatctaactgtcctgtcccagtttkcaggcatggaaggagttcctaggatgtgtgactttcaattttaaaactgagaaaggcctggacaaacyaggatgagttgtcaacctgcatgggggcaatggatttggccatgaacttcatcatttcaaagtattaagttgttggcattctgaatgcccctgaacctattttgcatcgtagagtggacttgttccccagtgacccatgtccacccctagtggactcgatcaactcctgacacacccctactaggaacacgaaaatggttgtagaatgtgtttcattgtcctcatccacagatacagacactttggtgactctgtgttctatctgaatgggggctgagactacaggataccccatcccatttctgtcctctgtccttcatccaaggtgtcaccatttgtatctatcaggaaggaggctttgcagctaaaatttaaaataataagaagaatatatttccgagccagagattagatgcctacatatctcttttggcctcagcattctgtggtcttctatggagaaaggctaattttctgaaggctttgaatggaatgaaaactgcctgttcaaatggttctgaggatactgagagacgctcagtgtgtggtctttttatttttagtaayagtgttggaaaaaatcaggttatgtttacgctgagtgtgtggggggcgctggtgagattgtgtagtctagaaaaggctagaattataaattattataaacgttggccatgtggggaaattcttataccaaaaatactgcaatgtatgtcagcctatagattttcaygtagtttcttgtccaaaactgtatatgagagcagaaatgattgattatgttatgttcaatgtatacctaatatctagtgctgatacataaataaacccatcatttgtgacaagggtcttttgtccgcatttaattttattttgttactttttatttatttatttatttttcagccagggtcctgctatgtcgcccaggctggtctcaaatttccggactcaagcgattcccccacctcagcctcctgagtagctgggactggaggtgtgcaccaccacacccagcttaattttatttttatggccaaatatgacacaggtgaaagccattacccagaccttcaaaggagtgtcacgatggggttggcaatgaggacaaggggtgatgaggaaaatacattgctggaaatcaagttgataataggtttggtggaagatctaagaaatgtagtgtggaacctctgaggtagggaaactgggaattcttttctttagaatatacatgtatattggcatgtatgtagaatatgcatgtctggaactccagaatacaatctgggctgcagccatcagtgtacaggttaaaggttcttaggctttctctgttcacggcattcctgtagactaaaagaaacagctaacagctccgtttattaagtagtaaagcccaaacaacttagtaattatttatgacctaacaatttagtggccaattgaaaatacaatcacatcaattcaaaagaaaagatgtattttttcatttttaggtgatggctggttttatgcatcaacrtgsgtagggcatggggcctagatatttggtcaaacccctgactgggtattgctgtgaaggtttgttttttagatgagattaacatttaaataggtaagttttctgggtgcagtggctcatgcctgcaatcccagcactttgggaagcggaggcaggaagatcacttgaggctaggagtttgagaccaccctgggcaatatagcagaacctgtctctaaataattagatagataattagatagagatagattagattagagaggtaggtaggtaggtagatgatagatagatggatagatagatagatggatagatggatgtatagatagatgaataggtaggtagatagatagatagacagatagacagacagacagactgattgagtaaagcagattatcttctatactgtggaaggcctcattcaataagttgaaggccacaagagaaaacagactgaaacaggctgaggtttccttgaggaggagggaattctgcctctagactgtccttgaacttgagctgcagcatcaactctaccttaggtctccatcctgctgaccttcccagcagattgtggatttgccatcccccacaatcatgttagtcagttccttaaaatcatcactctctctctttctggttttctcttgaatacacacgtatacgcacacctccccctctcttatctggagaactccgccttctacaattaccagtgggatgtgtgcacctgttgggcaccgcacaactcccctgaccttggaatcagattggacaacatttcctattcckctttgatttttctgcagtactggcattttaatcccagcaacctctgaaaacctcatgttgcaaaaatgacatcaacaagaagaatgcttatgatctaatgttgaaactgtgaactacctgaagtgaatcattagcccagtgtgtaacaagtattgctgtgtttccctcaaaaagttaaaatatccctcagtgcctctgtgagttcgctgtggcatcccatccaggacacctgggtgcacggtttgggagctgcaggtagagtggcagcagtagtcatgggagtggatgagttcaggtggagggcacaggaggtggagacagcagagaagagcttcacagagaacatctaggagggacagctgaagaagcgctttggggccgggcgtggtggctcacgcctgtaatcccaacactttgggaggccgaggcgggcagatcacctgaggtcaggagttcgagaccagtgtggccaacatggcgaaacaccgtctctactaaaaatacaaaaattagctaggtgtggtggtgcatgtctaatcccagctactcaggaggctgaggcatgagaatcccttgaacccaggaggcagaggttgcagtgagctgaaatcatgccactacactccagcctgggtgacagagcgagacgttgtctcaaaaaaaaaaaaaaaaaaaaaaaaaaaaggcaggggatggctttggaaaggagattctaaagggagactagagacacagggaaaaattgatgtactgtctgtgaacagcaaggaaaatatgattacacctaagagatgaaattggcataggcgagaagtcagaaaaataatctatacagcttgcatggttggggagttaggagaggccaaggccacgtgcacgtagagcaagaggtagaagaggcccgggggctagagcgcaccctggtggatagtgtgagaatttcacactggctcaagccttgaagaccaccccaggggtgcgccttarcaacgcacttatgcaagaccccaacaactggcccttgaaaggagcttttcactggtggggtgtggccctgcttgtattcagaaccatagttttaacaagccagcattaaatccacaagtctttgccaaagcactttaagcctcttgacatttattggaattaatttacctgcaaggaagttcatatatctagctttgttaaccctacattcgggaaaatgtttccatgagataactaaaacccgcatgaatgatacaatactgtgacaaaacccaaaggtggcataattagcatataaaactcccaaattttttttgcaattaccatcgtctagtaactggttgtttcattaggtaaaagtggatggaatcagtggaattatatgtatgatatgaaatgctctttggcatctattaaatttttattttgaagaaaaaataaaggacaaggaaagcatcctattccaagactccaaggagattatatttttaattccacaccacagaaaatgcaaacaaatttctaattacacttcatgcatggagatctgtagaggaaaaataaattggtacccatccacccaaaagccacaaatcagacatagaatggctaatcacaaatataacttgtgtgcctgatgctgattactttctccgcagtctgttgtgaacaattaagaatttagatcttgggctgggagtgctgtttttaaagtgtgactcaaaagcataaagttcatttaaatttctcctaatcctggtttgcaatttctattcctttttggttagagtattatttatcttcaggaggcccctattatactataaatattgccttggggcagtgttcatagcaccacagcacctatctatccatttatcagaataatcagcacttcctgttggctgagaaaacactgtcatttttactgtttaaaaacagaacagctttcagtagcaattgccattaattgatttcatggcaggaagacggaaaattctccattttttcattctcataagtcacctaagaacatcttaaaagctacagagaggccgggctcagtggctcatacttgtaatcccagcactttgggaggctgaggcgggcggatcacgaggtcgggagatcgagaccatcctggctaacacagtgaaaccctgtctctactaaaaatacaaaaccaaaattagccgggtgtggtggcaggtgcctgtagtcccagctacttgggaagctgaggcaggagaatggcgtgaacccaggaggtggagcttgcagtgagctgagatcacaccactgcactccagcctgggcaacagagcgagactccatctcaaaaaaaaammaaaaaaaatgctacagagaaaggggacagctgccatggaaaacagtggggcggttcctcagaaaaaaataaaaatagaattatcatataaccctgcaatttcacttctctgtacccaaaataattgaaagcaggaacttgagatatttgtacatccacgttcatagcagcattattcacaattgccaagggataggctcggcacagtggcttatgcctgtaatcccagcactatgagaggctaaggtgggcataatggatcacktgaggtcaagagttcgagaccagcctgaccaacataccaaaaccccatctctactaaaaatacaaaacttaactgggcgtagtggtgcatgcctgtaatcccagctactcaggaggcgggagaattgcttgaacccaggaggcagaggttgcagtgagccaagatcgcgccactgcactccagcctgggtaacagagagcaaggcttcatctcaaaggaaaaaaaaggagccaaaggatggacacaacccaggaagaatggataaaatgtgaaggaaattctgacacatgctacaaaatggatgaaccttgaggacattatgctcagtgaactaagccagtcaccaaaaagacaaatagtataggattccacttgtatgaagtacttagggtagtcgaattcagagacagaaagtagaatggtgattgccaggggctgggagaggggagatggggatttactgttcaatgggtrtgcagtttcagttttgcaaggtgaaaagtgttctggagatgggtggtggtgatgatcacataacaacatgaaaatacttagtgccactgaaccggacgctcaaaaatggctaggttggtacattttgtggtgtattttactgacattttattttattttattttaktttttgagacagggtctcgctctgtcacccaggctggagtgcggtggcccgatctcggctcactgcaatctccacctcccaggttcacgcgattctcccacctcagcctcctgagtagctggsatcacaggtgcatgctatcacacctgactaattattattattatcatttggcagagatggtgttttaccatgttggccaggctggtcttgaattcctgacctctagtgatccacccgcctcagcctcccaaagtgctgggattacaggtgtgagccaccatgtctggcctgaaatttatttttaaaaaagcaaatctacagaggagtgggctccaccatagaaattcagttccagttagtcagcagtagcggcctgggcagcagcaattctggtctaaggtgcggggtaatctctgaagtagttaaacacaagtggtgtaaccaatgtgtcaggatgggagaactgggcactgggaaagagaaagactagtgttgggaggagcagggaagcaccagcaaggaaaaagaccctgtacatgaacttggctaaggaattgtttcagtgatagaaataccagacactgtaaatggttgtgcacatgggccagagaggtctttaaattacatttgaaacatatacacctactgtgtacccataaaaattaaaaactattttaaaaaataaattccatttgagccactccttcaaaccacccagagtgggtagacgtctttcgtgcctctaagaagccccatctctattctgcgtctcaccttgcagggctgctcatctgaatcctgaagatggtggacacccatctgctagsactgaaatgaataggacagagggaggtgcagagtgaatggaycatactacctgtcatcttggcaacgtgtgattgaataaaacaacttctttagaagtttgatagagtgatttgataatgtaatttacaagtgatcatttctttttattttcattttcagttgttttttatagacaaagtctcactctactggctaccggctaggctagagtgcagtgccacactcgtagctcactacagcctcaagttcctgggctcagcaatcttcccacttcagcctcctgagtagctgggactataggcatgaaccaccatgcccagctaattaaaaaaaaaaatgtttttgtagagatgagtcttgctatgttgcccagaatggtcttgaactcccgacctcaagtgattctgtcacctcaacctctcagtcttctttttatttgtgtacctggcttcagcccttttgtttcttcaagggcctggacttgttactcctggcccaggagtatgttgttaaacactggattaatggtgtgacctatgcatctatttaatttatacgtatgtacagagagatttttgcgtgccgtcagtggctaaccaaatcaggcaaaccacagttcatttgagtaagtcctcccatgccatgaggcatccctgaaagggatccattctccttttccagagaattttctaggatcagtagcaaggcctggtgtccctactcatgctctttattgaatacaattcattttgagtracctttacttctcagtaatagttctttatttgtgaagcgcagtttgcaaacagcctaatcggcttctggcttctggttactagtattccacctgctttgtaatgccattgtaaaaaccagctgggtaggaaggaagaagatattgattgaatgtttttcactggaagaaaaatttgtgtagcaatgagactgccctagattcaaatggaatttgaagacaatgcccatgttttctcttcgtgtgtgtgtgtgtgtgtgtgtgtgtgtgtgtgtgtgtgtttgactaacttagggtggttttttttcgtwtttcttcttagtacctgagagttaatgtatcctagttaattaatgatagtatgtttctaaaaatcaaaggaagaataataagtataataaaatgttataaagttaagcataagatcttaggctaaggaaccactgtaaatacacctgtaatcccagcaatttgggaggccaaggtgggaggattgcttgaggtcatgagtttgagaccagcctgggcagtatagcgagacctcatctctacaaaaaaaaatttaaattagctaaacatggtaacatgtgcctgtagtcccagctaccacggaggctgagacaggaggattgcttgagcccaggaggtaaaggctgcattaagccgtgatcacaccactgcactccagcctggacaacagagtgagaccctgtctcaaaaaacaacagcaacaggccrggcactgtggctcacgcctgtaatcccagcacttcgggaggccaaggtgggtggatcgcttgaggtcaggagtttaagaccagcctgtccaacatggtgaaaccctgactccactaaaaatacaaaaattagccaggcatggtggcatgctcctgtaatcctagctactgaggaggctaagrcaggagaattgcttgaacccaggaggcagaggttgcagtgagccaagatcctgtcactgcgctccatcctgggcaacagagcaagacttcatatcaaaacaaacaaacaaacaaacatacaaaacaaaacccacagcaacaaagaaactatggataaattgacccagggtgagagtattagtaaggactcttggatttttccccctagactatggctcattagttattttatagtcctgctttttcagggatctttgtattatatcttagaccctgttttgttttgtttaaaaatgtgatgttaatacttgtctgtgggctggtcttgtcaagtcttgcaaacttgtactgctgttgtgctgatttcttggataggagcccgaggttatcatgtttccctaacaatgctcaatcttgcccctattcagcgactgactgtttagaaaascctggccttcttgggttgcccatgaacttgaccccttagatactggcagtgaagagcttgagttaaaaaaggagttgaaaaaaagtgtaagcaggtgactctcaaagtgccggtcagttgccaccttctctacttgaaataatcctagaaactctcacttctacttctcaaagaacaatccatagtcacccagaaacaagcactatatatacacaaaaactcgggtttctgacttgtcttcattccttcaacatgtccttgttacaaaagtgtgggacagtgatttgcaagttctttgacagtagtggttatactggggattttcttctatctttcaggtatggaactcagctctttgatttcaaggagggaaactcaagcaggctgcagcagttcaatgctctgcaggcgtcagttcctggcattatggagaaactcagaattattagggggaattatggaagcargatgaaatgagaaagaagggtgtgtatggcccctgagcgggcacctaagagtaagagtgagaaggtcatcttggttccagcctgtcaacccacagatgaggtccagagagagtatagagctagcaagcaaggtctcagatagttaaggcagctctgccaccagcaccttttcaaatgccttttgcaccrccttctgaatagattgtcttaaacttctcagacatgactaattacaagtggcyggttgatcctataataaccgatttgtctggtctggctataagattagagaaaattatgctcttaatgcagagtgtggaaaaacagaatggtatgtaatggggtggaagtttggctttgcatgtggatctgtctggacatgtatgaaatgtacatacatttcagaggggcaataaggggaagaaaataaagaaataatttgccattttctctcctaagttcaatttcagaattcagcaggaagctcctctctctaaatgaatacttcaatgactttgtaagaaaaattagataatttagagagttacattattttcatatttataatgctgtgagtaacactgaaatgagccccagcaaaggccttaagttttaggtataccagttaacaggacctgccccgctaaggcctggttggagtgatgtttccatcactccaggaccgtctaaaagaaagcaacactataaaggccttgcatatttgggaaagtaaaagaactttacttcatttccagtttttacttcgttgtgtttttcatcaagctcgttcattattactacggtatctctattgatactgttagataagttgtaaaagttcccataggctaccattttaatcattgtctctcctagaattgtttatttcatgcaagatgttgatattaacaccttatagaaaaaaaagacttaaatcataaaacttccatttgcttccttgtccccctcaccctggaagaatgaaaaaaaaacttgctattttttttaaagtcgatggcaaaatactttggtttagctcatgaaacataaatatttgtggtagcctagttggagaataaatgacaaaagcgcttttataaaatagctgttgtagttatataattcatttttttccagtatgctttaacatttcttgaatctaaaggtgtgaaaggcatggttatcaaaagcaaatagatgtgaatactgctgttattaaatgtcatgcttttcaatttgtcagtcatatattatctgaaaaataaaatggatttttctgttattatttttttcttttattttctcaactgggctgtccacaaaaggtttgtggcattcttgtttttccagtgaaaaatggaactttaattgcctttggatactttcataattatataaattaatactgacccccaaaacccttacatataggaaaggtacaactggaaataggatggcattttaatgataattagggaaacgaatgatatgaaattacttatgatttgtaaatgatgcttaataatttaagcagagagaggtggtaaattgttgtctacattgagagtgttttatgcataccttttggttatgcataacttttggttttccttttgtttaattattgcttcttagtgttttcaaaacacagcacaaaatatttgagtatgatttgttttctgaaagataagatgtaaagtgcaaactcattagatttatattagaatggatgcaagcttgctgcagtcttctaaattggtattgcttatcctttgttgagaactagtttgggtatggtcagtgttttggaaagccatttcatgagcactgccttcacaaggtaagatgccaaatacagacgtttcagaaatataagttcattgggttaccatcactatgatacccagcccaattatgttatctaagtgaaatgtttaagaatgtctcctaaaacatggctacctatttgactttaatgtgtttttgctgttttattaattgatgtraagtcccctataagtataaatttaagggaatttctcattgagtgctatgtgcctgacatgtattaatgtctcttcaatactctttgacatatgtagttttttgtttgtttgtttttgagacagggtcttgttctgttgcccaggctagagtgcagtggaacaatcatagctcactgcagcctcaaactcctgggttgaagcgatcctcccacctcagcctcccaagtaggtgcacgccaccatgcctggctaatttttgtatttttgtagagatggagtctccctatgttgctccagctggtctcaaacttctggactcaagggatcctctcaccttggcctcccaaagtgctgggattagaggtgtgagccactagttttatttttatttccattttactgacaagaaaatggagacacagaggatttaagtagcctgactgtgatcacagctaacaaatggcagagccaagattcaaactctagttctagagagcattatcattaacccattttctccaggccygggattctgggtctgatgttctgggtcacctcctatatgcagtcatgcttcaccctatcccagaggctaaatattcatgtcatctctgtgtctgaccttgtaactccctgattgggacccaggctgaactactcagcagtgaaactcttatgaaacaccaggggtttggtctaggtcctgctgcttacctaacaggaagccaatcactgagacaacaagtattgccggggaagaaagctttattcaggtgctgcagccaaggagatgggagatcagtctcaaattcatctccctgtctgactaaaattagggggttatgtagcagggaagaaatgtaactatgtgtgagaaaacaggaattagggagaggtaagggaggggagttggtcaacaggaagcagggggtcaatgaggcatcatcatgggtraggggtctgacaatttattgtttagatgcagtgatctggtgagtgtcagcttcttgatgctaactgggaggcctgatggtttcctgagaaaagaactcagataagtcaaatgtaaccatctcaagttttaagactggggcgatcagtttttatgttttttttttcaaaagaaaccataaacattggctctatggaacaagtgagtcagtttaaaaacaactttattaacagagttgatgatgtattttttatttactaggaataaatgatcaattgatatattgttttcaaattttcaggactgggttctttcctcctctcctttttataaccgcaaaatatcctcacaaacaatgtaattaatataaattttatctcatactttttgagatacatttacttttctgtttatagcttgtcttagtttgattctatgcactgagctgaacaccatacctactaccattctgctggaatcccagttttattaagtgaatttgcaacacatgatatggaatcactgtccttcagcatgtgtcttcccaattttcataactgatgacataactttatagggttcgccagtagcattgttatgatttataccatatcacatttgtagtatattgcatagtataaacatatgctgtttatatacatagtatataagtagcacatagcatatactatatacatagtatataaatagtataaatatatagtatataaatagtataaatatatactatgtaattagtatataattatactggagtgtatatatatactataaatatatacatagtttatatttatacatagtacataaatggtgtatatacatagtatataaatagtgtacctagtatataaatagtataaatatatgctatttatatacatagtatataaatagtacaaatataaataagtttataaatatattttttaaacagaagtataaatatgtatactatattatacatagtgtaaatatatacaatatacttgctgctcagtggaaaataagaattatttgcttatacttaattaatacaaaatcttttctagagtaaaatcattataaattcccctttcttcagagccaaaggagaaaaataaattgtcttcaaatataagtgcatcactcattgcatgatccaccctttacagacctaaaggggcaatgyacgctctcctggagtatgtcaatgggaagttgagcatgaatagccctgcatttagtaaatcagaagttatttaactactcggaacctagatgttcctatgtgttagataggaatgaaaatacccatctttccaggtttactcacatttaaatatgatcgtgtaatgtacttagtacagtgcctggctgccttctagtgtcggcactcaataaggagtagttatcattggttcttcgtagactgccattgggaacttgagcaggtttggagaagtggccattagcaaagaaatcataatggaaagaggctaggaatatacacaaagccagcactgtcttatggggttgcctaaaatataggaaattatggaaaatggaggcaagaaaatctctattcttgacttagaacttgcttaacttgtctaatgcataatttacctaaggattcaaaagtgtgggttgcttaagaataagcagaaacggctgggcgtggtggctcacacctgtaatcccagcactttgggaggccgaggcaggttgatcacctgaggtcaggagttggagaccarcctggccaacatggtgaaatcctgtttctactaaaaatacaaaaattagccaggcgtggtggcgtgcacctgtaatcccagctactcagaaggctgaggcaggagaatcacttgaacccaggaggcagaggttgcagtaagccaagcccacaccactgcactccagcctaggtaactagagtgaaactccatctcaaaaaaaaaaaaaaaaagaataggtagaaacttgaaaagcaaggctatgttaccctttggacattttttgtttgtttgtttgccatttaagaggacgtaaaaggagatcattagacagaaagtttgtaagttttggaagtaaaattttagagcaaaaggaacctttgcaagcacttttgatatagatctgtcattccagagaatccatacataggcttccagaacatctaactaagccatagaccttggaggtatcaggggtcttgctgccctcttctgccttatagaatcaaataaattcatagagaaacagtaggggcattttttatttttgagrcagggtctagctctgtcacccaggctacagcacagtggtgtgatyatggctcactgtaacctcctcctaccaagctcaagcaatcctcccacctcagcccccaagtagctgggactacaggtgcatgccaccacaccaggctaattttttaattttttgtagagatgggtttttccatgttgctcaggctgttcttgaactcttgggctcaagcaatctgcccaccttggcctcctaaagtactgggattatatgtgtgagccactgtgcccagccaggacattttatttttatcttatatatatttttttatttttattttttgagacagggtctcactgtgttgcccaggctggagtgcattggcatgatcacagctcactgcagccttgaacttctgaacccaagtaatcctcccacctcggtctcccaggtagctgggaccacaggcaagcaccatcactcctggctaattttttattttttgtagagacagggtctccctgtgttgcctaggctggacttgaactcctggcctccagcagtgctcccacctcagcctccctaagtactaagattacaggcatgagccaccatgcccggccagtgaggacattttaaagaaggaagcagaagaatcaactagactgattgccctctccaaaattaaatattgcaaaggcaggagwtggataagcrtttggtcatgaaagatgttaggatgccttagaatcttcgaaggctaaaaagcagcagcattaatgaagttgaatgtatgaaagcagatttcaggtgttgaagaggaagcagctatcaatgcagagattaaatagacgaagtcacaagaatctagcagtagtaattatgacttaatgaaattccagttaacgaagcaatgaggtagagaaggtaggagaaaacccatcaggatgaacaaagcgtggcttgaatagctgggtggccaataagaatgctgcaatgaagcgaagagcatggcagagggccaaggaggagaaaggacaaacagcagcttcaagccaggaaagctcaggcaggaaatgagaagcaaatttcaaaacacctcaagggaaacattctttaaatacatctgaaagaacaggacagggaaatgtcgtttctattaggtagaggagggagttggttttatttatttatttggagagggagttttgctcttgttgcccaggctggagtgcaatggcgcgatctcagctcactgtaacctctgcctcccgggttcaagcaattctcctgcctcagcctcctgagtagctgggattacaggcgcgtgccaccatgcccagctgatgttttgcatttttagtagagacggggtttcaccatgttggccaggctggtcttgcactcctaacctcaggtgatccacattccttggcctcccaaagtgctaggattacaggtgtgagtcacggcacgtgatatcagtagtcaggttgtctgttttcttttccatgcaaagcaaaacttctttrtttcaagagtctggtaatatttactggaagttgggagagtaagagaaatgaggagaagagctgacaaaaggccgttatagcagactttrgattaaaatctgtagacacccatgtcctgcctatcaggggtactgaaatatttctttagaatgattgcctcatggaacacccagcgtagagagaatatagaactagaaaaggtgcgagatgtcatttgtatgtaacaggaggtgaagaatggccttgaaatgacaaatctgaaggcttttatgacctggaagaaaatttgggatgggttggggtagcaggtgtcatcacaacatcaatttggaaatggcttgtaagctgtaaggtagcaggtattagcaatgtggttttaaaaagagcaactcctgtcagactaatgcatcctctctcggtgacagagtagatggaggaaaagtgaaagatgtaacctagattgattttaggagagttgctaatgcgtatccataagtcacacctgtgggaccagaaagaaatgattactttttgctgtacagctcttggaggggctgcctcattggagcacatgtaaagtgtgtttaattaggaattaaatggtcatagtggactgggtaaagagggtcatattaagaaatgttctaaagtgatcattaatagatccagtgctcattcaaaatgttccataacctgcaagatggcaggaaacacagaaaatggccaggtcggtggcaggggtaggagggaaggaggaatttaggatcagaggttaaaatgattatgattatttagaggcwcagtcagaaataatgtagtagaaggtcacgtgaaaggtagaagggcagggcagagtatgtactgttttgtgtgtgtgtgttattttttgagactaagtcttgctctgtcacccaggctggagcggggtggtgtgatctcggctcactgcaacctctgcctcccaggttcaagcaattctcctgcctcagtctcctccctagtagctgggattacaaacgcccaccaccacagccagctaatttttgtatttttagtaaaaacggggtctcgccatattggacaggctggtcttgaactcctgacctcaagtgatctgcccacctcagcctcccaaagtgctgggattacaggcatgagccaccacagggtacttactgttttatgggtaaggattatgatgatgaatggttgcctagaaggcctacatgctgagtttatctgggagtgrcatttattcctcaaagcgtatctttttcataatttcaatttttatttgggattcagggggtatgtgtgcaggtttgttgcctgggcatatttcatgatgccaagatttgggtatgagatcccatcactcaggtagtgagctaaaagcagtataaaatgggtttctttcttagccctgtaagttggttctttcttgaccaactaccctctaaggagagttaagagaagatcttgtaggtataaagctaaaaatcaataggctggcctacaaggtcaagtaacaaagcacgttgttttaagctcagggtcttaggcttagtggagcagggatctggtctgatccctacaagtaaaagaatgattagagacattgaaaaagccataaagatggttaaaaggttggggaaaataaggcttccaggccaaacaaaacttgaattcagtgtggaaaaatgttgagagataagttattaatgttaagtatgcaaagaactcctaaaagcacatggatgtcagctgttctatatttcttttgctgaccaactaagagggcaaattcttaactgaatgaagcatttgccctacatcaacttggaayagatttaaaagaagagagtatgactattactaaacatggagataagttagtgggggagggtatgtgtctccttctaagagatctttaaaattatgagcaattgtggctggaggatacatacatgttatacatttataaaatatttgagtttggactcaaagtagaaaatgaagatgagcccttttgtctctttcaactatgcatcaagattagtattagttttggatgacttagtctattgcaagaaagttttcactaggggttgggcatggcggagcatgcctatagttccagctacttgggaggccaaggcaggaggattgcttaagcccaggatttcagatctaacctgggcaatatagtgagaccctgtgtcttagaaaagaaaaaaagatgaaggaaggaaggaaagatggaggggtggaggagggagggaaggatggaaggaaggaaggaaggaaggaaggaaggaaggaaggaagraaggaacttacttgaattggcattttccttttcctatcacaactatgccttcagctttcttctaattaccatctaagtccttataataaggacttataaatccttacatctaagtgccttacagtagtgtatataaattcttactgtatttgctcacctaacagtcttcttggtgcctctcagctctgtgaatgaaccatgtctaccctgctcactcaccattgtaactctacttccaacagtgtttggcacatagtcataatatctgcaaaatgaatgatggatgttggaagaagtacagcacagaaggttgcaggcttagaaggttgtcatttatagaatgatttgtggaggctggaatatcactaagaagtatttcccgatctttttcatattgttgaagttgtactcctggaaatatgtgtcatttgaattaaagaacttcctctgtaagcatcttctttttaaatgcaaatggaatccacacaaaaactcatacatgaatgtttacagcatcactattaatagttgccaaaaagtagaaacaacccaaatgtccatcaactgatgagctaatacacacmatgagatctatctaaacaatgatactaatacatgctacaacatggagtaatcctaaaaacattacrctatgggaaaaaagccagccagaggaccacctgttacatgattccatgtatatgaaatgtcccaaataggcaaacccataaagatagagaaactacactagtggtttcttagagctggggaggttaggaggagatggggaataactgctaatgggcaaggagggtttttttttttttttgagacggagtcttgctctgtcacccaggctgggagtgcagtggcacaatctcagctcactgcaacctcygtctccctggttcaagcagttctcctgccttagcctccctagtagccgagattacaggcaggtaccaccacacccggctaatgggtatggagttttattatgggatgaaaaaratgatctaaaattatctgccatgatggcacgagcctgtgaatatgctaaaaaccactagattgtgtactttattttatttaattttatcttattttatttatttatttatttatttatttatttatttatttattkgagatggagtctcgttctgtcgcccaggctggagtgcagtggcaagatcatagctcactgcaacctctgactcctgggctcaagcaatcctcctgcttcagcctctcaggtacctgggactacaggcatgtgccaccacacccagccactgtaaaaaaattttgtagacataagaggtctcctaatgttgcccaggctagtctcaaactcctgggctcaagcagtcctcccacctggaacttccaaggtactgggattataggcgtcagccactgcactcagttgaattgtgcacttgaaatgggtacatttggctgagcgcagtggctcaggccaggcacagtggctcacgcctgtaatcccagcactttgggaggccaaggcaggcaaatcacctgaggtcaggtgttcgagaccagcctggccaacatggtgaaaccctgtctctactaaaaatacaaacaattagctgggtgtagtggcaggtgcctgtaatcccagctactcaggagggtgaggcaggagaatctcgtgaacatggggaggtggaagttgcatgacccgagaccgggccattgcactccagcctgggcaacaagagcaaaaccccatctctaattaattaattacttacctaattaatttatggggcacttggcatcaaggagatttctctagcaagaaaaagagcacaaagaacacgtatggtagacaacacaaaattcaaaatttttcctactttttagttttgccttttgctaagtgtgcttaacaattacacttgagaaataccttttctacaacataagcactgtagagtgttgctgttttcccttagaatgtgtgcaractcctcatcttgcactcagtatgttaggtctgaagtgtggatgtctgtgtgtgtcctgcccttcacgatgtgaacctgagcactatgatgccattctgttcagcattgtgtctgtgtttattatcccagaacccatggtaggaggaccacagatatttgctgagctatctatactttgatataaaggatataaagacctggggagattttctttcaagaaagagggcagactctattatgagcttaacagagttgcctgcttagaatatggttttttaaaaagttaatactcaaattattttcaacaacagtgccaagatcattccattgggaaaggaaaatcttttcaacaattgctgttgggaaaaccagatatccacatgcaaaaaaataaatctgaacgcttaccttatgccgtatacaaaaattaattcaaaatggatcaaacatctaaatataagagctaaaactataaaatgcttggaagaaaatgcagggcaaaagtttcatgacattgaatttggcaatgattttatagatatgacaacaaaacacaggcgacaaaagaaaaaatagataaattggacctcatcaaaatttaaaacttttatgcgtcaaaggacactaacaacagtgtgaaaaggcaactcacactgtgagattaaatatttgcaaatcgtacacctgataagggatttacattcagaaggtatttttaaactcctttaattcaactgtaacaagtttttaaaacccaatttaaaaattaggtctaagacttgaatagatatttctccaaagatgtacaaatgtccattaagcacatgaaaagatggttaatatcactagccattagagaaatgcaaatgcaaactacagttagatacatatcacaccccatcctaatgagtatgaaggagtatctcattgtagccctgaaagggttctgggaagttgatgctgtgcccacattatgtcttctgtgagctatggcttatattgggttggtctgcccatgcgcatcacacttcatgagaatatgacagatcgcattttcttaatctgcagacttaaatgtttttttgtttgctttgtttttgttttgtgtggtttttttcttttcttttcttttcttttcttttcttttcttttcttttcttttcttttttttttttgagacgagtctcatactgtcgcccaggctggagtacagtggcrcaatctccactcactgcaaactctgcctcctgggttcaagtgattttcctgcctcagcctcctgagtagctgggattacaggtgcctgccaccatgcccggctaattttttgtatttttagtagagacaargtttcactatgttggccaggcaggtcttgaactcctgactgcgtgatctacccgccttggcctcccaaaatgctgggattccaggcatgagccaccgcgcccggcccgtaaacatttttatgtttgcctttctcctagtcattttgccagtttcagsagtacatgggacattgtaatctctcaaagtgttttctaaatttaacttgaatctgtaatctagaaagcaaccaacaaatggccaatgcagcatgagtctcaatgtcccaccagcctcactcaattccccttgaatctttttgtcaccrgaagttctgagtagtttatgtcccaatgtggatgattttctaggttctgccaatgcagaggattattctaggttatacaggttattctaaagaggcccgagacagctatccttttctgagtcctaaggttgaacccatacatatatctatgcaggtgcatcctctggtgtctgaagtgcagcttcttaacatcccattatgggggatcagaatcttaagcaatcttcttagccctagacccccagtcctgaaggttgatatgcaagtggcctgaaaaaaaatgacattggctgccccttgcttctgaaggacttacagatactctctaagtcctatagcatgtgcacaagtcagaaagcacctcatgaaattattcatgcattcaagctggactgaatttaatccttcaaagagagacagctgtcaacttcttaagaagctgagcatgttttacagttttgaccttgatactcaagaaatgtctgtgtctgacctaaaacttgtttgaaataggttttcttttcacataatgtaaacgtatttgctttttcctcattctagaagcaawacatgttccttttcaaatattgtcaatttgaggcattttaagattatttcctttatttgttttttttgtgggctaggaaatctagacagaattgattattattatatggataacttttaagaaagaataatttcatcttaacagaatcatgttgaaactatcttatagaaggatatatagaaaaatataaaccaagattcatttcagaaataaattccatttacatggagaaggaaaatttcgagtcaaagtgacttacattgaaatcctggtttatgcatgaactagcaagtttttgaagcttgatttcctgatctgtawaactgaagattccatatttttctcagtgttactatgtggattgaataaaatattacatgtgaaagaacctgataggtttctggtatacatagtagctcccccaaaaatgatctcccccgttctcacactattttccttatctctaattaacctcgttttgttttttaaatatccctttttggatgtctctttagtagcacagaaaatatgtttctattgggttgtaatcattacaattcagtcattgagtatatacatatatttcccttttgggcattgtcacccaatttttggctattcaaatagatcttcattaatagttcattagttattacttaatttcaatataaagaaaattatacttctgagtggaaggaaatcccatgtcacctcttgtaaagaatttactttcttagtatcaaagtaacatgtttgaagctcagaatcaatattacatggacctattgaattactaggttcagaagccagtaagttcaagggtgaggtgataatcaggaattttggtgtttgtcaaatatccactgtgagccaggaactagagcaggtgttgtacrtgtgtttccacacttaatttcacaactctctattaggtatcattatcactgttttacaagagaggaaataagggctgcagaggttggttaactcaatgaggatagcacattaagaaagttctgggccaatgttgcacccaggtctctctgagacttttattattatccaccatttaattgcatttagggaccatrattatgaggagacatcttttacaatgaagaactttagtgtccccccaaagccaatgttagtctgtctcccaaaacagattctccccttttctttgactctgtcttctctcctactcttccttgcttgtcagaataacaggttcattgttgagagtgggttagtaaatacagcgaattccaaggatttagagtgttgcgaagtcaggaaagaagacctgctgcaggctgtgtggttctgtggggaaggaaaaggatgtctaaccatccaactgggacctgatctcttggccatttgggactgggtaggagaatggctagactgacagccctgtgatttggcccttttcctttggaggggtgtgaatctgatgctgtaacaatttctgccttctgttggtggtayggcttggccgtgtccccacccaaatctcattttgaattgtagctcccacagttcccatgtgtygtgggaagaacccggtgtgagataattgaatcatgggggcagcttctcccatacagttctcctagtagtgaataggtctcacgagatctgatggtctgataaagggttaaccctttcacttgcctctccttctctcttgcctgcygccacgtaagccatgcctttcaccttccaccatgattgtgaggcctccccaaccacttggaagtatgagtccattaaacctttttttctttagaaattacccagtcttggtatgtctttatcagcagcgtgaaaacaaactaatacagccggttaatatccctgcagttccctccacccrcatctcttccctccacccacatctcttccctccctcctctgtagcatccatcacaggactaaagccagacaaggctccgytggcacaagcagagcaattcattgtgaagtttactcctgagagttttcttctkctttaaactgmcacagaaagaaccgtctagacagctacctcatgtaattgactgccccacgtttaatagaatgatcttttcttctgagatgtcaacctcataaggaatcataaagttcacttggaaattattttcaagtgagcagaaatgcctcagcatttgatccagttttctagtggatgggaatattctttgaatgtgtgtgagcacgtgcacgcttgtaaatgtgtctgacacatgttatgcgccgatagttctccgtcatgtaatcctgagaaatgcgaattttttctctctgattgctttgctttccttccctatagatactgtgttgtactcaataggctgccaagtccatatggattagatctgcttgttatccttttacttctcctgtcaaaataaccatcacagtgcaaaaggaaaaccaagaaatgcattctccccgggctgaagttggactcagtgcccagcttgcaaatgaactcttcttattttctttctttctagaggcattccacagtggtatatgataggattcccttttccatgtcttctrtgtacaggcaaagtcgtgattaaatccttcattgggatggaaatcagkaggtcagttggaagattgtcaagccaagatgattctttctcttccggtcctaaaaaaaaaaagacctcatgaattgtttttatttaaattggatgttttgttaatctctatctggagttgaattctccttttgcctttcttttcattggagacttgatgttcatttcattatttctacttgtagatacgtatagtatctcctctatttgagcccaacattccttggaaaattttatgaagttgaatcagggaaacgaagtgtatttccttttatactctgcgtcatagccaaagactcctttaatacttactttaatgaactgaggttgtaatttagatttcttcagtgtagcttttagagcaaagagcatgaaactggttttcaggagatctagaatttcccactggctttccaactgctaactaatagccttagacaagccattgaacttttattagttccaatctcttaaatgtaggagttgaagtgggtggtttcaaagattcctttcagcttccaaattctggaactctggaaaaaaaaaaaagatagccacatagacttggaatatcgtcatgtgttcctaaagtatcatcttttataataattgatgttgtttgaaaagagtgttgatatacagatcttggacaaataattaaaatttaaggaagtctaccagactgtccttgctagcatgaaattatgcctgaaggcatagcactgtggcctttgcagccagagggcttgttttagaagtacagtacactgtacaygtcctagtcactggggagctctgtgtacaaatacacacaaggccatggtcacagagagcaacagtcacaaacataaattcagatgtgtgaacaagacaattgagaaacaaatcattgtcatttaagcttaaacttttaaatcagagagacctacctcacatacttgtccaatttagtagaagactgtgacaacagagaaaatggcagctgacagcagaaacaggactgatttttttaattaaaaatttcaaattaaatgtaatatatgtacatggaaaaacttcatacgttaagctgtgcacacaatcacaaagttaaaagcttctaccttcaattctcaatcctcctttctaaaattaaccattgttattcattttttgttagatcctttcctcaaatggcatatgcatatcccagtagatagatgcatggcttatgtgaacatttataaaaattataataatctacagttactctgtatgtcgcttctccacttagtgatgcatcttcaaggtacttcacattagctcatgcagatacaactcaatttttttttttttttttttttttgaaacagagtctcactctgtcgcccaggctggagtacagtggcgcaatctcggctcactgcaacctccgcctcccaggttcaagcgatcctcctgcctcagcttccagagtagctgggactacagatgcatgccaccacatccggctgattttttatttttagtagagacagggtttcaccatcttggccaggctggtctcgaactcctaacctcggggatccgccgacctctgcctccaaaagtgctgggattacaggcgtgagccactgcacccggccgactcagtttttaatgattacattgtttaccatcatatgaattatcatttactaaatcagttccctatgctaatttaaatgattatttttctagtttctgtctttctctaactgcaactcctgcatttccatctttatccaatttcttacgaaggcaaagctgcactggatggtctgttcatatatctgggtatttttttccacaggataactttctaaaggtagaattgattgttcaaaatgtttacamatcttaccagaaatgttagacctatttggatatatataatattctgcaacatataagaatgctagttgatagttgctatcctgtatattaactttttaaaagttttgctaacccaatgagtaaaaaaagctcattgttttgatttacatttttataatcattgacgttagagtatattttcctatattagttagtcaattttgtgtttgtgcgaagctccagtttgtgtttttacccatttttaattggatgatgaggtttttggggggtatttttagaccacttcataaattaaggaattaactttcacactttatgcaaatatttctccagttgttaaagtttgcatgtatttttcccatagaaatttaaaattttcatgcaatcaacctcagaaatctytcctctcatatttctgcctctggaattgtatttttagaaagaacttccctgtcctaatattacatattaagcattgtttgtgttctatactagtgctcttagagtttagcttccttacgttgtaatatttgatccttctacagtttattttgaggcaaggagtttgatagagatctagctttctttcttttgccaagtggctagtcaacagtaccactaccacgaactgaataattaatcttttcccttgttgatttgaaatgccactttgtgagatccaaatttctgcctgtgtttgggtctgtttctgaactctatgtttcattccattgagctgtttttccgtctccaattctacgatgtttgagtgactatatttttagttatgggccatgcagggggaagatttgcaaaattggttgctcagttcactgttttgaaactgcttaatgaagaggcctctttgtttccattttctctattaacaccagaattagtgttcacgatgacattgtatcatccaaaaagaattaattttgcccttataataagcttaacaagattgaatataaacaaaatttwaaataaataagataatgttaaaaatagcatctagaaggatatttttaaatgtcttatctggaaatctcacttctgggacagcgttcaataaatctactgtacctactcacacacacatttgtagacaatcagacagaaaactgttcgtatttcttgcgctttgtcttttagaatgtggcacatcgaatagagttaccagttgccctgatctgactgatttcgtataaatgtctttgctttggcaacagttgagacctattccttctctgargtaaatcttcttgcagagcaggaagttgaggttttggggtagagtccaagagtcagttctgaccttattattggggaatgtggaaacctaaagccttccatgagttaataatgtgcacagtgaaggatttttttccctcctgaactgattgggtattttctaaaagaggatgagcttttaataacaggaatgtaacttttaattttaaacagatctgtgcttaaacatggtcagggaatagcccctgctcaaaaatctccttatttgtacatgttattgttcaagggagagaccttcctatttatatggcgagaaaataaatgagatttctttctatctgtcttccatatgtttaatggtaggaatgtgtcttggatcttgarttaaaacagacygtggattcagttagttgatacaattaagaactgttcttatctcagaatcaactctgcagactatctcagagaatccaatatcaaccatccaggtggctaatccatcatcaactgaatgggcaatttggttgcttctgttcaattgaacaaagaggcataggcactcgttagttccacamcccagtcagagaagcaacatgggtgtgtgacaaaaggggtatatagtctgttctttggcttcagatatgaaaaagcttttttcaatccaactaattcaagacaccaagcatagtgatttcttcactgacagttagcattgaaaatgaacttcattttcctcctaacacacacaaaaaagggggtggtagaagccacggcagatcatggcagatggcacttagggacagctgtagtgcttggcttgagttcccctcckcatggagcacagagctgcccacttcgtaggaatacggcaatatttatctacgcataggagtcattccaaataaaaagggtaacagaaagaaattgcagcctactgctgtgagcctatccaaagggtatccatacatagcccaacatttgaggtaagggcatggtttaagatctcaaggaatcaaaacattatggaaacactaacgggaccattagaataaatgaatgaacctaagatcttcagtccgacttgattgagtgcagatccagtcccctttggagagagttgttaagataagacttaactgtgactaaatatacaggcaaggaattgcctctgcaacacaaataagaagcttagaataatttgccatttgaactttccttatatagttagatactttgtagagaaacctaggctaggagttggtgatwttttttgggtgggggggtcgcttttttccccctttctcattttattcatttgactatcggcaactttacgattttttaaattgtagtaaaatacacataacgtaaaattaccatcttaaccattttaaagcgtacagttccgtggtgttaagyatattcacattgttatgcaaccaatcttcagaactttttcatcttgtaaaactgaaactctatccattcaacaacagctctccatccccgccatcctcccagcccctggcaaccaccattctactttctgtctctgtgagcttgactrttctagacaactcgtttaggtaaaatcataaacctactgaaagtgtttgggtttttctatgtgactggtttatttcacttagcacaatgtcmtcaaggttcacgtatgtggcagcatgtgtcagaatttcctttttaaggcttaataatattctggccgggcaccgtggctcacacctgtaatcccagcactttgggaggccgaggtgtgggcggatcaccaggtcyggagatcgagaccatcctggctaacacagtgaaacactgtctctactaaaaaacaaaatacaaaaatatttgctgggcatggtggcgggcacctgcagtcccagctacttgggaggctgaggcaggagaatggcatgaacccaggaggcggagcttgcagtgagccgagatcgtgccactgcactccagcctgggggacagagcgagactccgtctcaaaaaataataataataatatttctttgtatgtctatacattttgtttattcattcatctgtcaaaggacatttggtattttgggttttgttggcccttttttttttttttttttttggaggcagagtcttgctctgtcaccaggctgaagtgcagtggtgtgatctcagctcactgcaacctccgcctcctgcattcaagcgattcttgtgcctcagcctcccaagtagctgggaccaccaggtgtgcaccaccacacccggctaatttttgtattttagtggagttggggttttgccatgttggccaggctggtctcgaactcctgacctcaagtgatcctcccaccttggcctcccaaagtgctgggacaacaggcatgagccactgcaaccagccaggttttgttggcttttaatcaagataatatgcaaacactacttttgtccatctgatgatgtctcaacaaagccattttagaatctgaagatacttcctcattaaattgttactattgttaataaccgagtgttggcttagygagtgttaaggtatataagagtagtccaaataaatggcatagaaataaatgacagtgattaatcactcactagtctgatacctcatagcttccttacttcaagtttaggcaggtgcaggagtcatgaaaaaaagccaaaagataaaggtcgcaaccacttggtgaggaatgtttgctttcttgaaatgatagccctctacccagcaccatgaaaagtgtgtttttcgtggtcattttcaggcctctaagcttgaggtgtgggtttatattctgaaggatgcagtgcgtgatctttctcaccaaactctctcaaatactgcactggataaacactcagaggactggaaagtgggactggaaggagccattgagattttttttacatcctcttgtcctggagtactttccttcctctacactttccttacatttctcagagaaaaaaagaaaaactttgtcatttttgtattacaaacgtgccagctttgactacccttgacactaggtaagtgggagattaattgttgggattatacccatggaaaaagccataaggcttayatcacaagttttattttttttaatattttgttttcatagctggggattactctrttggcattcagggagagagaatgaaaaaatatactaggataaaaaagggagtactaattaaaacyacaaaagcaatgcaaacatacattaaaagatacaacaaattccatgccagtttcgtgaagaaatgctttgaggtttttttccccccagctttattgagtataattgacmaataaaaaatgcatatatttaaggtgtatgacctgacaatttcatatacaaatacattgtgaaatggttaccacaatcaaattcatgaatatatccatcaccacacatggttaccatcctttgagttttaaggtgaattaatggaatgcgtgtcattcatatgcatattcatatgcatgtcatttgcataccattccttgactcaagaaagttgctatatgagtgaaagataattattgatcatatgaacttaagatacaattattctcatctggccaggtgcagtggctcacgcctgtaatcccagcactttgggaggcagaggcaggtagatcacttgaggtcagaagtttgagaccagcctggccaacttggtgmaaccccattactgaaaatacaaaattagctgggcatggtggcacatgcttacttgggaggctgaggcagaatcgcttgaacctgggaggcagaagttgcagtgagccaagatcacaccactgcactctagcctgggtgacagagtgagaccctgtcacaaaaataaaataaaatgaaayaattatcctacaagaattaccagtaagtatacttctaaaatagatcttactctagttcattccaatactcacataatacaactatatattaaatggtgaaaatatcattgcagataaattctaaatgaaaataaatcctaatatgtaatccattaggaaataaaattctaaatttaattctacaaattactttgtgattttgataaaatttacctaaagatacagggaagattttaaatttgtttaaaaatgggaagttagtaaaatcttgaggataaagaagaaatgtatacatatcaggcaagcccaccactgcatgttccatagaatcttacagataatggatctcaagaataagcaggctaaattttcacacccatcccccaagtagctgaatcattggggattttcttttggagaaatttagggccctagcaaagagtagatagcgttctgagcaagttactactcccaagggttggcccaagcattcaaaaacagctgggggctgggcacagtggctcctgactataatcccagagttttgggaagccaaggtaggaagatcatttgagaccaggagttcaagattagcctgggcaatatagtgagaatcccatttttctacaaagaaatttaaaawtttgcctatagtttcagctagttgggaggctgaagtgggatcacttgagcccaggaggtaaggctgcaatgagccatgatcatgtcatgcctctgcaccccagccagggcaacagaataagaccctgtctcaaaaaaaaaaaaaaaaaaaragagagattgagatctgagatctcatatttttgtagcaggttacactgagtgttaatggatgcatgatgttaacttactgattttgtttgtgaagaacatataacctggttatttgaaagaaaaaaccatgactaccagwatgaaccaatgtgtaatatagaaacaatccctctggctttgatcccctaacatctgtgtgtcctctggcaagatttttgagtacaggttggagaatgagcaaagcaaaggtatttgttggacaccaactaggcatcagacactgaagttattttagttactcctgaccacaactctgcataagctacagggtggttttcccattttacagacaagaagactgagcctcaatcaggccattgtttggcagacagtacatctaggacagcctgtttccaagcctgtgccctttgcaaaacaccttcttttgcctggccagcttgatggaggctcttataacctgaggctatggtgtgctggtgggattgtaaacattagaaagtacatgccaagaaccgaaagccattaaggaaaatgartcactttctggatgcaytgaacatctttagattatgagagcttcgtgaagaaataaagtacagaaatgatttttcttcttaaaaagaaaggaatatctctctggagtagagattgttggcaagttcatgtataatcatggtcagcagaaaagaaatctaagcagtaatgaaaagcttgtgtactcagaatgcctttaacccagtgagctgaagagcaggcctttgggggaatgacgttggatggaggtggagttgggacaggaatagaatcctggtcctggagggaaagacaggtaaaagaaagtgagaccattaaaagcaggcatgatgcatggttactcttcatccctgggtaaggtggtataaattgcttttgttttgcccccgtcccccaaatcatttttttaaagaaagagaagaaaatatttttgagggaactcattaccttttggcttgaggcatagaagcctcagaagctgaaagcaatgttatatttttatatgctgcagatgcttcctggttttaaaacagtgacctggctccccaacaattacagcatcaacattgagggagaacattcttgtgtatcgtgtaattccaggagcagatgtggggtagcctttacgaaattaggaggaggggaggcagtctggtttagatcgtgaactacccaaargaaagttacttggcatgacttcgattgtgtgttaagataatttttattgtgttctagttctcagacaatatcatagataacctcttttgcctgggtgcattttgaaaggtctttgtgttgattatctgcttttgatgtgttttcatgatccgttcagactacccaagccataaaacatcagtaattaagaaaaactctccctgtggagaagaatcaagaagattctacttcttttatttaatttttaacatatctaaaggaatgcagtaaactctttttacccattagtaattgactttgaaacaggatatgcctttcctctggagtctacaagtaagtctcgagagaaacttcataaaacagattgatcctaaacttccctcctgcattcatgggagttagctgacaggaaatacacagtgcgaggaagtggtgagtgagagaaaaaaaaaaaacagctaactgataagatcttaattgcaagggtcgttttcatggtggatcatacctaataggtcatgtatttcaacagtttttttggaaaagtgattatgcatcttttttttttattattttctgaggcagagtctcattccgtcaccaaggttggagtgcaagtagtgtgatctcggcttactgcaacctccgcctcctgggttsaagcaattctcatgcctcagcctcccaagtagctggaattacaggcatgcgaccatacgcagagctaatttttgtatttttagtagagttggggtttccccatgttggacaggctggtctaaaactcctgacctcaagtgatccgcccacctcggcctcccaaagtgctgggattacaggtgcaagccaccatgcctggccagtgattatgcgtcttgtaaacraatttttggggtctaacttttccaaaatttctatctggttttctttcttcccttctaagagtctgtatcttcttccctgccctgggctttattcttttctagagatcctggcagtcattatgaccatgccctttatggcacatccaaggtcagtgttcatgcgtgtcctccctcgttcattccctagyatgggtggatatagctgtgttacatgctgaatcctgctacccactgtgcaatggaggggtcagagtcttgtggaaggagagctggagagccagggagaatasaggacttttcttcaccttgggttgaggcagaactcatgaaaaacaatgaagcaaggaataatttcgttttgcacccgtttttttcgtttatggaccccatttcctgcatcttagcaaaatctctcctcaaaaaaatgttctagattagtagtagtaaattgatctatctgatggggctgctgttggatctctccgagccatgtttgaacttttaataatgaagtccacagtccctgcatagcttaccaagcaactgtggatttgcagggtgcggccagcaggttgctggagcgagatgggctcccagttcccctaacatcactctccaccctccacagtctatccacaagccaccaccctgctgctcrcaggtctgaccctcccctgtggttgatgggcaggacaggactctacatatgcyggtgtctgttaacacaatggggaacccaccagagatccctcacacaggatcacttttctggctgggctgtttttcctcatctttcatcagtgagtgttggccgtcagcgtggcactcttcacacccaagtgaagcctgcctttcccctctgccacattgcagtctctgctggggtggaaaagaggtcagcaaatgaactcacaatagtgctaagcattggattaagctttcaccattagtcttttcagctgacccaagaattgcattgtgaatggggaggtggggtgactcactgagtaatcctttaaagagtccattggaagccagtcttctttcaaatgtttcacatggaataatcgtgaatatttttgcatggatgtgcaattaaytgcaaagtatgtatgtatactttaggyggaaacttaaaaaccttcctttgccattctcataaatgggcttgctgatctgcctattatagattatggtggccaaagcaccacccttctattaaaaagtataatctttttttttgttgttgttaaccaatcaaatgttccatctgtttagactccgctgtctgctctggattttagaacaatgcagtcaaggttattcttgctcagtaatcttgccttgaaaaagtgagttactgttcccagaggcaaaggcactgcttcttgatgacaggcaagtgggatttattagctttgtgaaggaggtgggagggcatcgtgatacttggtaaattatgagaggggctggggagaccatgtcaaaaagaaagggattccttgccagatgttcctaagagttgaattaccatggagaaaataatctgaaaatatgagtgacctcgactttgtcctaaacccccatggcttaaagtgcaagcgaaaggagggaatgtggctttataggggcttgcaggtagatggagggtgggtgggggtggtgtcaggtcagttccttatgggcttccctaagtcagtgctggagagcaaaaagagtgttgaggcctcccgagaacgctagaatgaccccacatccctctacatcagytttagacccacagcagcctcctaggtcttctaggtggaggctgagatagagatgttctatcctgaatatgttcagacaagccaggggcactcatataggtggtgcggtttcctgttttgcaaaggacaggagatagagccacccaagcagatgtccmagatgaaaatggctgtgaaacgacagtgtcaccttaatatccatttggacctcatttatgggaaaagccacctttcccacaccactatattttgtttgttacaatctctgtttktccttctctttcaaacatatttctcattagatttattccatcgcatattttcagcttgtttctgtgaagttccgacaggaggggtgttccaggaagctccgcggtaccttttattttattttactttatttttgcccttctcctggaagagcacttggtaatcttcttaaatgctttttgaaagccttttaatgacatcactcagtgccccgctgatcactcatgaactgcagttgtacaccagctccaaaagttccatatttatgatgataaacaagagctgtaagatttctaattttgctgaggggctattttccctctctctcttgatgtgactcagtttttcagtgtagggccagaggctgtttgtgtactcagagacgatgttttcaactttttgctcttgatttttccaggcaattagcaaagtctttttagagtggaattgttatgagcatacattctattttaattcattgtaattagagggatgagcattacacttcttcaagaactcctagaagtcaatgttctgatttccaaagatcaaaatcttattttatgagcaaaaaatgtgactagatatgaaaaatgacaatcagtaatattcctccagctggcagaktgtatgaactccacttgtgatttcaaaatcatgctgcagagctgtagctgggttttctgatggtttctccacggattatcttcctcaaatacaatgttaaaaataataacttgtcactgtggccctcagtttggttgtgtttattataawgaagattgaacatatgaactgccaattgatgatggcccatgttcctggtctgtttaagtaacatcaagtcatctttgaatttaagaaatggtagcattctcttatttgattgctattagccctgaaatggaactgtccagaatagtatttgtgaaatggcagagttccyggacccccctcacaggacgtgagacaggggtgtggctagtctatctggccacctagygagcactcaaaccccttacaggagggggagcatgcagatsrgcaggtgcaggagccggggcaagtgcttttggactctggccccacagtagcatctaggggtgggtgcytgcaactctcaaagctgcagtgggcatgttaccatgctcttttagctctgccatctgcacacagcttaagtgttaaccagctcagtgccctcttggtatccaagtccttgtcctgcatccaggaagaatcaggtcacacagacaaactgaaggatggtaaatgcgggggattttattgcctcatcaaggtggctctcagcaggatggagtgggaagatgatcttcccctggagttcagccatcctgaagccaatctcctctctcascattcctagccaaactcctctcagcattcagatgttccttctcttctctcctctgctcctctgctcttctgctcctctgctcttctgctcatggagcctggggcttggggtttatatgggtacaggatagggaggcatggcagaccaaaaggcaacatttgggcacaaaaacaggaatgcccrttcccatttagggccatgggtttccagacttgagggtggggcttttgccaaggaaccaccctcttckacccagtatttccctgcctcctgtccatgtcatttgtacaagaaaacatttttctcccagtaaagcttatcagttttcacagaataattgtcagcccctaaagtatttttggctgtctccagaggttagtaggtaagaagcttgaagatgaggccagagttcagcattgagctgtcccaggtgacacagactggtgagggcaggcaggttggctgaacycagtccctggagcttggggccagaggaggttgcagctgtgtaagcaggtgggcttcagcccctcaggatagcaagtctcacagccagggatgcagatgctaacatctgtcacattgtcttcagtggtttattatcttagtttcagctgctgcaaccaataccatcgacttgggggcttaaatgacagggatttatttctcatagttctggaggctagaagtccaagagcagggtgccagcatggtcaggttctggtgacaaccctctttctagttggtagacctctgtcttcttgctgtgtcctcayatggcagaaagaaagcatctgtctcatgtctctttttagaaggacactaatcccatcacaagggctctactcttgtgaccaaatcacaccccaaaggcctcacttccaaatactatcacattggagattagggcttcaacatgtaaatttggggttggggggcactcacattcagttcatggcacttgtgaactgamgccaagtgttgtaggtcttctgtcgccacagctgagcaggctgagatgagcatagcaagtcctcactcttttttttttttttttttttwtttttttttttttttttgagacagagtctcactctgtctcccaggctggagtacagtggcccgatctcggctcactgcaacctccacctcccgggttcaagccattctcctgcttcagcctccccactagctgggactacagrtgtctgccaccacgcccggctaatttttgtatttttagtagagacgggatttcactatattggtcaggctggtctcraactcctgactttgtgatccacccgcctcggcctcccaaagtgctgggattacaggcttaagccaccacacctggacagcaagtcctcattctttagcagcagaacattttagggtctcttctctttcttttgtgcataacttaagtttcttctccttaatgataacatcattgctttattatttttagagctttatagttaacagtgctttcaaccagtttgcttcatttgtgcttcctggagaccactgtgaagtaggtgggatgattattgccattctgcagatgcagaaattgagggtcatggtttagttgccccagtacaaagcctgatgctgggttaagtaatttattcaaagtaaaacagcrtcgaatgctgaatctacatcttgaacccaggtccttctgaccgcaggtccttcccatgggtatttagagatttgcaaaaagcacttagagctcctgcccattagtctaggccttccttgataataaccttgtgggggagacctctagtgtggccaaggatgttaggaggttgccgtggtttcagtgtgtcccccaaagttcatgtgttrgaaacttaatcccsaatgcaacagtgttgagagttgggacctataagaggtgactaggtcatgaggcacaacccacaggaatgaattaattctgttatcttggaagcacgttcctaagaaaagaataagtttgggccccctcctctgtcactcacacacatgctcccttgcccttccacaattccaccatgggatgacacagcaagaaggccctcgccagatgctggcatcttgatattggacttccagcatccagaaccatgaggaatgaatttattttctttataaattacccagactgtggtattctgttatagcaacatgatacggactaaaacagaggccatctgtgtctaaagcaacttaaagctaaaatttgccaaaaaggtttaatccaagtcttcattttaatgcataaggaaattaagggccagataaatgcctaagttacaatgagtttgaggcagggcctgggctaagaattggtctcagactctcagcccagtgctctccagatcattgagccttacctctccctcatagagtggcaagataagatgccccactcgtaccacggccagccattatggaaactttcagggtagaccttgtatgaaggccagcccctgcccactgtaggtagaggaagacaagacactcagaagcatccctcagctggctgcctgggcctggagtagtacgaatcaccttgctttggatgcaagctggtcagaatctgtgagtttctacactctgggcctgtttcctatggaagaaaagggagaatcagaagtgcattctggactagcttcaataaatcatcttatgtcttatcccacctcttttccctattaaaattcttacctttggccgggcccaagcttgagaaggccactcctaaagcaaggcccctttggactagggcctgggcaagagttaactggcacctgctatgccagcacaaagcttaattcccctgcagcagcacacccgcaggcagctattgaagcaaggatggaatgtcttacaatacaaagcctttgtaataatgagagggaaatagaaaccagaggtttgcaagctctttttttcttggggggttctgagtatttttgtttaacttaagtttcgtgttccaaggaaggggcgttttagtgaaaattgtgaagggaaaccctgccaaacagaaattccttataggatgagtattttcctcctttcaaggtgtgagagcgaccaagaagcaataacgcataggggagtcggggtgatagattggaatgctcttggctggagtgtgattggtgtctggaagtgagtcccagcaggttggctggtgaggccatgtgagcattgggcctgttccagggctgtgaagtgtgcaggcttgcttgaggctgtaggcaccactgcctgagccatgcacgtaaactccccagaccctaagagtagtttactgtcagggggtaagcccccaaatcaagcaagctgcacagagccaagactcccaagaaccaatgccttcttccagcctttcattcattcattctgtaagtgaaaactcagcgtggatgtggatgaagatattcatgcctttgtgatcaytacatttcagtgtgtgggtgcaaggggaaggagacagataagaagtgagcaaataagtaaagtatctagtgtgtctaggggttttaaatgttatggaggcaaaaataagcagagttctcaaggaactggtcatcccgatgtccatgggctgcacttggttggggcagttctaagagtatctgtcacacttgcagagacgacctgggtcaactcttcccaggcactttgtagaacaccgggcagggatacttcaatttcactctttgttaactgggaatgtggaggcttaggaaagaactctgagatttgtgaatgtgataccagtcctcctatagttaaccaatgtgtttgttcattctcatacactcttgcatttgtatgagaatattaactatttcaaagctctcataaatctattgcatcattttagtcttatatcaaagtaggaagggtggatattgagacacaaaattgaagatcaaygackgtgctgtggcatgggttgtccagtcaggacagtggccatacacagtggttggccatagtgaaaactggctgaatagtcaccctgtatatgacaggtttgctttgcaatttgttttttgtttgtttattttttgcaytgcaatggcaaggtcatagaaataatcttgtcacccttcaaactcactactttgaaagccagcactccattgtatgcatatatatacacatacacacacaaagtgtacttgttttgtttttttaaaaatcagtctccttactttgacccatgagaacaggagcacacaggagttcagacatatccattggccacrtagtacctgagatctgtgaatgagatcacagtcgtcctatagttagccaatgtgtttgttcattctaatactttctttctttcttttttcttttcttttctttctttctttcttttttttttttttttkgkttttttgagatagagtctcactctgtcacccaggctggagtgcagtggtgctatcttggctcactgcaacctccacctcctaagctcaagtgattctcgtgcctcagcctcccaagtagctgggactacaggcgtgtgccacaaaacccaattaattttttgtgtgttttttgtaaatacggagtctcagcatgttggccaggctggtctccaactcctggcctcaagtgatctgccygcctcrgcctcccaaagtgtcgggattacaggcatgagccaccatgcctgacttagctttcatttgatgagaatattaattatttcaaattgctcataaatctgcattactgtatgtcaratattggctttagcatttttctcaagttatttcatacaacaaagtataatataaacatcattattactatgtcatgaatgaagaaagtgtacatgaaacatgcctaaggtaatatgcccaaagtctcacagatagtaagtgttgaaaatgaagcttacgcccagttctttctctttccagaaattatactttcaaccactatcctatattcactataggattactttagattctaagattccttaggaaattagaaattcttagaattagaagctgttgggatatcaccctgaactcttttttgttaaatgttgctgctttttagtttatttacccttgaaggtctttgaggctttatattttattattgttatatcaactataattcttagtgtgacttataaagtctcacaaggctacgtaattttattccatctttaagtattttaaacagttagaaaaggaattatattacaattagatttctcaatttagtagctctttttttttaacccaaataatcagaaattactttgctcccccagttactgacagactgtgtatctttaggatataattacttttttttttttttttttttttttgagacagactcttactctgtcgcccaggccggagtacagtggcayaatctgggatcactgcaacctctacctcccgggttcaagcgattcttgtgcctcagcttcccgagtagctgggattacaggcacacgccaccatacccggctaattctttgtacttttagtagagatggggtttcaccatgttggccaggctggtcttgaactcctgacctcaagtgatccacccacctttgcctcccaaagtgctgggatcctgtcacgcccggccaagatagaattactttcaagactatttcccaacgtttggtcttgttatattctttagttttgtgtcatgaggctactaattttttattcctcagtggtaactttatgaaatctcttagacttgcagcaatcaagcctctcccttctatcrtgggctttaactatgcaagcagtcagcccattacagttttttcacagactggttacattcagcccgagtttgaaccagggccatttgggggcatttggagaggatgaagatggaccaaaagcaatcagttgacctgtgtcttgtttcctcttgaatttgggatttcagctgcctcctttgattatgctggagactgtatcatactcgctaggttcagggcacccccttgtggtgcaactcgaaacgtaatcaacgtgaggaaacagaatgatggccaaatgacgaggaatgaagaggccacgcatgtagatatgattttattgttcttcccatttttaaaactctcaaatcaaatctcctgtttttctcctgttgtttcaaatttatcagtagttatttcaatgctaagtggttttttttttttggaggtagaaacaaatcagaaaagcaagcacaaataatttaatgctacatctcgggagtttttaaaaaaattttattacaaaagtaaccatggatattctaggaatgttagaaataatagactaagagtaggagaattatttacaatcccatgacccacatagaatacttgtgttaatattttggtgtatatccttctcctatttttttctaggcacatagactcaaaggaaagaaaccacatgccacaagcacatgccatttttttttcttatttatgttattttrttttttgagacagggtctaacactgtcaccccgggctggagtgtagtggcgcartcacaggtcactgaagcctcaacctactcaggctcaggtaatcctcccacctcagcctcccaagtagttggtactgcaggcagacgccaccatgcctggcgaatttttgtattatttgtagagatgaggttgcaacatgttgcgcaggctggccttgagctcctaggctcaagcgatcttcccaccttggcctcccaaagtgctgaatttacaggtgtgagccacagtgcccagcccattgttttctaatatgattttatccacttaattatatgtgtgaacttctttccctcctgttacatgatagctacttcatcattgcatgtggttgcctggttttgttggttccactgtgtgtgggcaaataccatatcatgcagggcctccttgtagataactgtagattattttcttgggttctttattagaaatagaatggctgggccaggggcgatggctcacgcctgtaatcccagccctttgggaggccgaggcgggaagatcacgaggtcaggagatcgagaccatccggrctaacatggtgaaaccccgtctctactaaaaatacaaaaaattagccaggcgtggtggcgggcgcctgtagtcccagctactcggaaggctgaggcaggagaatggcgtgaaccagggaggcggagcttgcaggttcgggccactgcaagatcgggccactgcactccagcctgggcgacacagcgagactctgtctcaaaaaaaaraaaaaaaaaagaaagaaagaaaaagaaatagaatggctgtatcaaaaagatatgcaaaattgtcttcttgttcatttgttaaaatagagcatctttttgagaatgcaattttttttaaatctgcaagttcctaacatttgcatccttagtctgtgttaggaattgtgtacagtgtttcacatgcctggatctcacttcatcctcccagcaacctattatgatccattgccacaccaacttgctgatgaggaaagtggggcttaaggaaattaaagagctgttgtgggacttccaaagcagaagacagtaggctttcagaaatttgataaaaatagcactttgcatttcttgaatcttgagctaaatggaaattaatactaaacattctccactggtaaaatagagaataaggatattaacagtaaaagaaaagaagamgaaaaggaaatgtgcttccacagatttagaaacataagtaacaatctaagttaaggctttggcgattagatcttcatgttggaagatatgctggatggctcagtgatttgctgtgcaattacaaacccgagacaatttgtaatacaaagagcttttcatgagatcttacatttttttatgaatatattttcgtttaccatgrttagtctcctaactggttaaattgcttccagagagtcaaaatttgactctatgtaaagtgacatcagaaagtctctaatttctgggccgggcgcggtggctcacgcctataatcccagcactttgagaggccagggtaggcagatcacttgaggcccggagttcgataccagcctggccagcatggcaaaaccctatctctactaaaaatacaaaaattagccaggcagaggttacagtgagctgagatcatgccactgcactccagcctgggtgacagagtgaaactgtctcaaatttaattaaaaaaaaaraaraagaagaaaagaaaatctttaatttgtgaacaaaagtggaactttgggtgagtgcttaaattttagcagcctccagagtttcctgatgttrctccctagagatcaacaattcactttttccctcytttactgatacttttctttgtgccttgttatagaattatatttattatagaaaaccctgaaatagacatagcaaaagaaataaaataaatatcgcttgtcattcagaccgtttgaagtactgtacgtgtgtcattcatttctggttctctccactacatttgctcattgtgtggttacccaatatttattattcttgagcaattcttctcagactcatcagcattaggaaagaaactctgaacccctttcccttcctgccacatttagcctttcaaagagatctcaagtgccatttagtacaacaacaatgtctgaagtttctttttgccattttcttatgatagctgatgaatttattaggagtctctgaaataataaatgctcttctgtttaatttttacagtattattatttttgccattccttgaggtagttgagtcttcctgttttctcagtaacattcctttagttttttgtgggtttttttttktttttktttttttttgaaacagggtcttactctgttgaccgagctggagtgcagcgtgcagtggcacaatctcagttcactgcaccctccacctcctgggctcaagcagtcctcccaccttagcctcccaagtagctgagacttcaggcgtgtgccactatgcccagctaatttttgtattttttgtagagatggagtctcattgtgttgcccaagctggttttgcacacctgacctcaagcactcagcccamcttagcctcccaaaatgctaggattacaggcatgggccacygcaccaggcccattcttttaatcttgatctaacctctttatatgtgataaactactgattatcattagcatagataatccagaagttcactgaaaacactcaactctggtctcayccacttttttttttttttttgagacagtgttttgctcttgtcgcccaggctagggtgcaatggcgcagtcttggctcgcygcaacctccgcctcccaggttcaagtcattcttctgcctcagcctcctgagtagctgrgattacaggcgcccaccaccacgcccagctaatttttgtatttttagtaaagatggggttttgccatgttggccaggctggtctcgaactcctgagctcaggtgatccacccgcctcagcctcccaaagtgctgggattacaggcgtgagccaccgcacccmrccacccgctcttattttttaagaacaattttctatsgtatagtcaaagccgtaaatcaagcttgtaaatgctccacgttgatttagcaggtatatgtgagagrcctaataaaatccagttttcttttttattgctcttattgttgggctcaaaactttccacacagatggaacctactgagaagcgaaaaaaggttctcagtgaggttcattttgtaatcctgagaaaacttatgtgtgattataggatcctgaggcctaaagttcgtgagcttattccattgcatcttctgagaagggcttcctacgtctccagcatcccggggccttccctgctctgatggtgggagattcttccagcttctaggtttccgtgacctyagttagcaaaggcaggaaaagatgtaacaggtagactaggggtttgctccacagttcggaggctttgagcaattgtgtgtttctcttgcctgcctgccttccttcctttctttctttcttttttcttcctttcttttttttttgttttgttttgacagtgtttctctctgttgcccaagctggagtacgttggtgtgatcatagctcactgtactcactgcaccctcgacctcctgaggtcaagcagtcctcccccctcagccccctcggtagctaggactacaggcacttgtcaccrcaccaagctaaattttttctttcatctyttgtggtaatgggagtctccctatgttggccaggctggtcttgaactcctggcctcaagcgatcctcctgtctcagcctcccaaagtgctggggttacaggagtgagccacctcacccatcctcccctactttcttgactttcagatgatatttgtctaaagcaatggctgtagcgactttccttgcccccgtttctccatatttcattttctttgttgtaagttcctctgatgagggtcacctagcagagagtggttgaggtctctttgtccctcctggcagactcactgggactccggtctcttccattaccactttccattcctggtcctctctgaagggctgtggttgtcctggttctcctcccgcagccggtgttacttatcatcgctctgtgattttctgtgctttttttttktcccccttttccctgtccatagcagctcttcaaatctatcatcctgtttttrtcttacacttttatttaccatgcatctgcagggctttattatttgtggtctacttcagggtatttctttcacagttgatgaagcctgtaaacttcagagcagagaatcagagggccctaagcaaccctcacctttctggtgagaatatattcacctagaaaagggcttttatgaggtcactttagctaattgtttttctaatagtgtcactccctttttctcttcaaggtctcttcaagttcttttatttatttatttatttttttaacccctatgtgcatcttgggtagaatattttagtacagtttttgtctggagacctgttgtttggctttttggctttcgagtgtagccatctgtgttcaagtgttcttyttcttctagtggaaatttgtgtctgatgtgtgggactaagttctaagtaatatacacacatatatataatctatacacaatggtgatatggatcatggatattgtataattcaatcatgacggtacttagaggctcctatatgttactagtccttatggatatgtgtatatgcgtgtgcagtaagatatgcagctatggcaccccactggcagatattgggcacaagaggaagtcactcttcttgcatgaggattatagaaattttcattttttaagtcacaaaaaaatatttcactgccatgtttttttaaaaagttaagttgctcaaaaatgagtcggatgcagtggctcacaaatgtaattccagcactttgggaggccgaagcaggcagatcacttgaggttaggagtttgagaccagcctggccaacatggttaaaccccatctctactaaatatacaaaaattagccagctttggtggtgggcgcctgtaatcccagctactccggaggctgaggcaggagaatcgctttaactcgggaagcagagggtgcggtgagctgagatcacgccactgcactccagcctgggcgacaaagtgagattctgtgtcaaaaactaaaaataaaaataaaaataaagtcagtggcatcaatgagaattaaaatatttaaatgcttgcacagtaagcattgtaaaccaaaggcacactccagggtccaccaggttcaaatattagaatttgtgccctgaattacagtgtggatcttctgttcctgcatgtattcaccttgggtgtgccctcctgcatggcaaagcatgggcagagagcactgcactcacaggcctgctttcgtggagcaatctagtggccagtgagcccggggccagtgacaatcaagatggcagcctcagactgcattctggctaagaaagctatttcatttgggttgggcaggctctagtaagttccctgcagctctgggacaacctcagggatggtggattaatatgacacattctccaatgatacaaggtgaattcagaagcgcctatggcagggtattttggggcaaacccattgctagttaaggcttcaacatgtctttctaaaatataaggatggaactgtcatcatttttctttcttttcggggaagaggagttaaccgtgctacattttcatcatgaataaataggtggtccatttggtcaacctattctttttctcttcatgttttcaccccttttctttcctatttttttcttgttttctcctggtccacaggctttgaagggcatgctgatctctcttcaggcagaacttgacattcaaaggtacttgatgaaaattgaatcgtctcagcgagttagtactctacctgttctttttctgcatcgagttgcaccctcatcctgcacctttccctcacctgcaagtgccattctaatcagtgtcagccactaacgcctgcacttttcgctgtttaccccaatccctgattcaaaactatcagagccaagtgcttgtagcattctgaaatatgtgcatttctaaaaattatgagagtcagtattaaaatgaacactaattgcatgcttgcttcgaaatatttaatttgctttccacagattggattgtggaatcagcagtaatgcaaccacaagctggagatctttgaataattgtttgaaaagtgggcatctctaagcagagatcctatccttgccagcttgctccagcagaatactcatggcagtaaaacagaagcctgaatcattctgacaatcccaaagctatgtcattctgctttgctcagttccaatgtgtccaatgttgggtccagatcattttacttatatacattttaataatgatcataatggaaataaacacatttctttagaacttatatacaccaggcactgttctaagtgccttacaagtattaacttctcacagcaaccctgtgggggaggtatactatgatccccattttacaaatgaggtgattgaggcacagagaagttaagtaacttgcccaaggtcacacagctaggtaatggttgtgcttaggaaatgttcggccatctggctttgtacaaaagtgacctccttcccattggycagtcttcagtgaccatgcttatctctttaccttccccttcttaataatcagtctcattgatctctttttagggtaacaagctcaatttagaaagttcctgcccagacaaataaacattaaagttcaagtttagacactaaagagaattttcatgtcacacatcatcccaattctgatgagtgtttatccttaattttattcttaatcattttcacattcctaaaattcatgcaaaatagaggcatctttattatttccgtgcgcatgtattgtgcactaagttaaaatgcagaaagggaaaagaagggcatagtgagctcttccctacaacttcacaccctgccattaacctttattcctactttcagaatagagatttgacattgcccagtgggattttcccatcataagtagtactgagtttgggattccctcccgctattctttttttcttctgcttgaaacaaataaatcttcagtactgactttccttttctttctttttttttccatatcagcaaataattggatatctgaaatttttcttgaagtgcttttttggcatttacaagcattttaaattataatgctgtttttcagagatggaataggatgaaggttaaggttggaaatcgaaggtgatcttccccctttagtgaatgagtaactctcagatcctctccagatgtcaaattctgttttgaaattggatgtaactatttacctatctcacaagaccaagatgaaggcatggtggatccattaaaggtttgtttgtacccttctcctctcacataggatcccagaagctacgggacttcccaagaacmgtaggaagctgagccatctagaatcaccctactgagagtaayaccagcttactacctaaggaaagctaaatggttggcatcttttataatttaccaattgctgtcccatgcaacatttttccaattacttctcactttatcaagtagatattctgattattttataaaagtgagaacygaggttcagaaaggtttcatatggagttgcaccgtgagttcatggcaggattggagtctgcttttcataaaataacctgataaaaacagtaagttctctcattataaattttgtcttctgtccatctcttcaaacactggtatactttcctagagcaggactagaggaaaatcagaatctttggtgcagaaagctagttagaactttcactatgtgtgtgtgtgtgtgtgtgtgtgtgtgtgtgtgtgtgttttcatttgaaaatcattccagtgaaattgggcaggtggtagtggtggttgttttggactggcgggagggggaatgtgtttgaaattaacagtgaacgctattcccaggatgtatggggagggtctggccataagctctgagccttggtgaccccaggaacccacaagagtccctcttgcccagttccctgtggccttctccactgtggggtgatgaggacatcataagctctcccatggcacagcccataccctcactgagggtgagggcctttgctagcaaggaaagcctctttggtttggcaacaatgcaattaagttttaggggtacgattccgtggcttgggatcccacatcctctccataaagcactgaagcctaggttgcagagrtgagcttaaaaatggcttttgttaagaaggccttctaagatgtgtacttagcaccatgttttgctggttgtattttacttgagacttcaaaggctacaagcaggtttctttccttttatcagtataataacagcaatcctcacacagacaccttttatcctatagccttttaaagtgcattcctgactttctgaattacaaaagcatctgcagtcttgctcagacctcaaccaatgaggattttggcagccaaagcctgttcaacattttrcttgttgataaggcattacttttcttgtttcagaaagaaaggagagaaagaataaattaattgttgtattcaaggcaacttgcaataaaaagacatctacctggccgggcgcggcggctcacgcctgtaatcccagcactttgggaggccgaggcaggtagatcacgaggtcaggagatcgagaccatcctggctaayacggtgaaaccccatctctactacaaatataaaaacttagccaggcgtgatggcgggcgcctgtagtcccagctactcgggaggctgaggcaggagaatggtgtgaacccgggaggcggagcctgcagtgagccaagatcacgccactgcactccagcctgggcaacagagcgagactctgtctcaaaaaaaaaaaaaaaaaaaaagacatctaccctaaggtagatacactgaaaatcaaaargcaaaatctcrtaagaagaggaagcaaattttaaaatataggtactatgattagcttggacattaaatttactttcaagcttcctgacatacatgatattttacatatgacaaggtaatacttattaatcyttcaggaagcaaaatcatattctttgtttcaaattgtgaaagaaacattgttcrtgcctttataaaaggtacactgatcagcatagtaggcaggaccaacaagtaaacagcagtattcttcatgtggcttttgtttttttagagacaggatcttgctgtgtgacccaggctggagtacagtggcatgatcactgcatagctcactgcagccttgaactgccaggttcaagggatcctcccacctcagcctcacgagtagctgggactacaggtgtgcaccacgactcctggctaattttcatgttggttttttgtagagatgggacgttgccgaggttggtctcaaactcctggcttcatttatcctcstgcctcagcctctcaaagtgctgcaattataggtgtaagccaccacacctagtccaggcttttaattttgtatcggcaaaacgaaaagaagaaaacacatcactgaataaaaattgcatgaacgtatttctgaaaggggtgaaagtctgagttaatgagatccagacttggaacttaccgatgatctaattttctaacttggtagaaggatgctaaatggagatcatagttgagctaggctttattttctttaaatagcttttgtctcattctggctttggggaggagtcagagagcagtcaatctgaggtggtatttcagtagagtttatgtcatgttacaggtaggccacaaggcagacaggtggcaggttgatgtctaatcctggagttgaaaaggccaccctgccttctgatctgataagaacccctgtctcctctgcaaggcaacagatttagcagctcctctaggtggaaccaaacctcttcaagggaaaaaaaagaatactgtatcatctacaaactatgaagggttgaaaggtggaaaatatctctgggatcatagaaaattgctaaaattccaaatttacctagaatcaaattttaagagcctttaaattaaattactataatggtatcagaactacagatgtggaagtctgtctctttaaaaggtggaatgcaatctgcatgtctgaaattgatttgatggccttggcgcttttcttaactgtatcgttttgtagaattggaagttttgtaagaactggattcttgccaaatattgcatggcatgaaaatgaaaacgtgtttcccttcccatgttttccccatgcatttgtgttgtcatttcaggggccatctctaatgayaagttcttaaacctagaatccartcatacagaatacacaagagaagacaggaattgggcatgaatacattcaggtcaccatagacaggaatccttctggattctaaatgttttatgggaaagttcccttcctctgatctattctttaaaaatatcatgcctatttagtaattctctgatttgtaaaaacaacatattcttattttggagaaataaagaaagtgtgtcactcttatcctaagcaatctaatgcagaacagaaaacccaatgcagcatgttctyacttaataagtgagagctaaacattgggtacacatgggtataaagatggcartaatagacactggggactcctggagyggggaggcaggagragagcaagggttgaaaacccattgaatactacgcttgttacaaaaacaccgggggtttggtcgaggttctgctgctcaccaaacagaaaaccaatcactgagacaagtattgccaaggaagaaggctttgatcgggtgctgcagccaaggagacagaagctcagtctcaactccatctccttgactgactagaactaggggtttatatagcaggaaagaaacgttaagaacacataagaaaacaacaactgagaaggcgcaaggaaacaatcatgatgaatgaggggtgtggcatctggtgtggtgatctggtgcgtttcagttctttgatacttttttgagagtcctaaaggtgtttcctgaggaaggaactcagataaaacaaatactrgtttccagctttgagaccagaacaatttcttgttcagtttatcaaaaaaaataatctatgggactgttgggtcagtttcatgctcactgcctgggtgacgggatcaattgtaccccagacctcagcattttgcaatatacccatgtaacaaacctgcacgccaaaataaatctaaatctaaaataaaaggtgaaattayttaaaaagaatgttacccgtaatsccaccatcaaaagaaaactaatgctcgyatttggctctattgtgtccaattactaaattataccccaaaattccattaaaacacctttattatgattgtrtagtactctagagtacacagacattgtaatttgttaaccagccctccaaattgtttcaagatttacttattctattaaagatgtaatatgtacagatttgcttcctgacactccagtacaagaactaccacttttcttaattttcccaaatcaaacyratctatcctggcttcagcaattattgagaaattcatcctcatcatattaaggggaagcattttcccctcacttggagtcataaggaaatcttgaggagcttgtccaatccaataaaaccaggccagggcctctgagtctcctgggacttatagtgaattgctttcygtgcagcctgtttgcatccaggtttatggggacctttgccaagtatcctaagtgtgagcacctggttccacccactctaarcatgtcacacatccatcttcccagttgtgggtcacttcttgcaaatggaatacaggtcttcccaatttgaagagcaccatcgccaccactgacaccaaaactgccaccctcttcttggctctgggaagtcatccactcccctcttcctgcgcaattaggaactycctcctttccccttctggaggyaagtccagacgtcttttccagatacctttaccttctaaccccaatttagggagagagtcttcagagtggcctctgtagcatggggataccattaacaacmcttccctgtgggaagaccttggaacttaaaggcttggaagtttcccaggaggygatggctagcaatagaagttccataaattttttgttgtttctgacaaccacaaggacaaggtaaattaacaatacctcagaagatgaatctgacacacagataatactctatggagagtatttgcatagtgtggtgcttctttaaacaatgaggaagagcccttttctgcacagaggtgtccttgtcatttgtttgtttgcagctgtaggaaggcagggggctttgcatggtgacartgggttggcagaggggtcctgcctggctcacttcgctccacacagaggatgcctcagtgcagggatgactgtggctggctccatatgagctgyccgtgggcagcgggtamtgggtatcactgccctttcatctttccaatctgataatgaaataatacacacagagaaggaaaatgtggaaacaaaagatgcagttgtactttgcccaactgctgaatcgtctgatttccatccagaacaaatgccattctgttttcacaggtgaaaatcatgaataacgtctgggtactctttggatggaaaagggagaaaagtgttgaaatattagcgttgaagaaacaggatataaactgagtgtatcaaggatatttcatcaaaataaatcctagagaaaatgcttcccctttatcyaagtcagggaagagaaatactaattatcagacctcaacttaagctaggagaaacgtgagaatctcagatatgcaccgttggaagttggcattaaaatgtggttagtgaatatagatctatcttattgtaaggcccagaagttcctggttactagtcatcctggcaagtatccacaaactgctcacatccagcatccagatgtccactaaacactcgattttgtgtgtgtgtatattgtactgtagattaacagcwggaccctctagcgcctgcacccaaggtttctattaaaaacaaaagctgctgatttattctcctctaccaccatttctctgagtctttaatgccagacccaccccaaaattgcaagatcataataaaactaactacagttctcttctccatttgtgttgcagttctcacatccacccgttgtattttagaatcatgggtgtctcagtctattacccagagtgatcatrgttgcaagaatggcactggggagatatcaytcagattttgcttttctgtccatragycacagaagccgtgggaagttgccaagaagacatgcatagctaagccttgctgttctttttttaaattttgtattcttctrttattttttagagatgggagtcttgttctttctcccaggctgatgtgcagtggtgtcaccctagctcactgcagcttcaacctcgggctcaagccatcctcctgcctcagcctccccagtggctggaactacacgtgtgcagcaccacacctggctaattttttaattttttgtagagacagagtctcaactaggttgcccatgctggtctygaactcctgggctcaagcaatccacctgcctaggcctcccaaagttctgggattacaggtgtgagccactgtacctgaccccagggctcgctgttcgaaatatacacctggctgttggtcacaggactcaccagagaatggcaggtggtggccaactggaggaagaagrcctcagctgatgctgtcaccagggatgggtttatgtaaggatgggagrtaagatagaagccaggtgtgcccgatggakctccctgtcttccttcccacccttagtcctcaacccagcatggacattaaagacaggaaactagaaggagagcagaaaatgggaaaaaggcaactgcactgtggcttgtaaaaaggactctgtaagcaaatttagaagcgtagagcttccaaagtgagagtttattaattttcctttggagtaccgtgaagcaggaatggtagagaaaacctaaattctgtggatgatttatttgttaatttaatattttgttcctggaatttttaataaaagtacctagcaactagaatgttctcttcaactgaaatcagaattttgactgggtttgagttgaaagtttcacaagtgaaagaaatggggctaaagtgtctgaatgtcatgattaaattaaccatgtcctttaatgagtgctaggaatgagtcattccaaatacatttgcatgtggaaaacttcattgtattttcaaatgccctgtggcaaattgggcattaattaggatgaagtaaaacttcatcacggcaatgttgatttttcttttcacaatagaacgtaatctgaagcaaagtgaataccttggctagccagacaccccactgttcctggcaattaacatattacgtaaagctacatttgcaggttcattttctggacctcggcatttcaatttagggtttaagggtctgaaaacgggaatgaaaaatacatcatcaatacctctagctctaactttcttttatctttgttgttatctccaaatccaatagcattgcaaagaatatgaataaatctgatctccctcgcagaacagtgcacttggtgaacatttcagcaaatatttgttcatgatgttaaaatgaaatcatkaccgtcttttaaaaattaatgctgttcaactatgttgcatacacttgaggacataaatgcggaaagccagatcttagcactacctagctacatatatctatggagcaggtgctataggataaataattcgaaggaaatctcagtaaactgtttttctggatgacatgatcttttcttcttatatgatgtgtacttagagttagaaagttttggtcctgcragggatctgagacaccaactagctcaacctctggccttacmgatgagatacctgtgactcaacgaggttatatgtggaccagtttttggcagragctgaactagaactagcattcccagactcctggttaaataaaaattttaggcagggtgcagtggctcacacctgtaatcctagcactttgggagactgagatgaaaggatcgcttaagcttaggagtttgagaccagcctgggcaacaaagtgagacctcgtctactacaaattaaaacaattagctgggcatgatggtacacacctgtagtcccagctactcaggaggctgaggtgggaggatcgcttgagcctgggagatcgaggctgcagtgagccataatcttaccactgcactccagcctgggcaatagagaccctgtctgactgaatgaatgaatgaatgaatgaccaaccaaccaatcttaccactggtgtcaactctggagtgcgccacacgtgatctttgctcctytcatttggtagagtttcagggcaagctgctttttctattttctcagtggtaatcagtagtgtgaggttacagggaaggttaaattaggttaccacatgacagttacttgatacagagcagcaggcacctgwtatgttgggtcctttatttcttccctcatcctttcattaggaagagaatatttctrtagggtcaatcacagatgcagaagaggagagagctgcattgagccaatgacaccagmatgtcttcgtgacagagagaccccttcgaagaagagaagaatagaaaggacaagtggggttcaggtggcctgattatacagaccacccccttcatgcrtgaccccaaagggcttaccatttgggtttgcgggtttggggttgcctaatgatttggggaagtctttacaaggttgtgatggaaacagagggagatyggtgtcatggatctccatggagcaaggaggaaaatccagtcttacagacccttgagtcctgctcacgtggctcagagaatattcccaccatcccctgcttcctcctcagttaggcatagctctccactcagcagcttagggtagcagcttcaaacaccaagctgtaggccatgcatgactgagaaaagttttcaccggaggcaaaatgagaacactaactccaacataaagaatttttcactagatcaaacctgaaattgtgtttgcttccccyttttttggtattaaagtatctttcctttcttatggtaaaaaaatgataccacagagagtaagatttmtttaatgcctcttactttgcaaaataaaatcaacatccttgtattgtaacccctcataaatttgggggaaatatttctttagaaattttcatctatgaaatataaaataatgggaactatgattatggaaataagctccagagagtttagctttctccatggttcttactaatatgaatatgtgagcatcctagcagcttagccaggaggaaccattagaattggtgttggtcagcggtggtttgcttgtaaggcaccgttatcccaaactagtgcaagaacaaaaactgaattaattgaaggaattcattggaaggaccccacagtgtactggaaacagaaagtgggaagcccaggagaccccagatggctgctgtcttatcttttgtgctctctgaagatcgtgggggtctcacatctctgttttttaatacagattcgctttattttttttctctgcacttttttctgtttcacttttcctgyccacgttaaccacagcttcaagttgaaaactaagttgtttcaagttctcygtagacattgactaatagatcctctgtcccagatctaaatttacaattgagagtttaattggaccagctaagttcaggtaactacttcttgacccaatcaggaaagacatttccaggggcgagaatttgattgatccagctaagatcaggtgactactgttcagtccaatcaggaaagaccaggctgggagtgggtagccctgtactttattgcccagttcagagcaaccctcgcacctccctcacctacactcttcctcctcccctgatgcccctttaaactcagcagttactgccccagactccttctgcacccagggtgatgtgcctcttcattcttcctgtccatctattgcatatatattatcttttgcccccatatagaccttacatgcttgacgagctcaagaacttttatctctggtccacttttacccatggtgcctagcactgttccaaaatgctattttgactttttttttttccagcatatcagatcacagggtatctggcacaagtgtcagcaatttccattgtcttttctctgaactaaatgatgtctcagcagcaagctggcatcagaggggagggtactgcgtgtgaggagactgctaatatgtagtgatcgttttcagtgagaacgtgaataacaacaaaaagaggagtttacatttggagctaaatagctatgwttaggaagtgaggggagaaaaaatatatagccctgcatctctgatttttctacttacctaccactacgatgaccctgaacaagaaacagagatttgattttgattttcttcaaggattattaccttctgcaatggaaaatgacaactcatcaaatgtatggtttctgccgtgagctataaagatgaccaaaaggcagaggttataaatgtagccatgttgcttaaagtaatattatttcttggctatcttgctaaactgaatctaccttctttaaaaaaaaatgtcaggaatgaggacatcataccttgatattctgctgagcacagtaaggaggaagctacttcactgaggaccacgtgaatttgtctaaatcttggtgaactgggcagtgatttagggataattttcctggtcaaatacttgtaatgtgtgtcaaagccagatccccataacagaagcagactttgtaaaaaataaatctaggaatgcaccactttggggacttgyacagaaaaattaaccaaaggagacaatttcactgttaatgcatgtcctttctggtcatgatattggcatatctttgctgagtttcctgtagaacacccagtcatctccttgaagccacatcccttaagaaacacagggcggaargtactgaccttatccctgctttcctctatgggaaggtcctgagaggcatgtaggaaggtgtgattgtctggataatgcaattggttctgttgagaggggtcgtcttgtacttttagcaagaagctgctcatcccattctmaaagggtactgctagagtatcaggcacaccttgggcatccctgaaacaaatctgtagcccaaaactcaaggcaggactggctaaagaattgtcagggtaccttgttcaaaaatcattaataaggccgggcatggtagctcgcaccttggaatcccagcactttgggaggctgaggcaggtgcatcacctgaagtcaggagtttgagaccaccctagccaacgtggcaaaaccccatctctactaaaaatacaaaaattagctgggcatgrtggtacatgcctgtaatcccagctacttgggaggttgaggcaggagaattgcttgaacccaggaggcagaggttgmagtgagccaagatggcrccactgcactccagtctgagcaacaagaatgaaacgccatctcagaaaaaataaaataaaataaaaatctcccttgcaatgtgagtttactgattgtggaaacagtcttggtatgagactctgaaggaccagttgtgttcaatttactctggtattagtagctcatccatctagggtgcgtagaagagtatacagtcccatctgttgtgaaagcactgttagaatttgtcgggcaaaaggaattgttttgctgtcactttcttataatgtggcttgtcctcaactccctgttcaaaatgcaccacataagtcaaacaataaaaatcttaatggagaccaggtgcagcgggtcacgcctataatcctagcactttgggaggccgaggcaggcggatcacctgaggtcaggagttcaagagtactcaaagtactcaaagcctggccatcatggtgaaaccccatctctgctaaaaaacacaaaaactagccaggcatgttggggcacacctgtagtcccagttattcaggaggctgaggcacaagaattgcttgaaaaccggaggtggaggttgtagtgagccgatctcacaccactgcactctggcaataaataaataaataaataaataaataaataaatwcaatggaacacttaagggcaatgttattttccggtaattttcacaactgatactttgacccactgggtctttagttttcccwatctaacccttgtgatggactgttaccccttgccatattatttttccagattaatagaaatggcattggacatattttccayacgattaataatagtctattttcccactttctttaaaatgccttttgcagacaaggagccccaaactgtctcacagtcctcaaccacccagtctgggtgacccggtcgagcatttatcagagacgtccgstgattctttggaagccatgtctgagggggatgctccaacycctttttccagaggcagccggactcgtgcgagccttcctgtggtgaggtcaaccaaccagaygaaagaaagatctctgggtaagctttagaaggcagtttctgatgcccctttcttactgaatgcgtttgttgttatactactgaacctatactctttcattcaacattaatttgatcttgatttgcaaatactctagtactgggaaacttcattggtttaatatcaagcattgaggatttgcctgctgggtaatcaggtcaagtgcaagctgattttgaggctgggcacwttcagaagtggttgggattagcaattcaagccaagaggctagtagtattttacctatgttcctgctactatacagcaggagtccccagtccccaggccatggaccagtaccagtctgtggcctgttaggaaacagaccacacagcaagaggtgagcagaggatgagcaagcattaccgcctgagctccgcctcctgtcagatcagctgtggcatccgcttctcataggagctgaaccctattatgaactgcatgagtgagggatctaggttgcatgctccttatgagaatctaactaatgcctgatgatccgagatggagcagtttcattccgaaaccatctgccatccatggaaaaactgtctttcatgaaaccagtccctggtgccaaaaaaaattagggaccagtgctctataggaaattgtgaggaactgaccgtagaatgatcctcttctcaccttgcaaccctcctctccagtcccagaggccaggacagttggcatttgtacccagtggtgtgggtttccaccagccctgctgcacctgtctggtagtccagtggaggagatgacaaaaagggacaatgtggctaacatctgcatgactgttcataagaaccataaacacgaggctgttcccactaccrcgtgaaaggatagaggggcttggtgtgtgtagggcacagcttttctgaaaggcagaaggattctttttatgattttaccacgtatcatttccttttttttttttttgtattggaagttyactttctatcttgctttgcttttttaattgctttttttggcgctttaacaaaatggacaagtcgtgaggatttagacctctctgtcaagggggcagatgtttcttatgcttcattgccatgttaaggttctgatttgsgtacttgtgtttgcaaacagatgggcttggggataagaggggacaggaaaagagtcaacatgcaaaagccttcagagtctagcacgtgcaaaagacagctgaactctgccatgtaaaactgagcaaatgccttgctgggagaagaaagaaaaagattgatgtgagagaaggtaccctgattttagttcctttgctgcagataatgacccaagcagactgaattcagacattgtcctagctgtcctaaaaaaaamccctacaactttgttattatttgtattatcaatattaatatttarcattaaattttgtgtcaaattaaattttgatcaaattaagatcaaattaaaatttgatcttaggttagtaatctaggatcctcattgtataaatgagagaagaccacagaaaatgtgctttttgtttatrtgtgtgtttgcttgtttgagctcacacacttaattaartggcagcagtgggaagtccagggctccagttcccattaacatgatcttacaaatgaagggacaaggacacacaggggagggrcacacccaaggagcatcatgggccaagacagtgtcaagatgacacaggcttccacaccgtcaccaggctggggctttctktgtggattcaagaaatttgtggtttttcttttcytttttttttttttttttcttgagacagagttttgctctgtcacccaggctrgagtgcaatggcatgatcatgattcactacagcctcgacttcccasgttcaagggatcctcccatctcagccttcagagtagatgggactacaggcacgcacccaggcgcctggctaattttttattttttgtagagatggggtctcactatgttgcccaggctggtctggaattcctggactcaagtaatcctcccaccttaacctcacaaaatgctgggattataggcatgagccagcatgtctggcctgaaacttgtgctttcttaactccactcacacttaggagccaggcaaggaatgggatttctcctttgtgcttggaggaaatgagctcrggtctctgtaaagataacctcagctctgcaaaccaaaacgaagataagaataaatgcctgtccgccttcccccatacctgggggaactttgactctgtcggataatggatcttttgtcttaaaggaaggaatttcctctgcagccaagaacggttggcagtgcaggttgagacttgctgggttcaggaaccaagccttggggcagagaggctgcaggagctggggccggcttgcccaaggaatggctgagggtggcgggtgttttcgcacggggtggccacgcttctgcaaattgctccattttactcagcatcctttgctgtagagtgccggtgtgctgtcacagcaggctgaaaaatgcatctgacctgtttattctgccctccctgtgaggggctttttggcctgccatttttcactactcctggatagaaacaaaggaacacagtaagaggagaggagagaaatgagaagtttcttgccaaagccaagggaagctctggttccagaaaatgaggctggcactgggccagctgggttgatgttgcccttgaccgcctctttgtggccgattggggaatgtccccccagccgcacctggcccttatggcgtaatccagttgagcctggacgggaaataaaaaggaaaatgtgactcacagcaartgcaaatgcagtctccctcccaggggccttgctcagcttagtctttgggaaactccccgcctgcctggccttatttaacacacagacgcacgggttcctgggataaacagtgctccccagagagccccggccaygagcagggtgtctaccagcacctgggtggcccagaagcacagctgcaactccatggggcctcagatatgccgactggatactttgagctgtaacccccctggaaacccgctgttgatgccatctggaagccctgggtgtcttttggcatctgtatgttgtcactttatctcaatccatagagttttaagttctctcatgaagccctgttgatcttgcctttatttaaaattttgatggtttatcatgaattttttttatcattttrttttttaggagcaattttttaggtttgtaacaagatcgagcagaaagtacagacagttcccatacacccttggcctccacgcatgaacagcctcccccatgatcagcataccctactagagtggtacgtttgttacgatcaatgaaatgagaccgacacattgatatcacccagagtccatagtttacactggggttcactcttgstgttgtacattccatggatttggacaaagaggctgtcaagggcaacatcaacccagctggcycagtgtcgcccaggctggagtgcagtggaacgatctcggctcaccgcaatctctgtctcccgggttcacgccattctcctgcctcagcctcctgagtagctgggacgcaggtrcctgccaccaygcctggctaattttttagtatttttagtagagaccaggtttcaccrtgttagccaggatggtctcgatctcctgacctcgtgatccgcctgccttggcctcctaaagtgctgggattactggcgtgagccaccacacccacctgctttttaaaaktattgcacaaagacattatttatcatgatcactgagcttttgggagacccttaaattttgcactggaggtatgcgtcttgttgacctcaccccagtgctggcccctcatgtaaccccaggagcatcagayactgttactgccagcccccagccacggggcctggagtaaggagagtgaggaaagcccagttcccggcctgtacactggcacgtggtgccacagtttgtcactggagtccttccccagctcaggcagcacagaaaggggagggctaggcaacttgagggtggagccaggacaagatggaatcctcacaccactccggctcctgagaggagaggaagccttccctcacttcagtctgcctgtgcctggagataaacctgcctgcctcttagtttctccacttgaataagtcctcatttctattgcttcagtgtatttgggggctgggagaaatgcaggaaggctgagcatggtgcatttcrcaaatggtgttaaaagacatgcaagagaaagtgtggggaacagtagctgtgttttggacccgtcttagacatcactggtgtctgtgtaatggtctccctcgggtgctgtcctgggatgcaaggtgtctacttctcatttgggagaagcattttgacattcagacagagccaagtgacagcaacacacaagtcctttctgagkcttagagcctagaaatttacaaagaagaaaggtaaagaaagaaattgatgggttcagcagcactgacttatcccaacgccaggttccaacaacctatcgtgtctaaatctgtacttccacagagtgatgggttccctgccctttcctctcatccagagcccagctgaaattcttttcagtggaatttatgccacttctcctttactctctcttcagtgaaaatagagaagaccaggagaaaggaagactaaaaagtaaagtgaaaaccgccttccaatagaatttggttgcagaaataatttccatgaaaaatggtcgggctgatattaggtctggagtcttaatgatggagtagtttccttttaatcatggtgctgtcttagaaatgcctgtctggaatgtgaccatgggcgggggttggtgtctggccactgcgtagtcggccttcggggaaagggtagccacargatgttcccactcttctgtgagccctcaggaatttgaaaataagactcatgtgaaaacaggaacaacagcagcaacttcttgatgcagacagattcctttgttgaccatattctgaatgcatagctttagaaaagagacctcactgaccagcccggcagccagaggagttcccatttctgcaacaaactgcctctgaaacactcagactgaaaaagcaaaaatgatcttaagtggcataggaggattttagactggttagagggagaagttcctcagggggacgaattattgaatatctrtgtggctgttcttttattccaacatgattaactttgatgcttatcattccctatgggaatttaaggaaaagaaggctcataattgccagaatcttccatcctktgtacatgcaaggctgagtaggaaatcagggcaaaggaattgatgaattgtctgtctctaaagatgaaaacaaagagggggcaacaactgtaagactaatgtgagactgtctgaatgtgaacagttatttcttgaatattcaaaaataaatctattttatttatttatttatttatttttmgagacagggtctttctctgttgcccaggctgkagtacagtggcacaaacatagctcactgcagccttgaagtccctgactcaagcaatcctcccacctcatcctcctgagtagctgggactacaagtgcacaccaccatgcccagctaatttttctgtttttatttttttttagaaatggggtcttgctgtgttttctgctggtctcaaacacctggcctcaagtgatcctcccacattggcctcttaaaatgctgggattacaggcatgggccactgcacctggcccaaaagataaaagaattttaaacaaatgaaaagaagtattgctctgtagagtaagtgaaacatttatgaaatttgttttttctaagaccttgtagttattgaaaagtaatactgtaaaaacaaaaattcgcagaagrgagtttcatagcaggtcaataagttcatggtcaggctcttaggctgctagcatagaaaatgtcagagcaggcagacacacaacaaaaaaagakaattttagaccaatatccctgatgaacattgatgcaaaaattctcagtaaaattctggcaaactgaatccagcagcacatcaaaaggcttatccaccaaaatcaagttggcttcatccctgggatgcaaggctggttcaacttacgcaaatcaataaacataatccatcatataaacagaaccaaagacaaaaaccacatgattatctcaatagatgcagaaaaggccttcgacaagattaaacagccttcatgctaaaaactttcaataaactaggtattgatgggacatatctcaaaataataagagctacttatgacaaacccacagccaatatcatactgaatgggcaaaaactggaagcattccctttgaaaactggtagaagacagggatgccctttctcactactcctattcaacatagtgttggaagttctggccagggcaatcaggcaagagaaagaaataaagggtattcaattaggaaaagaggaagtcaaattctccctgtttgcaggtgacatgactgtatatttaaaaacccccgttgtctcagcccaaaatctccttaagctgataagcaacttcagcaaagtctcaggatacaaaatcaatgtgcaaaaatcacaagcattcctatacaccaataacagacaaacagagagccaaatcatgagtgaactcccattcacaattgcttcaaagagaataaaatacctaggaatccaacttacaagggatgtgaaggacctcttcaaggagaactacaaaccactkctcaaygaaataaaagaggacacaaacaaatggaagaacattccatrctcatggataggaagagtcaatattgtgaaaatggccatactgcccaaggtaatktatagattcaatgccatccccatcaagctaccaatgactttcttcacagaattggaaaagactactttaaagttcatatggaaccaaaaaagaggctgtatagccaagacaatcctaagccaaaagaacaaagctggaggcatcacactacctgacttcaaactatactacaaggctacagtaaccaaaacagcatggtactggtaccaaaacagagatacagaccaatggaacagaacagagccctcagaaataataccacacatctacaactgtctgatctttgacaaacctgacaaaaacaagcaatggggaaaggattccctatttatttaataaatggtgccgggaaaactggctagccatatgtrgaaagctgaaactggatcccttccttacagcttatacaaaaattaattcaagatgaattaaaggcttaaatgttagacctaaaaccgcaaaaaccctagaagaaaacctaggcaataccattcaggacagaggcatgggcaaagacttcatgactaaaacaccaaaagcaatggcaacaaaagccaaaattgacaaatgggatctaattaaactaaagagcttctgtacagcaaaagaaactaccatcagagtgaacaggcaacctacagaatgggagaaaatttttacaatctacccacctgacaaagggctaatatccagaatctacaaagaacttaaacaaatttacaagaaaaaatcaaactcttcaacaagygggcgaaggatatgaacagacacttctcaaaagaagacatttatgcatccaacagacacatgaaaaaatgctcatcatcactggtcatcagagaaatgcaaatcaawccacaatgagataccatctcacaccagttagaatggcgatcattaaaaagtcaggaaayracakgtgctggagaggatgtggagaaataggaacacttttacactgttggtgggactgtaaactagttcaaccattgtggaagacagtgtggtgattcctcaaggatctagaactagaaatagcatttgacccaaccatcccattactgggcatatatccaaaggattataaatcatgctgctataaacacacrcacgtaygtttattgcagcactattcacaatagcaaagacttggaaccagcccaaacgtccatcaatgatagactggattaagaaaatgtggcacatatacaccatgtaatactatgtagccataaaaaaggatgagttcatgtcctttgtagggacatggatgaagctggaaaccatcattctcagcaaactatcgcaaggacagaaaaccaaacaccacatgttctcactcataggtgggaattgaacaatgagaacacttggacacagggtggggaatatcacacactggggcctgtggtggggtgggggaatgggggagggatagcattaggagatatacctaatgtaaatgatgagttaatgggtgtagcacaccaacatggcacatgtatacatatgtaacaaacctgcacgttgtgtacatgtaccctagaacttaaagtataataaaaaaaaaaaagaaagaaagaaaatacaacaacaaccacaacaacaaaatgtcagagcattctctctagcatcagaaccagcgccctggcctaagtagctgggagtgggtggttagggtgtctggctggaatcacccataccagtctcttcctagtgcacctgctgctaccactgaggctggaaagcagattctttctggaatatccaatgtgctgggttctggaaggtgagaagcaaggcagttgtggagacttgggttttttgttttgttttgttttgttttttttcagcattatttgccaagctcccagggcacggccaccagcttgatcgggttgagactgctggggcaggcatccatctctagtactgaagtgaaggtgaggcccaactctgcatctgtgctggcagcttccaatcaaggcagcatggctttggaatcacacctgaccagagtttaaggaagcttcctctttaccaaaccaggtctatagtcacccagttttactgtgaagattcagcccagtgattctgcaagccatttaataaatccattttttttaactggctgaaccagttcagttctctacaactgatctctgactgcacaggggcctaacttattatatttgtagatattgtagtgctgcctgttctgtgtgtttcaggaaataggacaagtgctggagggtataggttgatgacttctggaggcttggcagggagctgtaagtgtggttttcaaactatgttctagagaacatggaagttctatattataaatactgcaatttcatgtaagatctcatttgaaaaatgagctgatgctaaactggtaaaaaatacaataaaataaaaccgatacacacaataaaaattaaataggccagtagtatgggggaaaaaaggagggagggagggagggaaggaaggaaggaaggaaggaaggaaggaaggaaggaaggaaggaaggaaggaaaattatgaggaaatttcaaaagaaagggagaaagagagagggagggagggaaggaaggaaatgaataaatgtcctttatactcagcaggagtctttaaatactttaatttgccaaaacattctcttagttttctcgcacttgatgtaatgaatgtcctgagaggtagttttttaaaaaccgagtcaatctttaagtaaaacatttcaggctaagaattaaccattgtaaggaatatgtcaaaaatttcttcagtatagtgaagcatgttttgtgatacaagcatccccccagtttgtcctttatcaactaggattttcatatatgaggcttgctgaaaaaaggcagcgttgtccaggtttcctcacttggctcccaattcacccataagaaagaatgttcttgtaaaagatcatgtggattcatgatgcatttgtgcttactttaaaaaacaaagttggtcagatatccttaggaatctcttgtgattaaaattcctgggttgaaactctagaagagatttctcaaactttgaagcaattgtttagttaatatggacctgagagattctatgccttttaccaaaaaaaatatatcttctaggattactttgcagatgggacataggtaaaaaagcatggcctgaagtgaggagaagatgtgatgaatgacaaaggtgtsaaccctcaggcaccattattttagagggactttcagtgatcagggactatgaggaggaaacagtcttagcagtgagagaggtcttagagaagatttaggttctcctgtttctttctttctttctttttttttttttttttttttttttttgkgagacggagttttgctcttgtcacccaggctggagtgcagtggygtgatctcractcactgcaacctccacctctggggttcagcrattcttgtgcttcagcctcctaagtagctgggattacaggcaacggccaacacacctggttaatttttgtatttttaataaagacaaggtttcactatgttggccaagctggyctcgaactcctgacctcaggtgatccacccacctcagcctcccaaagtgatgggattacaggtgtgagccaccacacttggcctaggttctcctgtttctctttcttcctttgcagccaggctgttgttaaacctggagtataagtcacctttttataaagttaacctaagacttttcagtgctgaagatggagctatagggttaagtaactggaaaggtaacatatttccaaagccatttcagaaaatcagtcttggcgttaagttagagtgaactattccattctctcyctgctatacccattgataccccatcctaacccagacacctagctgattttgttttcctgatgygaaaaatactctaattcaaaaatgaaccctccatcaagtttcaaagacaacacagaagaaagtaggcaagttttatctatgatttatacctttctaaatccaaattagatttgatctggcttcatcaaaaccaataaaaatatcaaagaaccattaaaataagaattaatacaagtagctgttgggtaaaatatgtgttccagaaaaattaagataaagatgatggctgtaattgcagttaatattrgaatataagacaaaagaagaaatgtaaggcattattacatggattgcattgtttaagaygaggtttataccagctcattagaaaaaaaaaaagttttaaggcattatcttccaacaactcttatatcttaatgtttttgacatctgattatctactaagcagttatatatcacagttgttttatgaaatgttttccatgtggctatatctttaccataaaacttcaaaatccaacaacacagtattaagtcatgcagtgagaaggccataacttagaatctatagatttccagggatctaatttaatacatggaaaaagttgatgtagtcttgataattgctttagccctcagatggttggtccttggctattagttgtcttagcaggttgggtaacttcagctgaagaggaatatttgagaggcagatcattgttgaagacttgaatggcaaaagagagttagaaaagtcatttctcccacagtgacaaaattccaaaatttttaatatgttccaataataccagctactactctacactttccccgggaatgacattggaaatttatggattcagatgctgtacttttagatgttctgcaatggtttggttggaacaagagatgagacattaggaaatgttacctgaactgtgtatgaggaaaaagattttgtttatcagcctcttttgtttccctttgccatgaaaastctatctaaaatctgttcaccatgccttactrttttcataaatgcaaaatatattacacacattatttttttttaattaaaagtttctggctgagtcaattttttttgaaagctaattttcagatatgatcctttaggtttatttaactcgatacaagttccccacatttttagcaccggcttttaaagaacagtctaaaaaatgttagaaataaaattaagacgcaagccagttttatggcatacacccaagtagaacttcatccttggtgttctcatcctagcagtggcctccagaaggctgcccgctgatgtccagaaactgagatttagggcagtttctcatatttctggctcagtcgaggaacatgggaaggtacacgttctgcattgctggagggtagattatgtcttcttaggcagaggagttagtgaaaggtcctggtctactggcatccagatttcacaagttagctctgtggtatggatttgaaactaagcaggcccctgtctggagatgaggttctgtctggagcagggaggagccagactttccatccaggaaagctgctttcatgcaggacagcaggcgagagcccccaggcaccaccatgacgctcttcggtttcttgtgattctgagtcactctcttgggggctgttaagggaggaattgtgcctaccctctcccaaattcatatgttgaagtcctaactcctaatacttcagcatgtggctgtatttggaggtaggaacttcggagaggtgattatgttaaaatgaggtcataagtgtaggtcttaatccgatatgactggtgtccttacaagaagaacagatttggatatagacgtgtacagagagaagaccatgtgaagacataagaaaaagacagctatctacaagccagggagagaggcttcagaaggaacccacacagctgacaccttgatcaaaataactctgttgtttaagccccttagcacagccccacgtacttaattgtggcagcctgaacaaatgagtacggggactcctgtcttcttctttcrtcctgtctcctttgaggggaatgtcaggcttatgacagttgtcacaaacatattgtgtgtctttcttcaagacattaaaattgtgtktgtcaagctttccattcactttaatttgttttcatttcagcacatcagcttggtttcttagcattccaaggggaaagtttaaaacctttttgcatatagactccatttgcacggctacttttcttttcggcgattctcaagccccatcctcaaattcagccygtggaagttgtttgacatctaactgagttaactgcatcctatcaagcgaagctcctattttcagcctgctgagtttggctactcaaaagttggttaatgtcattaaaaatgatattcccaccaacttttcatttgcagaatttgctaaggtgttaattggctttcagacatccctggctaaacatctccctataatataaagctaaacatgataaaaataaattacttgttttcccctctctttctgccccaagttttgcccactctcgggttttgttttgtttttttttaatctccattcatgtgtttattaagaatcgatttggtttctggcactgctaaaggtgccatgatgagttattttaaaaacatatacaatctggttcttgtatktaaggaattttcagtataactaaagacacatggtaactatgtaaggactgactttaaaatatccataaatcaaagacttcccrgatgaagctctgattacacccagccaccccggactcctggctgttccagcagtctcgcccagcacctacatccctgccgctctctgctttgattcaccccacaaacgccagtttcccatacccacatctagacctctgcccatcagagagccctccactgggtaaaatattaatagcacccctgctgccggtctctgtctccttacctgctgcattctagtttcatgatgcttctttaacagaacagtgattctcagactttagcaggagacgtgttaaagcgcaggtttctagccctacctcctgagtttctgattcagtaggtctagggtgggacctcataatttgcatttctcacaatttcccaggtgacatggatgctgcaggtcaggggaccactgattgagggtgagacatgccctcagaaagaatgaaatggttatttcagtgaccaccatcaccacataagggcatgtgaatcagtccccagtggagaatagaaagttgtcattttacattggcaggaaaacatagaggcccttgcagggaggacctctcccccattctttgctgttcttatttttgatccctacttgatctctgaatcacctcatctgccacctctttccccygctggacacccttagactcaacatctgacctccgccctgttgctccggtcttggagggtaatcttttcttatgcctttgtgccactctgcacatacatcccaagttacttcattcaaggatttcccacaccagtgtcctgcccttctcctgccccagggacactctggctccaaccatggtcagtttagcaaccagatgttgatatcattcatggtgtggacgaggcaaaggaccagtgcttaaggccagtgcacctgagaatgtccctggaaaagaaagttcccttggaacaagatgctctatgctttgattcagtaattggcctttcttgattctagggctaggcacgttcttgtgcttccatttggttcataaaaggaaccacataatgtaggagcctttttttaagagacagagtcctgctctgtcacccaggctggagttcggtggtgcagtcatagttctacagcctcaatctcctgggctcaagcaagcctcccacctcagcctctcaagtagctggkactayaggtgtgtactatcaattacacttggctattttgttgttgttgttaattttgtagggacgggggtctcackattagcccaggctggtctcaagcttcaggtggtcatctacctcagcctccaaaactgctggaattacaggcatgaaccaccaagcccagcctataggagccttcttaagagtaaaaactcaattaaaactacataccaatgccagcaatgattsttttaagaaatgcttaccggccaggcgtggtggctcacccctgtaatcacagcactttgggagactgaggtgggtggatcacctgaggtcaggagttcgagaccagcctggccaacatggtgaaaccctctctctactaaaaatacaaaaattagmcaggtgtggtggcaggcacctgtaatcccaactagtcgggaggctgtggcaggagaatcacttgagcccrggaagcggaggttgcagagagcagagattgcgccattgcactccagcctgggcgacagagtgagactctgtctcaaaaaaaagagaaaaaagaaaaaaaatgctcaccaagtatctaccaggcaatcttaataaaacagccacaaacctctggcttctggagcttctgttctgttggaggaggcagctgataaagaaataaaatatataatagatggtataagtgctatggagaaaaataaagcaggagaagggatacagagagcgctgaagacatgaagatgggagagttgtaattttatgaaagatggacagggggagcctcactgagaaggcagccttcgagccatgacctggagcatgtgaagatgtaagccatgcagatatctgggggaagagagttccaggcagaggaacagtcaatgcaaaagcccgagaaagagcatgcctggagcattcaaggaacagcaaaaaggccactatgatcggaatgatgtcagaaaggtaacaggccaaatattggatggcttttgcaaaacaaacactctggctccactggcaacattggaaagagaatgtctgcttcattgcagaggtaggatcagtggcgccacttcagatttaaagactattctggctactgggtttggaacagactaaaggcagtgtggacaggagctgggagaccagttaggagtcttgcaataatccaggaagatgggagtgttascagagtgagcagggaaaasaatctgggttctgtagatgctttgaaatgagattaaggttggtttctgccatccaggagtttgtgttctgatggagaaggcayagatgtaagaaactctttttttttttttttttttttgagacggagtctcactctgtcacccaggctggagtgcaatggtgccatcttggctcactgcaacctcatacctcctgggttcaagcaattctcctgtctacaggcatgcagcaccacacccggctaatttttgtatttttaatagagacaggatttcactatgttggccaggctggtctcgaactcctgacctcgcgatccacccggcttggcctcccaaagtgctgggattacaggcgtgaaccactgtgcctggctgatgtaagaaactcttaaccgaggatatgatgcaaacatcaccatagtagctaacatttgctaagcactcattctatgctaggcggtatctaacacaccaaccagcaaagccaagattggaacccaagcagccttgtctgtagaacctacatacttaaccactacaatgtacgaaaaagtaaaaacgacaaagatcttatctggataactgggagagtttttaatgaaaagtagcatttgatttgggttttgaaggatgactagaaattgacagtttgaaaagggggaaggtctcttatgagagcagtgactataataataagattccactaataaccatgtagtgatcacttgaacattccagcaatgaagctggagccacagaggtgtatttctctctacagcagttattccatcctatccagtgccattcacacctgtagctacagstgttcccacaaccccacccccaataaagagggcactgagtgtacccggaagcagccagtagagtaatcaggatcatctcatctgggttcctttacttaccttgtctgtgacattgggcaagttaatcaatctctgagccatttctgtaaatacctacctcacagagtacagttgacccttgaacaacacagggattaggggcgctgactccccatgcagttggaaattcacatatagcttttgactcccccaaaacttaactactaatagcctaccattgagcagaaggcttgccaataacataagtagtcaattaacacatattcgtatgttctatgtattctatactgtatttttaccataaagtaagctatagaaaagaaaatcttattaagataatcattaagagaaactactatttatttagtggaagtgggtcatcattaagctcttcatccccatcatcttcacattgaataaagctgaagaagaggaggaggggttggtcttgctgtctgaggggtagcagaagcaaaaggaaatccacatactgttaagaatggcaaatatccracttattggtggcaaatatgtacaggtctgcagcaatctyaattcttgcctcctcagaagaaacaatttgactgaggggcctaaggcagaaaaagaaaccaaggcaagtttcagggcaggagtggaagtttgttagaaagctttagaacaggaaagaaaggaaagtayacttggaagagacccaagcaggcaccttggagctcaagtgtggcatttttatatatcgacatatttcaggggtcttgtgtcctttttcccatgattctttcctctggrtgggccgcccgcatgcacagtgacctgctaasacttaagagttgagygtgcacagtgtgtttactgcagttgtacacatgcccacctgaggcattcttcccttttccagtggcatgcccccagaagatcatgctttgccattttgtctctaaatgtgcaaaccaaagtytagtggcccaatttctgagctgccagttaccaatttcaagtgtttttatttatagggaaactgcctttccctggtactggctgcgaccaattattattttagagagaccattaacaactacctgaccatcacctgatggttgcctgactttcctggtagggttggagggagccctctcctgccccgctcatgcctgactagctgcctaccataataatagaagtggacccacacagctcaaactgtattgttcacaggtcaactgtagttgtacatagccagtgagatcatataggtcatgttcttaatacactgcctgatatatagtaagtactctgtaaattagctgatggtcatagcgatgaactgaggtttttttcttaatgtctattgcattctaaggtaggacattacaaatttcatttagaaatatttacatcataatggttaaaattaagacatttctcatttgtgacgtactcacttttaacttattctttttaccgatgatgttaactcaaacctcatctctttcccaattcaaaaaaatgctctatcattgtcctttcacatcgtgtttcatttgctaagttcatgagttattttataataattaacattttagattggtcagctgaattctgatagtctttattctcattggtaacatgtcactgagttatattttaggttatcttagatcccatctctaaattctratggccactctgtgttgcactgttcttttcaattctgtctttcagttcctgggtccatcagatctaagaatgtgactgaggtattccagcatggagagagttaatgtgaggttgaatgtggataatgcttcagaaagagtccaaaaaatacagaaattatgctaataggaaagaatgagtatcagaagatttctagcaatatagcagcatgagggatcttagatgctaactgtaccccttgtcaccacaaacacgtagcgacccaggatgaaatataataataacaaaaaaataataataatacatggcaagtttgaaagcgatgaaaggaaatctccagattccaaaagtgaagaagaatatcaaagtggaaatcaccatggacatggatatttcagagatgggtaccatgtctttgaactaggactttgctacttaacatagcaacaggaaaatgaacagatagatggactaatcgcccytgcgtaaatagcctagaggttcaaataactgatcatttattttttaaaaatgggtagatagaactctaatcacatcccaggaaagcagcaaagaggtttgcctctgacctgagaattggggcagaaaaaaaaattatctgggagaaacaaaagccctagacaggaaccgtgcacagggatgaagcctggacttatactacctgacctgcattttggggacttcccacagtatatcagtcaggataggctagttaatgctgcagtaacaattcccaaatctcaacagcacttatcacaaccactgtttatttcttgcttaagttgcttgcccagtgcagcttggcaagaggtcctgcctgtcatagccacccagggtccccatgctgatggaagccccatctcaacatgtcacagaagcaggataaagggagcataacaaatcttggctcttaaagcttctgcaagaagtgatgctttggttaaaagaagccacagatccatgcttacctcmaaaggggacaaggaagtgcaatycaacaatggacctggaatatttgtgaacaayactagagacaatcacaccaagcytatacattaacytaaaagtaatcaggatcattgaaatccctagtccagagtattcagctgaagagagaaatagtcaaccagaatataaatatgaggaaatctcacaatctgaggagagaaaacatgaaagaccaacttagagacaggatcaagcaaccagggccacctatgtctgagaggaattctggaagataaggctagaaaaaaattrgggaaagacaatagtggatgagagaatagatgagaatttttctagaattgaagacaaacytgagacttaagattgaaaaataacacaaaattccaagcaagaaacayacacacacacacacacacacacacacacacacacacaggcccactttggagaaactgcaaaacatcaaagatcaaaagaaaattttaaaagcagctggagagaaatgacaggttacttacaaagaaaagaaaacttaataccagcatgcttttataagccaagaagtcagaaagcaagagtaatagcttcaaaatccaagggaaagaagttaccatcaaccaatatatatatatatatatatttttatccagcaaaattctttatttgagagtgagggcaaaaagagcctactttaagataaacaagattaggagtatttaccattcacagactcactgaaagtactattaccatatgtatttcacacaaaaatccttaatacattataagcaaatcagattcatcaaggtgtaaaagcaataatacatcacaaccaagcgaggtttattccaggtatgcacggctggttcaatatttgaaaatttataaagtaatccaccatatgaacaggctgaagaaggagaatcatatgatcatgttaattgacagttaaaaatatttgataaaatctaacaacaattcatgattaaaaaaacacaaaactcccagcaaactaggaatagaggtgaactttctcacttcataaagagcatctaccagaaacctacagccaacatcatactttccctctaagatagggaacagccaggastgtctgatcttrccactcttaacataattctggacatggtagccactgcaataggcaggaaaaagaaataaaaggcatgtagtttgggaagtaagaaataaaactgtctctgtttgcagatgacattatctacataggaaatccaatgaatgcaccaaaacaactctcctagaagtaatgagtgagttcaagatcaacatacaaaatctattgcatttctatatactaagaatgagcaaatggaagccaaaataaaaaacacagtaccatttacagttgctccagagaacatgaaatacttaggtatacataaaacaaaacatgtatatgatctgtatgttgaaaattacaatatgctgttgaaagaagtcaaagacctaataactgaagagactattttyatagataggaagattcagccaaatgaagatgtcactgctctcccaaaagatctataggtttaaaaatattcctataaaaaccacagcaagttttttttgtaaacataaacaagcttgttctaaaatttatataaaaaggcaaacgagtggtcaggcgcagtgactcacgcctgtaatcccagcactttgggaggccaaggcgggcggatcaygaggtcaggaggtcgagaccatcctggctaacacggtgaaaccctgtctctactaaaaaatacacaaaaaattagccgggcgtattggtgggcgcctgtagtcccaactactcaggaggctgaggcagtagaatggcgtgaacccgggaggcggagcttgcagtgagccgagatcgcgccactgcactccagcctgggtgacaaggcaagactccctctcaaaaaaacaaaaaacaaaamaaaaaaaaaaaaaaggcaaaggagtttgaatagctaaaactattttgacaaagaraaatgaagtgggaggaattattccaccagatttttaggctgcttatagagctacaacaatcaggactttgtagtattggcagacacataggtcaatgaaacagaataaagaacccaaaatagaaccacccaaatacgcccacttggtcttttacaaaatttaagagttctttatatattctagatactsgtccttcatcaaatgtggtttacaaatatttcctttcagtctgtagcttgtcttttcatcctctgaaggagatccagtctgggcacgatggctcatgcctgtaatcccagcactttgggaggctgatgtgggaggatcacttgaggtcaggagttggagaccagcctggccaagtgaaaaagcaattcaatggaggaacaatagcttttttagcatatggtactgaagaaatgggatctcccctcaaaaacttcaacctgagtctcacacttaatacaaaaaaaactcaaaatagatcataaacttgaatgtaaaatggaaaaccatacaacttttagataaaaagcagaaggtattattcaggaactgtagcattgtgaagatttcttagacgtgacagcagaaacatgttccataaaaggaaaagttgataattggatcttattttattctatttatttattattattattattttgttttgacacaaagttttgctcttgttgcccaggctggagtgcaatggtgcaatctcagctcactgcaacctctgccacccgggttcgagcaattcttctgcctcagcctcctgaatagctgggattacagacatgtgccaccacaccttgctaatttttgtatttttagtagagacggggtttcaccatcttggccaggctgttctcraactcctgacctcaagtgatcctcccgcctcagcctcccaaagtgctgggattacaggcatgagccatcttgcccagcctggatctccttaacaggatggaaagacaagctacagactgagaggaaatatttgtaaaccacatctgatgaaggaccagtatctagaatatataaagaactcttaaaactcaatagtgaaaaatcaagcaatccaattagaaattggatgaactacagaaagagacatttcactaaagaggaggtacagatggtaaataagcacatgaaaagatgttcaacatcattagcctttagaaaaatgcaaattaaaaccacagtgaggtagcactacccatgcatcagtatagttcaaataaaaaaaatagagataacacccaatgcgggcagagattcagagaaactggatcacttatacattgctggtggaaatgtaaaatggaatagccacgctagaaagtagttttgcagttccttttattcattttttattttttgagacagggtctccctctgttgcccaggttggagtacagcggcgtaatcacagttccaccatagcccccatctcccaggctcaggtgatcctcccacctcaacttcctgactagctgggactaaaggagcacgccaccatgcccagctaattttttgtatttattttagacacagggtttcaccatgctacgcaggctggtctcgaactctggggtcaagcgaggagcctcccgctttggcctcccaaagtgctgagattaaggcatgagccactgagcccacccctacagttccttttaaaactaaaagtgggccgggtgcggtggcttatgcctgtaatctcagcactctgggaggccaaggtgggcacatcacaaggtcgggagatggagaccmkcctggccaacatgktgaaaccctgtctctactaaaaatacaaaaatcagccaggcatggtggtgtgtgcctataatcccagctactcgggaggctgagacaggagaatctcttgaacccgggaggcagaggttgcagtgagctgagatcacaccactgcactccagggtgggcaacagaatgagactctgtctcaaaaaaaaaaaaaaaaaaaaaaaaaactgaaaatggacttgccatgggacccagcaactgcagtcttttgcattwatctcaracaaatgaaaactgttttcacccagaaacttgtacatgaatattactagcagctttgtttgtaagagccaaaagctagaaactacccacatgtctgtccttcagtgggtgaatagttcaactacgatacatgcataccatggaatactactctgcaacaagggacaaactgtcgatacacaatgacttggatttatgctcagtgaggaaaaaagaaaaaagccagtctctaaagtttacatactgtaccattccactgatacaaaacattgttgagataaaattatagagatgcagaacrgattagtagatgccagggactggggatgtaggtgggagagaggagtttgaatacagaggggtagcacttgggggcctagttatgatggtacaattatcttaattgtgttagtagttacacacagctatacatgtgataaaatcgtatagagcaacataaaattaataacaaatacatacacacatacaaatacatgtgtatgtgtatcaacctgaataagctctgtgggttgcagcaatgccagtgacccagttttgttattgccctatagttatataattgggggagggagggcaaagagtgcctgcgacctccctgtacatttctttgcaactttcttattataatttttttcaaaataaaaatacatatacttctctaagaaggataataaacctagaaggaaaaactgaaatgtgagaagtaatggtgagaaaataaattagtaaacatgtttttggaaaacctaaatgagcataaatcctaataaatcatgtaagggggttaaaagtaaggcaaaataaaaatacctggcagaaacaataaaagaccagagagagtgatcagaatgaaagcatcctaaaagtcctcctattttctagaaggagactgatagccatatacttgaaatatttttatgattaaaaggcagaatggtatctaaacctacgatgctattttgatatgaggtgtcatttactgagcatctgccctgtgtctggaaacctgctaacatcacagtctctattataattctgaaaggaagtagctttttcctctttttattgaagagaaacwaatgccaaacagggggtgaataaagtacaagttakagcrgtaagtggtaaagtcaatatttgaacccagggctctctatctcctaagcatatgtgcttttaacctccctgtcccctcttgagcataatgaatatggaaataatgcattttctaaaaggaatgctgcagtgttttgaaggtgaagtagtcttacattttatagaatgaaatatgaaatcatctccaaactatgrgcacaacagaaagctttcctatcttccctttttatttgatttcattgaccaaagtgtggacaaaactgattacaaaatagaaggctttcacatcttccctttcctttcatatcagctccaaacagtcattgtgaagccatgtgtcccaggaacccatcattcaatgagttgtgctacttggaagaatgacgagcaacaattcacattcagatttggtgttttcttcatcaagctataagcatagaaatgaaatttttgacattgtcccatatggatgagaaaagaaaaagtggtattttgaagatcaaagaaaaccacaaatctatggatgtcctatatgtaaatcttgtttctgtttctcctgatgctaaaatgttgaattctaaatatgcaaaggtacattcacacacaaacacacacacacacacacacacacacacaccatacaggatgaacrcacacattgctaatgggtcctagaaaaaggtgctagggcttagttgcacatgtttgttgacaggttaaaataaaagaaacctgaacacgcccctctgggtctatcagtctttttctccttttagctaaagctctccagtttatacaattgaaaagagggagtacttttatcttacctgaaacattatgcagccaaagcttctatttactgactcataaaggattttatgcctcatctgttgtacttaagatgactatagagaatataccagaaaaaagatttgaaatgtgttgccttctgaagttagaattataatcaggtgtattattgaacaatcctactttccttaatgtgtacagatttcagcattggcaggaagtattgaagtaaacccaaacacagcattaagcaaaatgtagcctcaaactctaaaaacatgtacaattgccactcctctgtgtgaagacttcagaatgattttgcccaactctttcataatagtttcatctgatgaaacaacaaaagcacctgtcactgggtgagcgcagagccttctataaaaacatcaggaacattctgatcccagaactaccatcgcagctctgtcatggaataagccagagagaccctgggcagatctcttctcctttctagaccttaattttctccatctataaaatcctgacacatttcccaagaagtctgagaggaagattggctttatagaaatggttctgaacagcaggatgtctcgtagcaatgtttaatcgttggtgatgataacatgggagactatttactttgtgtccttgatgaagatacgtgtgtgtgtgtgtgtgtgtgtgtgtgtgcgtgcgtgtgcgtgcgcgtgcgcatgtgatgaagtctcactctgttgccccggctggagtayaatagtaccatcatagctcactgaagcttcaaaatcctgggttcaagcaatcctcctgcctcagcctcccaagtagctgggaccagagattcacaccatcaagctcaactgattttttcatttctatttttattttttgtagagatgggttctgattttgttgcccaggctggtttcaaactcctggcctcaagtgatccccccacctcagcctcctaaaatcttagaatgatagggtgtgagcccccacgcccagccaatagctattctttcaccaagataaaaccaaaggcaaagtatcagaaagaagaaactcatcaaaacgaaggcagacatggccataatattctaaaatgttcatgtcccattccattttagagttagtgttttcgaaagcgtgaccttgatggcagtccttaactgccattcctatggccatggtcatgaagagtggcctggtagccccaccttatccaggcggacccgtgaaaagcgtccacttgtatattggtttgtcgtgttcttaacaaaaaaataaagaggtttctgaattttttggtttaagaccctaagttttacatgaatggccaatataacatatttctcaattttgttattggtctaggttcatcttgagcaaaatattatttatatattaattttgagaggtcatatagcatgtggttaacagcatagactctaaagccagacagcctgggatcatgtcccagctccatcatctgccattgtgtgatgctggtcaaatcatccaactactctttgctccagtttcctcatcagtaaatggatataaaaatargacctacttcatagtattgctgtgaggattacattagttaattgtgcagtatagtgcctgaaccataacaaacacttcataagttggrggtatttttgtttttaagcatttcataaaaccaatgtgggaaaataaatcatgagctatcaacccaccctccgaatgtatatagatcctgaccacttcttacatcccctactcctaatcsaccaccacctcttgctgggacttgtgcagtagccacctaactggttcccctcttatcacgagcagtctccacagggcaacccaagtagttgttccaactcctgagtcacatcacacctttcctctattcaatatactgcgtggcccatcatttcattcagaataaaagagtacaagccttggctcatcccctgccaccctcctctcacctctctgctccaattcctggcatcttggcagcttctttaataacctagtttattggcaacaacctcaaggcctttgtactttctgttcttttttgcctgatatgttcttctcctagatgtctgtgggagagtggcttctccctcatcaatctttattcaaacaccatcttatctgaagaagggctctctggccacaatctctgaaatatcctttccttccctgttaaatttatctctaacctgccttatttccctatagaggactaatagccacctgatatagtatackctcattcttaaactgacatatgacctgtctcttgctaaccagcatcggtggtccatgrcagcaactatcttgttttgttcactgctgttttacaagctcctagtatgrtgcctgcacatagtagatgctcaataaatatgtgttgcattagttaatgaactggcgtggatgatacagtagtttatattggactttcgaagcacttttacatayacagtcttatttgatccttggaaataagaatcacagggggacagattttttttcttgcccctacacctacaaagattggctcagatcccaaaggggcttccattttttccaaaaccaagtaccctgacaccactttacttttgtacttatgtcaaatattactattttatttgactgagtttaagttgcatcatttaatgtactcttgagataagcaacagcatggatgtatctcaagataatgatgcagaatgaaagaagccagaccaaaagagtatatactgtctgatttcatttcttcaaaattctagggaatgcamattaatttatagtgacagaaagcagatcagtaattgctcaggggctggaggaagggattacaaatggcccaaaggaacattttagggtgatgcagatagtcattatcttcattttggtgatcgtttcataagtatatccatatatcaaaacttaccaaattgtacacttyagatgtgtgcagttttttaaaattttttatttccataggtttctggggaacaggtagtatttggttacatgagtaagttctttaatggtgacttgtgagattttcgtgcacccatcacctgagccatttcactgaacccaatttgcagtcttttattccctcacccctctcccaccctttcccctgagtccccagagtccactctatcattcttatgcctttaagtcctcatagctcagctcccatttatgagtgagagcatacgatgtttggttttccattcctgagttacttcacttagaataatagtatccagtgccatccaggttgctgcaaatgccattaatttcttcctttttatgtgatattccatcatatatatatcacaatttcttttcttttcttttctttttttttcttttttcttttttttttttttttttttgagacagggtctcattctgtcgcccaggctgaagtacagtggtgtgatcttgactcactgtaacctccgcctcccgggttcaagcgattctcctgcctcagcctcctgagtagctgcaattacaggcacccgccaccacgcccagctaattttgtatttttagtagagacagggtttcaccatgttggccaggctggtctcgaactcccaacctcaggcaatccgcccgccttggcctcccaaagtgctgggattacaggtgtgagtcaccatgcctggcctataccacagtttctttatccattcattgattgatgggcatttatgtaatttattgtacattattttgcctaataaaactgttttgaaaacagagagataccttgcccaaggtcacacacatttttctgcaaatcttgactgcagtccatgtctgtggattcctggtatgtccttctgcttcctgtgttgcttaccaggtgggtaatgaggctcagggttttaacagtaatgatacccatttacaataacatttatttatgtattgctctgtgctgaaaggagaactttgattttacactttgaaggtgttctctatcacttttctaaggctctatctcttaaatttagtgaaaatcaagtagccaacattgattggatagtatttgaggaactgcaggttaatagcacttttatatgaacaaattgagagaatttaaatgatttgaccgaggtcatcaagaacagcagctttggcacaggaattagaaactggattgcccttgcattttgtttttcagcataaaagctacatttctgttctctccattctttatgggcaaattgtaactctttttccccccaaagtacctaaaataatctgtttctcacagtccttcgtgcgtgtcttctttttctcgcttgtgaataaggtgtactaaatgcctcccagcacacacaggactcagtgttatgttctttttttyctctcaattcaccgtgtaagagaggcaccacctattaaaaacaatatccacagacctgaagtcagcaaagatatcagaatgtactgtgcatgtcagattagggctgaaattccaactatagtgtttaaatggggactcattttaattaataaatttggtcctgacatgcaattgctcttcacttgatcaatattttgctattcagwtggacaggtttttttttaatttactgctgtgtgtgactgagttcctacttaatattcattgacacaaaaggattcaaagagaagtcagcctaactctcaagtaaacagaatagaacagatatacatgtgttttgcaattgcaaggaaggtatactaattttgagatacttgagatttggggctttaaaaataattaatggatctttatagttcagctttacatttattggtttatcccttttattgtacttacattcccaagacccttggttgattattttacaattgtgattttaaatgcattttgatactaactgctacttacaggatatacttggtgaattctttcacatattaacattactctctggtttatctattatgagaaagtgtgtgtttgtgtatgcatgtgtgtgtgtacatatacacacagatatataaattttcttaaattgagacatccttttctattatatttgcaagtatcactaaagaatctgagtcacacctattctggcagagagaaagaaaacaacggaaaattaaagctccaacatgacttttttttttcattcgtgtcatggctctcatctaattgaacactagtatgtttccttgggtcttgctgtaaacattgaaaacttttagttttctttggattttggagactagatacgatcagtaggaaatcgctaatgggaattgatgcttttgattccagccaagcataccaccgaggtcacagaggtaacatccaactcgtacacaaaacatgccttataaaactagagcatcgccgagggtgggttagtaacatctgcagaggaacagccctacntgtgctgccagaatcatcagtgtaaccaaaagttgttgtgtttgcagaattctaaaagaaagatcccgtgtgatttttatgtttgttataattttccattaagattgtgagaatatcacaaaaatgtttggtccaaaaaaaaaaagagaagaaatctgaatcttctaaaaatatttctattattactggtggcattcgagccatgtctcatctgacttgcttgtcagtcttcagcaatcatttgggactatttcgagattggatgacctcatgtttcagctttaatgccacattccccctcaagctactggcctatgttgacaaaatgactagatgactagaaagggattatctaaaagcactgtttccagttcttctcctgtcatttctcttggacccatccattgatgccttcaatccctccactccacagaactcgggtccaggtcacagatgattccatgggttaaccagtgcttgcttctcttgactgccaacacatcacatggtagaccatgtcccatccttaagacacacccgtctcttggcttcctggacatctcttccatctcacaagcttccttatgacctcactggctggtcctcctgggtctcctttgttggttgcatctcattttctcatccatagacactggcttctgccctagacctcattgcttctctatattcatgccatcggtgtgaatggatcctgccrcatggtgccaaatatcagctataggatgatgaccgctgtagcctggatgtgtcctctgaaatacagattaatagttcagatcatctacttgacatctcaacctcaacaagtccaaaaaatgaacttcttatttcctccaataaaactatctcctcccacagttttccccatctcaataaattgtaaccctgttatgctagttgctctcaacaaaaccctttgcatctttactcatctttcgatctcatttcatatctaatctgatgagaaatctcattcactcttcttccaaaatatatgcacaaatccagccacttctcaccatctctatctaaccctgcactcaggtccaacccaccataatcactttcctggattattgccttaactcctggtggtctcttgagtttagtcctygtcccttgtagttaattctttttgagatggactctcgctctgtcacccaggctggagtgcagtggcatgatctcagctcactgcaacctccacctcctgggtttaagtgattctcctgtctcagcctcccgagtagctgggactacaggcccagctaatttttgtatttttagtagagacagggtttcaccatattggtcaggctggtctcctactcctgacctcaggtgatccacctgccttggcttcccaaagtgctaggattacaggcatgagccaccacgcccagccccgtagttaatttttaacagagcagccctagccattgacctcatcttgtcacacctctgctcataatcctctgttgccttgcagctcaatcaagagcacaagggcctccaccatgtgatcacctaccacctttctaacctcttctcattccatttctcatctcactcatttccctccaaacacagtagctctctgctgtttctggagcacatccagcatacttttgtctcaagaaaacttgcttttccctttgcctccttcccccagatatctacaagtctcgcttccacacttcttccaaatatcttcacatcagcaggatgtgcaactactatgaataaaatagcaatccgcccacttccaccccactgctctctagtccccacaccctgttttgtctttttccctgtgtcttggcacactctacacttacttgtttatgagtttagtgtctatctacatcaatagaagctatgatctctgagcttaccatcgtatcccctccttttagaagactgaggtacatggtggtattcaaaaaatatttctagagtaaatgaaatccatcttttaccatacccattttgtttaagtgtgaagtttaatgcaatactgtttctctgtaaatctaaaacagtcctaagtttcatcaacagttctctattcctaaagaatttatttaaggatcaagataatagtccagtctgctttgctttagttgttcctccttgcataagtatgccacataggttgaattatcttgtcctgtggaaaggggacacagactattatcctcccttttgttatgcttgttatataagcataatgtttacatatgagctgaattgctactatagaaggtaaagctgacagaatgcacagatgctggtaagggaagcagattccttccacctggggtaggtgctcaacttgtttaatgcatgttatgattggggtagctcagtatgatgactttgcttgataagttcctcaggtaacaaagcagatgggagggggtacttatagggttgattgctttkttcccagtgccttgagttggaaagccaacaattgtcgttttgatcatgaggcatttagggggacttctacctctgtatgtaatggggagagaaaggtgatttatggtgaatctggaagcaggagttgtattttacaggtggtgatgggaagatctggggacatggacccatcggaggatgggcaccttgtccttgcggactcgccccacccaccactctcagagctgttcaaatggggccctgcatggtttcgccaccctcagacatttgttctttattgtgtgatcttgtggttgagaacagaagtgactcttaaaaggcagcgccagaacttcaaaaggaaatgtctaggaggaagtagccatgtgtgatgcctcttaaatgcctctttagaaggtatcagaggagaacaaaagataaaggtacaaccaaaaagtcttctggagttttttaagggcggattggaaagctaggtttgtgaagcccagccttggagatttaagtcatgggaatgactgtccccaagatggctgctcttaaagtccctgcatggttggaggcccggcagtctggagcagcatggtagcctgatctctctctttttttttttttttttttttgagatagagtctytctgttgtcacccaggttggagcacagtggagtgatctcggctcactacaacctccacctcccaggttcaagcgattctcctgcctcagcctcctgaatagctgggattataggcacctgccaccatgcccggttaatttttgtagttttagtagagacaggatttcaccttgttggccaggctggtctcgaactcctgacctcaggtaatccacccaccttggtctcccaaagtgctgggattacagtcatgagccaccacacccagccacttgatatcttgttaccctccttgcacctgtacttccactagcagtgactcttctttcccacttgctcttggggaaaaaaaaaagcatataaagatacactttacagactttacaaacattagataagccttacaaacacattgtaaaaacccccttccctaccagaacacaagccaccaaatgacctagatctgaacatgaggccaacagatcggtctcaacccccttccgcctttgcttgagactcacacactcttgcacactcacacacaagactgtgatctgagcactcatccccagccttagagaattgggcccttttcagtgccatctctctggaccctcaaaagcagtagctccctcaggaacccctttattgctctggccagggctgagagaaggacattccagttctcccacaggggcagggtgtgtaaaggcagaagacacagacaaggctgccagcagatccacaccctgtggcgtgggcctgaggacgtgggaggagctgtgctgggaacagcagggagacccagggaggggagtgggcagagagccagggactagcctaggaagggatgatccggctggctgctggcttcaggctgcagtcaggctggatttgcctgagagtgtccccagggcagctgtaccctgttacaagggaggaaacttttctaacagccctaggaaagcctattgaaagctttcagtagtgaaccagagactgaacaaataacgacgtaattattacataacagtaacaggaaaactttagagcgtaaatggtaacaaaagttgttccccaatatataaactttggataccctaaaagcagctcagcgtgactcagtttttgctactagcataaaaccaaaaataatcagatccctgcagaagtagagggtactcaggtatccacctccatagcactacttaagaaataaaaataaaataacctgttcatagagtggacagcacaacttgaatgccaaaaggcagagaaggttctgttcctggctttgatgctgacgcttgggaaacaccccttgtctttctgcatcacacacaagcctgcctggggcaagaatccagaggcttgtatatgcccatgtctaaatatttttaaaggtataaatcaagctaacaaactattagataaaatgtgttctatcctcatactttgacaaatttaccttcacgatgaccgaggatgccagatttgattttagacttctctgagccctcacagttgtgggctggatcatgtgatcaggaagggtcccccccacatcccagcctgcagcaagccatcttccctcctcttcatcctccctccagctcccttccgctttgcaaggaggctcaggcacacgtgagtgattttcctcaactacacgggcaggttccctccatgtgccctgcaaacagcattctttggtcacccctcagtgtgaggggtgcatacaccaatgtcaggcaaggattasgggacaaggactcccttcccagactcctcctccattccacagtttgacccttattccttcaggacttatacccctaatccctgtacttccatcaagtcagtcacaaggatttagggaagctgatcatttctatgagagctggcaatggatggattaggttcctttatgttttcaggtcacgtaagagatacagcgagtcttttgttttttttaagagctccaagatgaaggccagcrtgatatgaatttcctcaaactgcccacacagtctttctccccaccctctggggaaaaaaatctgagcctccccctcagatacctaagaagaagctgagaaaaatctgcccagaagaggaacagctgctgagagcctgcctcaccctccctggctggccgtatttccaactttgttgccttcttcagtagatctggggaacaaaaaagcaaggcgtgaaatttgagtgttcccaagtctctctccatagctgcccgtgagcagtgttaccttttgattgaggcactcacgcttgagggccacatgaataaatgcacgcctaagtgtgagggtggcaaagaccaatcattcacagactgatgggaattgtttccctaaaatattcccctgagctgctagaragggggtgatttccacgagagcatagactgatgcggactagaattgctaggacagggaacccccgtggacggctggccattgagacacagtggagaggaaggagaccatggtgtgaagtctacgaatgagagtgaggaaaaggaagaggtgggaagaagtggtacccaaggataaggctttatggaatctaagcatcccacatttactgtttttaaaaatgagcttgaaaaaktagggtgtccgtcctgtgaaatggaatcccacagccacagatctgctaacatttgtttatatttgttgtcaaagaatagcttgatttttttttttttggttattaacataacttaagtggaataaaagtataaaggagcaagcaccatggttttctgtcatctcctctcctcttttcttttttcttttctgagacagagtgttgctctgtcacccaggctggagtgcagtggtacaatcatagctcactgcagccttgatctcctgggctcccgggtcctcctgcctcagcctccgtagtagctgggactacaggcatctgccaccaccaataaaaaaaaaatgctgctttttttttattttttgtagagatcatctcatcatattattcaggccggtcttaaactcctagcttcaaacgatcctcctcccttcttgtcctcccaaagtgctgggaatactggtgtgagccattgcgcccagccaacactgtttcctttccacttggaaagtagtttatcctggaaattcctgggatcccgacttttgtttaccagagtggaaaagctaatcaagttgatacttccccagtatctttctcccccaacttgaggaccaaacaggttgtgccttttcaaaaagaataattttttcccaatagtagaaaataaatcttgaacaataaaatttatacacttcacattgatgctttttaaatctacacgcaaattacataaaaaatagcacttcatgctgaaaactttctaaagatatattcactcctctgtaataactactggttatcactacgtaaaataccaatactttagcacacaagaaaaattttagattaactcaggcagtttctcactaaagtccataatctctgcgcctaaatctgctaatcactgtaattgaagaaaatgcaggaagtataaatctcctagggggcagtgtttgtaaccytttttaaaaagaaattacacccagagtctttttgatagtttgaaaacatgcactggaaactgttgcatatccctaaaaggccaacttttttttttttcctggggccatgattatttaacttttacatttttgttcttatctttaagaaaatctctgctgggtgcggtggctcacgcctgtaatcccagcaatttgggaggcckaggcaggcggattacctaaggtcaggagtttgagaccatcctggccaacatggtgaaaccctgtctctactaaaaatacaaaaattagctgagtgtggtggcaagtgcctgtaatcccagttactcgggtagctgaggtaagagaatcgcttgaacccaggaggcagaggttgcagtgatcacaccactgctctccaggctgggtggcaacagagcaagactcgtctccaaaaaaaaaaaaaaaaaagaaagaaaatctcattctttctgacctttgctctttgctttctataaccactcatcagaagctaagggccataactacatccagatttggcctcctgagtcagatctgagtgctctgtgggaggggaactattaagacagctctcttttgtcacttttaaaatgatttttctttaattttttgaatggaaaaaatacagaaaacataatatagtaataccataaacagatgttagtgtctgtttaatgtctgagaggcagaatggtacagtggtgaagacaattagctaggtaagtcacacaacttacttctctctgcctcagtggtcctcatctgtgagatggggataatagtagtgacctcatacagaagattaaatgaattaatatgtggaagagtttggatcagtgcctggcacatagcaaatgctatataggtttttgtcagattttaaagagaaaaacatgtttccataattgcttgagccctcttacacttttaaagtaaaatattgtaaaacccctgcactttctttccccatcctttgccagagctaaccacatgctggagttggagagtgtaactaccatgcacattttgggcttccactatgctcacaatgtatattattgttttgtgtgttataaagctttacttaaataggatcatactgcacgtatccttttataagtttcggtgttcactcagcattatgtttttgagattcatccatattgacagagatggttctagttcataatttgttaccgctgttaactgttccaatgtatcaataacccactgagaacaagcagatgacaaacggtgctacaatgagctccatggaacaagtgtccacatgtgagattttctctgcgatggtcagcttaaaagacgtagctaggtatgggaggcacctcttcaacttcatggatagggttcaatagtgattatgcaaatttacactctcaccagcagtaaataacaggctgtattttcccacatcctcaccagtacttgaggctgttatattttctgacttttctctatgtgacgagaataaaataggatgtgacatttttcatttttatgtccataattactaatttattggccactggagtttccctctcattgaattgcctatttatatccatttttggatatccattattgtctattttcttattgctttataaatgttctttaattattctgaatgcaaatccttggtagagcatgtgagttgtaaatatcttctctctgtggtttgtcttcattactttgtttgtaatgtcttttgtagttcaaaatcctcatttcaatgcagtttaattaggtaatattttccagcatagtttatgatctttgtttctttttaaagtccttccctgtaccaatacactgggagacaacaccatgtggtgtttttagttttttgtttatgcgaagttttagagttgagcttctcacatgtatgtctttggtccatcaggaattgcttttacttatggtgtaagaaagggatgtattttttactttttccatatggaaaaccaattttcccgacactatttattgaatagtcatttctctatgggtttgtatgacctcttctgtcatatatcaagctctcacaaagtctgtgtctttgtctaggctctctgtttcattgcgtagtcttgtttgtcctatccgtgtgccaagccacactggcttaatagtgctgatacctggtggagcaagtaccccctcttattattattcctcaaaattgccagattgatgttataagtggttttgtttgtttgtttgtttgtttgttttgttttgaggtggagtcttgctctgtcacccaggctggagtgcaatggygtgatcttggctcgttgccacctcatgcctcctgggtttaagcaattctcctgcctcagcctcccaaggagctgagactacaggcctatgccaccacacccagctaatttttgtgttttcagtagagacagggttttaccatgttggtcaggctggtctcaagctacggacctcaggtgatccacccacctcagccttccagagtgctgggattacagacgtgaaccatcatgcctggctgtaagtggtatatttttattaaactgtattctctattttttctagtatttcaggttgctgtcaatcctatatattgatcctgtatcattcagttatattgaatagttataatagtgtatctgcagatttccttacattattatattgtctatgaacaagtaccattttggctatctctttttaatccatattgcctttatttctttttcttatattcaccatgctagtgagttcttaggatgcagtgacagcaaaaattccaaattttaaaacaatccttctaacatttcatcactgagcctgatacttgtttgaggtttttgctaaacataagaacattctttttaatttttaaattactggtttttaaaaaagttatgaatgtgtgttggatttttcttaacatttagctgactctgttaagataagtgtatagtttttttatttatattgcagaaaattttagggctggactgtctaatgtgaaaccagccttacattcctgagataaattattttggatcatgatgtgtttgttcatatattgctgtatttgctttactaatattttatttagggctttggatttgaatgtaaaatcccttcttattctatgtcttcgtctgttctcatgctgctaataaagacatacctgagactgggtaattgatcaagaaaagaagtttaatggactcacagttccacatggctggggaggcctcataatcatggcagaaggcaaatgaggagtaaagtcacatcttacatggtggcaggcaaagagagagcttgtgtaggggaactcccttttataaaaccatcacctcatgagacttattcactatcacaagaacagcatgggaaagacccacccccatgattcagttacctcccaccaggtccctcctatgatatgtgggaattatgggagctacaattcaagataagatttggctggggacatagccaaaccatatcattctctctttctaatatcaaggtttatactagccttataacattaattgatattataatatttgatttaaaccacagctcatcttaagtgttagaattcagatacagttatagcatattcgtaattagaatagtgttcctcacagcattttcttataatattttctcccttaattgttgagtaacctttgagatgaaaatgaggactcaactgatgttgctacaagttctgttgtgactttacattatagcttcttcatggacaagtttctaaatatccatgcaaagggacaagaagacctatttggaaggaccaggaggatcacagcactggaaatcagcatctttcactcagtctgaattccagaaatcatcaattgattctttcagccattgtttagagaaatgccttgggatgctcatttcaatgatattaacattttacttgaatcccaattgcaccaatttgtctgaaacaaaacaaagttaaaggggtaagccccagggctttctgtggagaatgagtgcctccaagcagaactctgcccagtgactgccctctgtcaggtggttatggggggcaagacactctctcatattacttcctatagatttaactttttttttttttttttttttgagacagagtctcgctctattgcccaggctggagtgcagtggcaccatcttggctcactgcaagttctgcctcctgggctcacaccattctcccacctaagcctccagagtagttgggactacaggcacccaccaccacacccagctaattttgtttttgtatttttagtagagatgggagagatggggtttcactgtgttagtcaggatggtctcgatctcctgacctcgtgatccacctgccgtggcctcccaaggtgctgggattacaggtgtgagccactgcccctggcctagatttaacttttaacatgttctttcagggtgctaacataggtttcctcacacttatgagtctttaaagcactttttttttttttgagtcagagactcagtttgtcgcccaggctggagtgcagtggcacaatctcggctcattgcagccactgccttctgagttcaagtgattctcctgcctcaaattcccaggtagctggaattacaggcgcacaccaccacgcccagataatttttgtttttttgttttgtttttttgagagggagtcttgctctgtcgcccaggctgaagtgcagtggcaccatctcggctcactgcaacctctgcctcccaggttcacgtgattctcctgccttagcctcccaagtagctgggactacaggcatgcaccaccacacccagctaatttttgtatttttagtagagtcgaggtttcaccatgttggccaggatggtctcaatctcttgacctagtgatctgcccacctcagttttagtagaaatagggtttcaccgtgttgcccaggttggtctcaaattcctaacctcaagtgatccacccaccttggcctccgaaagttctgggattacaggcatgagccacagcacccggccaagggcacattcaaaattggaattyagcttaaaattattattgcctggaatttctcagtccttcataaagattcgtctagagactctcaaagtcttacattgtcctcaagtatcaggtcactaagtgaaataaaaaaataattgacagatagatccttcttgaatacagcaaaaatttggtatttacccaattcaagataaaaacagtgaaatccaagagtaaagttattccaaattttttttttttttaaatccagactttctgcggagaatgaattttctattatctttttcttctttgcaaggcaattgtcatcattctgctttgtcacctactttaaaagctatcctataggaagggacttaacagcgggagagttctctctgggatttgagaagttactgacatcagaaggtatcctagagccatttgaggaacacacacacccttgttcaaatcgctgctgtgtttgaaacaaaatgtcagctggtgttaggtaagaattgctaacttctaaagaatagtgtcatttatagaaccactgcaggggttagaacacagaggatgaccagaaaacacctccaagaagaaagagattgagtgagacttttttgattgcttttgtactcccgagttcctggcacaggmctggcacaagatgggaacttgtctagtgaattaatgaagccatttctaccgttgcctctagggtacctctaagtacgttatattctttgtgggtgttgtttttctgttctgttttttgtttttgtttttgctttttttgagacggagtctyactctgtcgccaggctggagtgcagtggcatgatcttggctcactgcaactccgcctcccaggttcaagcaattctcatgcctcagcctcccgagtagctrggattagaggcacatgccaccatgcccagctaatttttgtatttttagtagagacggggtttcaccatgttgcccaggatgatctcgatctcctgaccttgtgatctgcccacctcggcctcccacagtgctgggattataggtgtgagccaccgcgcccggcctctttttagttttaaatcataagactcttgaatacagtctcttaaagatatgctactgtgttaactgtactggaatcttttgcttaccttaaatgtcaatgtctttcccatttcagatgccagtgtacattctaccaactctactgaaagcttttatttgagcagcccttggcttatttcctctggcttcaaaaattacccagttaactgagtaggattcctaactggccagtccgtttagcgattttttagatgaaagttttagattttagtgcagaagttgtctttgaagattatcaaatcaaaacatccttattttagaaagatgatacagaaaatcataaggaaatctgagtgaacttaccacccttcacattttagggtatagtcatcaggtatttcaggagacttaacttgaacctaacgaaaccaagtttcaggcccctctaaatataaatgttcacttttatacctaagtttctgtttcaaatgttgttattcttgtwcttaaagaggccactcaaaattgtgtaagcttcagggctcacaaaatgtggggtccatcactgtcatcaaggtgattaattgatttgtataaatctagttcctttctgttttatgatatgctttgtcatttaataaaatacagttttttcacattgccatattctcttacaattgcttttcataactgtttagtgttccagtgaacagatttattaaatgaactacttattaaatcaatcccctattgttggagattctccctcaccttatattattcctacagttgatacttcattgagtgtctwggtaaggatgtcattgtgcctaaatgtgtaaaagttgaattagtgcttcaaaccacatgtgtactttgggggcttttgatacattgacaaataacccttcagagaaatggtatcaacttactttcccaacagtgatatgtgggagtatccattttcccatcccttgtcagcactatttattgtatcaacctttgccaatgttgtaggtgtaaaaacttaccttgctattttaattttaatatttttcataagttgaaaacttatttcccatcagaaaaygcwataagaatcctttatatatttaaggcattagccatttgccactggtattgcagatggtgatctgcatagtcctaaaatggatttggagaaactgaggcatttagtttatttggaattgtcaccgtcagctgcctgcagaagacgcccttcagggaaaatggtattgctattccaaaaggcaagcatacatcatattcacttggccacattacaggaataatttaatgtgtttcaactaaaggtatctgagcgtctactaggtacctaactctgtactctatcttaccatctggtgagggaaactgtatacaacaaaccataatgcaggattaaaagccacgcttgcagccaggtgtggtggctccacctgtaatcctagcactgtgggaggtcaaggtgggtgaatcacctgaggtcaggagttcgagaacagcctggccaacataccaaaaccccgtctctactaaaaaaatacaaaaattagccggacatgggggcatatacctgtagtcccagctactcaggaggctgaagcaagagaatcacttgaacccaggaggtgtgacgttgcagtgagccgagatcgcaccattgcactccagcttgggcaacagagcgagactctgtctgaaaaaaaaaagtcatgcttgcagtctcaacaaaatacaatatgagcacatcggtgaggtaaattaattccttcattcctgatgaggaaatgatggagtagtaatgggggaagattgttcagaggacttgatgtatatgtgaagcaaagaggtggtgagaagtgcgtggcgcagcrtgtgggatgaatgtgcaccgtaagaggtccagtcccactgcggtgccctagcaaagtgggacgcttcgggaaaataaggcaggaagaggagttgaggtcacatggtgaatatccttggataccatgttgagataaagatattttagaagatgtcccacattctggaactgattctgagacgcaaaagataatgaagatgtgtgggcacaagtgtgacctgccaactgcaccctgctttttgtaaaatgtgagtaagagatcttggttaaaatccacattcctttgcaaagccatggaggtgaaagaacccttcagtgttcaggcttctcagggggacactgagcattgcaaggttcatatcgacactcactctggcacaggtttcagagctcggcacctccccctcccaccccacacccccatccagcatgtggatccattctaaccctgtgatggcattcccttcggttgaggtaaagacgggaatcttttttctgagctgcacccagcacgcttcaacatcttcaagcagatggtcagcctaaaagtgtgaggatagctcaggtygccctgagaggatgcttgcaggagatggacagagctaaatgcaggatttcaggagaagtatgcttcaagaaagagagcatggcatctatgaatttggcagaagtggacatatagcttctgccaaatgatgagttgtaacttttaggcaaattgcttggactttctgagcttttatttccttatctgtgaaatggggtcatagtatccatctgacaagagatactgtgctgatgagatgaaatacatacacatggtttctgacatatggcaggcatcctataaatgcatttctctcatcctcatcccttcttcataaaaagggagtttgggaggcagagtcccctggacaacctctgggaatctggagcagccagcactaacttggagcgaggaagcctgtgccaaagcatgcggaatctctagaaaccatgtgggcttttgttcatcatcatgccaataaaacgccatcggatattaagagaattccttctgagtctaagcatttctaaatacctttcctgaattgagaaagcaaactgtgtaaaagccaagcgtgaaaagactattctgtttgcaaaggcatttttcccatcctgcctggcttgtcacgttctgtgactggactcatgcacccagctggcagctgcaccagccagaccctgaggtaactatagtttaggcccattttttttcctgctccagagactacaaattctatttcaagcacacgcatgtacagaatgcagatgtggggatgaaaatcagaccatcttctgggagcgaggctgtgatacttaactgtagggacgccattggtggcctttctgcagtggcctcgcccaggcatggmtggggcatggacctcaagagcggttttggccttttgatgtaccatagcaatcacatgggacaatcaccacacatcccacgtggggccaagacattgcgtgatctgtgatcagacaggcttaaaaggtattctccgcattctgaggaatttgtaacagcatggagattctggaaaactagttccctgaaaaagctgagggtcaacacagggatgagtggagaggggacatggagcccttatgcctgacatgaagggactgctctagtcaaggaaacagccacttcagaatgtgtctctactgtggatacaaaccaagggcgaggttactaggctggttacatcatctagcaaaagytcttatagctcagatagacccacaaatgagacattccttttcaatgactaataaatcattygtttattcattcaacaaatatttattgagaaactactatgtaacaggtagtctcataggtactaaggatacagtagaaaacaacaacaaacttaaaaaaaaaaaatcccttagccccagttacttgagaagattgcttgaagccagtagtttgaggctgcagtgagctatgatcataccactgcactccagcctgggtgacagagcaagaccccatctctttaaagataaaaaaaaaaaaaaaatctctgagctcatgaaacttacatgttagcaagagaaactgatcataagcaatatcactaattaaaatatgaattataacatagagtagaaaatgctaagaaaacagacataaagcaagtataagagtaagaaatagtatggagaatggctactaaaattctagctgaggaggctagggagggcttcactgagaaaccaactttatagagacctgatggtttggataggtatagacctagattgaaaatatttccctccaggttttcaaaggcattgctccattatcttttggtttctgaagttcctgttgagaaagctattgcctttctgatacctgatccttcctatgtgactttttacctgttctgggggcttttaggattttctgttttccccatcttctggaatgtctcagtgacaaacctgtgtgttgagtatttcataaacttttacaatctgcgatctcatgtccttcagtttacaaggaaaaaagaayattcttataatattgttttggaaaactctgttttttctgatctcttttacccaaatctccattactggggatctgggtactctgacatgattctatgtttcatattgctcttctctcttttcccatctctcagtctctttttttcggaggggaggtggcctccactttctgagattgcgtcaactttttcttcttcactgaattttaaaattctgctctcatggttcctagagactgatcttatcctccaaatgctccccctttttctggactgtttgttctcttccgagtttctttttcctgtttctttgggtgttttcatttgtgttagaagcttctataaaaaygtttgtgacatcttgggagtcagttaatgtaagagggaggcacggttgtaattttgggaagttttatatgtgggtctggctgcttcgctatggggtgaccagacagaatctgaatatgaccctcaaaaatctgtttgtcaggccagacatggtagctcatggctgtcatcccagaactttgggagtccgaggtggtcagatcacttgagctcaggagttyaaaaccagcctaggcaacatggcaaaaccccatcactaaaaaaaatmtacaaaaaattagctgggtgtagtggttctctcctatggtcccaggtactcagggggctgaggtgggaggatagcttgaattcatgaggttggggctgcagtgagccctgatcatgtcactgcactccagcctaggcaacagagcaaggcaagactcagtctctcacatacacacaaaagtttgtctcttctcatgggtcattcagcattcctagagaggaccctccagtgtcctgactaaggagctggcccctttgccagcattcggtcgagggcatatcagccccttcccctatgcttggtcagccagaatccagtgtgtttgatgtggactcttccatcttctgtggatgtgatgggtggctacctggctgggtggggtgggaagagagatggacatttgctacatcagtggtccctagcctttttggcaccaaggaccggttttgtggaagacaatttttccatggacagggttagggggagatggttttgggatgattcaaacgcattacatttagcatgcactttatttctattattattgcattgcaatatataatgaaataattatacaacgcaccataatgtagaatcagtggaagccctgagcttgttttcctgtaactagtcagtcccatctggaggtgatgagtgacagtgacagatcatcaggcatgggattctcttaaggcgcatgcaacctagatccctcaccatgcgcagttcacagtagggttcacgctcctatgagaatcttatgctgctgctgatctgacaggaggtggagctcagacagtgattcgagcaatggggagcagctgtaaatacagatgaagattccctcgctcagccatggctcacttcctgctatgtggcccagttcctaacaagccaaggactggtactggtttgtggcctgaaggctggggacctttgtgctacaccattttaaaatcaagttcagtcaggcatcatgcattcaactcactatgcatttctaccttcagaagggttgggagcctcatttcctgagtttccctggctctgcctgttttatgttgagttattcccttgaaggtttaggtatcagcttgctcttgtctactgttagttcctctctcattcccttacttctttgatgtatgcttttgtatcccttattgtcactttaatggaatktctggaggaagcagagacaaatgtattacatgggctgccatattgaaccggaattcattcttttctcttttgagtctccctttccaaagtttactccagtggtagtagttcacccccagtagattctcacaaaaagcaagactcaaattcagtgtcaggattgtggatatcctgtttcagttatctgtttctgaataacaaatcaccctaagcatagtgacttcacatgacagtcatttatttgcttatcattctgcaatttggacagtgcttggaggggccatctcatttctgctggcatcagctggggwrgctcacctggggctggggagaccactcccaagayggctcatccacataacctcagtggttccagctgtaaaatgggcrcttagatggggtggttcttcagcatgtgacctcccgtgtggctgggttggactcctcagaagctgagttctgaaaggaaacatccccaaaccaagctcaccaagaggacaaactccagggtgcaaacacatatcaagctttccttttgcatcacacttgctaatatcccattggccaaagcaagtcacacagccaagcccagaatcaaygtggaacagagctgctctccacagatgggtgagtgctaggaggcagggtgcactggggcccacataccccctgggaactctgggatcctgtgctttttccattttatttctgaaacattgaggtgccrgattctagcacgatatgaacattcaataaatatgtattagaaccacagaaatcttgttgcatttccactgaaaatgtttctgaatggactagacagatttaagctatgtagcttacccatggctataatgattgtgttcctagttaatgaaagacatgaaaaaaaatcactctatgaggtcagatttctaaatatacctttccaaggaattaagtatcgtcctttttttttttttttttttttttaagatggagtcttactctatcgcccaggctggagtgcagtggcgtgatctcagctcactgcaacctcccaggttcaagcaactctcttgcctcagcctcccgagtagctgggattacaggcatgtgccaccacacccagctaatttttgtatttttagtagagatggggtttcaccatgttggccagactggtctgaaactcttgaccttaagtgattcgcctgcctcagcctcccaaagtgctgggattacaggcgtgagttaccrmgcctggccaagtattgtcttttgctttaggctaccagaggtttgcttcttgcatgtttgtttttgagtcagggtctcactctattacttaggctggagtgcagtggcgcaatcatagctcactgcagcctgcaactctgaggctcaagtgatcttcccaccacagcctcctgagtagctgagactacagtcatgtgccaccacacccagctaatttttttttttccaaagagatgggatcttgctacattgcccaggtgggtctcgaactcctggcctcaagcaatcctcttgccatggcctcccaaagcactgggattacaggcataagccattgcacccagcccttgaatttttgaaaattaggctctttaacacctgcttggacttcaaagaacgaaggtgagtacttacacaataaccaaacagtgcattccttggaaattccaaacctagatctcttgttacatgcttgccaagcttgtcctgaacgttcctaagtgcagcaggaaagaagtggctcagcttgtgctgtgtgtcccctgagtcttgacctgtgactaataactgtttcctttgtgtgcaggggttctctatctccagtatggmgatgaaaccaagcagctcaggatgccgaatgaaatcacaagtgcagacacaatccgtgctctcttcgtaagtgcctttccacagcagctcaccatgaaaatgctggaatcgcccagtgtcgccatttacatcaaagatgaaagcagaaatgtctattatgaattaaatgatgtaaggtaagttgtgacatcattttttgcctgccattttgccttagagttttttttgttttttgtttttttgtttttgagggkttttyttttacccactatattgcatttagagtgtttttttgttttttgttttttgttttttgttttttgtttggtccatcatatccctttcatagagtttataccaaattctaatttctttatatcctagtgaagaaagcagattcattatcctgattggttgggcttatttcacccagtcagatgatttcactatctggttttctacaattcatttacagggtatagcttataaaaacgaggacaaatttctccsccacagatttttgaatgctacatctgaaaagaacattagaaatgattcagtccaccattttatctaagggttagggaaactaaggcccaaaaaggtagcggagagacctgatcgaggtcttaagagttgtaggcagtacttcattcatattggaactttcccaattccccctcaagtgttctttcctccatagaaagaccctgtggacattttaggtaatgatcccactgggtcgttatttacacataacaagttagaataaaagcagtgggctctgtattattttccataagaaaagagactgagaagcatcttcactttccattcatttcttaaagagttgtcctttacccaaagatcttactttccaggtggcctttccccagggcccccagttgaatatcctccaaaattaagctaaatggactcctgctattgatgggattgagagtcagttagaaacaaaagcatctctctctccctctctctctctctctytytttttttttttttttttttttttttttatgagacagtcttgctctttcgcccaggctggagtacaatggtgcgatctccgtttactgtaacctccgcctcctgggttcaagcgattctcctgcctcagcctcccaagtagctgggattacaggcgcccaccaccaggcccagctaatttttttctatttttagtaggtacggggttttaccacgtgggtcaggctggtctcaaactcctgacctcaggtcatctacctgcctcggcctcccaaagtgctaggattacaggtgtgagccaccatgcctggcctcatctctctttttttgaagacagggtcttgctctgtcacccaggctggacctcagtggcatgatcatgtctcagtgcagcctcgaccttctgggctcaaatgatcctcccacctctgccttccgagtagctggcactaccggcacatgccaccayatctggctaatttttaatcttttgtagagacagaatctccctatgttacccaggctggtctgaaactcctgaggcaagcaatcctctagtctcggactcccaaatggttgggattataggcgtgggccaccacacctggctcmaaagcatctttattgtcattttggtgtcatgtatacagtagaaagaactcatttgatctgttccaaccaaacaacctggaaaacaggacttagatcaacacaagcaatcagttgctagtatggtctctaaacattttagaactccacagattatttagtgactaatccagccatttcattttatggaaccagaaactcagacgcataaaatttgagggacttattcaaaagcacacagccagctaagtaccaagctctgccccaaatatggctgttcacacttcttggtcaagaactttttgatttcttcgaatgttccctcaccaaatcactggaggcagaacttggggtttctgagtccacaccctggggggaatagcaagttgccctgtttcttcatcatggaattaatgggtaccacttttaaaaaatatgcctctagtgcataataaatgtaaactgatctgtatctaccaatgatcacaaatgacatatttaggcatgtgcccaggtgtatgagtaatttagaactttcaaagtttgacacatgcctcaaggtatagatactacatctgtttcacaaccttacagctttttaaaaatgtgtttaaatattcatgggtacccaaaaattcatgtttgtttttaaactaaattattaatcaagctgtcaccaaaagaaattttttgcattcacaaagcgtaaacttgaaacatgaaataatcacattatatttaaagacaatgtttgtagtaatataatcccacatactgtttttacatggagctgccagttacaacaatcatcttacatttctgcctttgcaattagaggaattgaaggacacagtaatagcaagtaaacatgcaacttagggaagccacacttgattatggagctcaaggctgatgaggttattatgagtaattgggcctcactgtcttgcagcctgtgcaaggatttttatattacaatgagtcaccattttctagagcttttctcaagcttcaaagtatggctactttgccttcttttttacattgtttgggaaagtcgagaagtagtcacaaaataaaagaaatgagagggaggaaaaagaagaaaaggtcatgattctccttaatggaaatctagttgataacataaatgaaaccatcagtcaatatgttgatatttgtgaaaatgatgatcttgttgatccgtaagttgtagtatggatagcctaactttttttttttttgagacagaatttcactcggtcgcccaggttggagtgcagtggcatgatctcagttcactgcagccaccacctcctgggttcaagtaattctcatgcctcagcctcccgagtagctgggactacaggtgtgcgccaccacgccaggctaatttttgtatttttagtagagatggggtttcaccatgttggccaggtttgtctcgaactcctgacctcaagtgatctgcccacctcggcctcccaaagtgctgggattataagcgtgacccactgctcccagcttgatagcctaaagttatttttaaaaaactctcatttaaaatatttaagtggaaagatcaccgatttataaatttgtctgtaattttacttttcagttactttgatttaaataaaaaaaagaacctaaaaatgttcaaatgtagacaatgttttatttggtgatgacagtaatgtttatgctatgtgagcacatgcatgtcgcttccaaagaattattctatttcttgattttatgcattaaatgccttgattatattttatttgaatggtagaagaaattttcaccaccagcattatataagacaaaaaaaaaaaaggctgggcgctgtggctcacgcctgtaatcccagcactttgggaggccaaggtgggcggatcacgaggtcaggagatcgagaccatcctggytaacacagtgaaaacccgtctctackgaaaatacaaaaaattagccgggcgtggtggcgggcacctgtagtcccagctgctggggaggctaaggcaggagaatgctgtgaacccgggaagcggaactcacagtgagccgagacggtgccactgcactccagcctgggcgacagagtgagactccgtctcaaaaaaaaaaaaaaaaaaaaaaaaaargacaaaagaaaartatcatgtagatttcaactggagacagtgactttaatcttctaagttcagagacaaatttcactgcacttccttcagtgtttctgaagcgtgagcatatttgctaaacagttgcctatctcatcattgtgttaggctcctcatattttccttagggaaatgctatggagagttcaggtcagaatattgtgttgtaaatgttgccacagtaaatgcaaccccggcctttactgttggttcatctcagatgaatatgtttctaaagtcatgataaaccaacctcatgcattttaaatacctccagaatcacagttagtctttttcatggctcccgtgaggttttctagtttttcacgtcctcgcctgtgactccttcctctggccaaatggggagctcctttagtgaaaccccacatccttacctctgtgagtctccccttcatattcacccagccccctttaataacagggctgctggttccscctcaagccgacttctaacaagctactggagcaaccgtgcaagcttgggctagtcattgcttcaaagcaattactggcggatatttaaaggagaaagagaagactagtccaagaatcctccacttcagttaaaacagaaacacaagccagtaatcccagtgattgggtcagcccactaaatgaggctgcacctggaagagaggaattcttcctcctgcccacatttctctgagctagcccagccggcattggaagggatcacagtgtagacagagccaaaagggccttgggtggcccttctgctgatgaaagctgaacatggagggagagagacttcatagatattcatgtgctcttcgataattttaaggtaggctctgatcctgtcttttgctacgttatgacaccttggctytaagagccgggttcagagaaaaaagaagaatttatctgctgctatttcttcacatccagcaattcgatttgtatatagaaaaactaattttytaacccactatggaaggaaaaaaggcatggtaaagatattagatctttttggtactgtttttttttttttttctggactccagataccttttctttcagttgccgaaagtgtttgaaggcaaaaaaaaaaaaaaaaaargaaaaagaaaaaaatcttctttcatgtacattcattagataagcagcaaaccaggtgtttgggaaaagtaaacaattaaatatttaaatatcaaccaaatctctttgaatgtattgtaaatattggaactttatttttttttttaaagccttagtttccatactcggaatcttgaaagaaagttcgtgccacccaacatttatgggtggggaactatactggaggaataatactttcttggggaacaagaaaaggagagaaaagctgaagtcatttttcttcttcttttccgtatttataattgcctattttatggtcacatagcttttgactggcgtactgtagatagcctttggattgtctgttcatgttttttacctgatctttaagggcaggctaaggaaatggccaaagtcaggcttctttcatctgccatagttatcgatgtttttgattccaggarcattcaagacagatcactcctcaaagtgtacaacaaggatcctgcacatgcgtttaatcacacaccaaaaactatgaatggagacatgagggtaagtgtttctgtcatatttttacttatcttcagtgggtcaaagcgtccctcctcttgcttgtactcctgatgtaatcagaastctacaactgagttttggagggttctccgcactcatctcacctagtggatcattatttgttcttggtagagaagtaagatttcctggttatttagggcaaagggattaaaataaggctggacacatcctaatttatctttaagcaaggagttatgtccttactttaaatgaattctgaaaatcttcctataaaagggtccctggtccacagtatattaactgactcagaagatctcttgcatttctttctccaattaaagcaaacctaacatacaaaaaggcaaacagcaaggtgcacaattgcatggaaaatctattcatactcttacattagctcttccaagttctaacattctaattcaatttctcaccttctaattcaggagctaccctggaagaattttgttgttgtactgtcttaaatattaccatatcctctctgagccatgctgaggtcataatacaaaaatccgcatgatttgggaactaaaattctctagctttagattgtctcaggagattatccaaacattcaaagcacacagggatgttttgaagaaaaaagaaggagaaactgaaaaagcagattttaagatcatattaatgcaggtccactagaaagggattgagtttctaaaaataaggctacattcctctgtagcaaaactgggaggtaaaaagaagattagcttctcagctgtacaccccctacacacacacacacacatttggaagacactgtgccattttttctcatcttttctacagattagcacttggctggatgctcaagtttagctagaaaaataaataaataaatgattaccttttattgccaaagaaacccaggcactgttctgtcttggagctgcagttttgttcctgagcgaggctgtctctgcttcctgatagtacatattagtttcctgttgctgctgtaataaattaggacaaattcagtgacttaaaacaacacagatttactctcttaaattttagagtctgtagactgaaagtctctggtctgacataaggggtcaccagcaggtatgcattcttttctggaggccctagggagaatcttttcttttttttttttttcccccaacttctagaggtcatcaacatttcttggtttgctgtcctcttcctccatcttcaaacccagcaagatagcttccctttgaccctgcttccatgctcacatccctaaccctcccatgtccacttttaaggacactttaaggacattgagcctccctgatcctccaraaaaatctccctatttcaaggtcagctgactggcaatcttgactcccccttttccatgtaacctgatgtagtcacaggttgaggggactaggatgcaracatctttcagggaccagcattctgctttccatattgggtaagtttagaaccataaaagaagccagcagatctagctgaaagtgctgggagaaggtctgtccttctggactggaatatgaatgacgacattgtgggatcagagcctacacttctggagggaaaggcctctcacgtactcaactgctgttatttttgtgtcagaaatgatgtgtgacttgaattgaaagctgtgtcgctacttcagaaattctaggattttcagccttattttgccagttatactttatgtgtaaaccagagccacatggagacagattgagtcatgccaatcgtgaagcatggactaaatattacrgcaccatttgccttttattactctgttattctctttcttggagacattcatcaatgtcttcgctccttgaatatctttattttttgctatgtctagccttcaccctggagttccatggtgctgagagttctgttcctatcacatagagccatttccacaccggtgccccagaatcgcctctgagaatcttgtttgtggctggaaagacacctgttttaaccctccagcagctctggtacctacgtaaggaccagcagtgaggactgagagwatcgaatattgaccgtatgaacaaagctgatcaggatatgcagaacatgtgctgtgggtttctgcagagtggttctgttcttacttcaagatgaaaccctgctgatcactttttctgggttacccagagcctactttaagccctcattttgtgtgtgtgagaaactcaatcattgtccccaaatgaagggacagtaaatgttcaccatctaaccagcagaaaagcttttgtgtttcaatgcagattacttagaaatgagaaatagaaagcggtttcaaagccagctaggtgtgatcatgcctgcagtttgcaacttggttcctgttcacagattgcagacgctaaaaggcatggaattcagctgccctcaccttttggctctgcaggttggaattctttttcctttcttgatgaatgtggctgcattgccattaaagggcaggaagctttgttgagccctgcctctggagcccagctgcacaacccactgcccatggtggagaacagaaacagagaacagagcaagcatcaattgttgtagactaaaccacgctgcagcgtggggttagggaactccgtcctcccttatgtttgcaatgtgagcgtggccatgaaggaattcgatgctaactactcacatgagtcagtcactgcagtcctgcccctgatgtcattagacctcactccccagcctccagagacagcctggcacagacctcccagctgcctgcttatgaccaataaacatgcatgtcatgaaaaacatcagttggaataagcagaggggcaacaaaagtcacaccagaactcctcaggggctcctgagactttccttaaccaatgaatgtaatatcttgcctttgaaagaaaagaaaatgtaaaactctccatctaaaacagtcttcccagagcggttttatgattggaaatgtgttactcaggaagcgtgctagactaggcctcagagtgtgcgtggaatgcatgcttggtggggaaaacgtgtactaaattttcatctagcatctagctgagcatttttgaggctagtctgtctaaggagacttgtggttctcggctggaactcagcatacctggctcctgtttctctacccaccaccctgatctaatttaattgcgtggcttttgtttccttacatcagataggagctttgataattcagttcccaagggactgagctcaccatatggaacaggcccttttgcaaaatttatatatgtactcacagggttttaaattcacaaatgtacaacttgaagatggaaccattccatttcatgactctcaaaaagtacacgtttttccataccagcagtttgttgaaggaactggacaattctgctttgagggtgacttgctagtcaccaaacctggtggctttttcatagtgtgggggcttctccaccttcttgtgtgctttaagacaactttccaagactctctgctctcatcatttaatactctccctcttctctgcttcctttaatttctcttgcatgtctttgatttttacttgtatatagacaattaccagattggccctacctcttaaattattccccaatacccaaggtaactgctgcctcccacccctcttctactgatctttgtatttgacaccagtgaatggtccccttataaatcattggtctccatggcacttttgtgtctaaataccttgtctgcattcacagacacctcagcttccttcattccctaactcttcttcctcttgcctgtgtttaagcaggcttctctagtttggagtttatttgttttgtttttttaaatttactcttttttatctgaacctttgcacttgtgatttttatcttaccacttgtttgactattacatcagtgtggttgacccttgaagccatatccctaactctgccatctctagaattcaagacccaaatgttcagcttctaagtgtcttcatatggagatcatttccgtggtttccaatgcattctgttgaagaaaaaattcctaatcttttttccactcaagtctttatccttcttgattaccttttgaagaatggaggggctatgatagggtgtgtgtgtatgtgtgtgcacatgcatgtgtgcctgtgtgtgtatgcatgcatattttggggaatgtgggaggagggatgtaaaacattgagttaccaatgattcttctcttgcctgacctttattcttccatgcatccagctggtcaccagagttcatccactccactttgcaaggcctctaacagatgacccttctgccactgcctgtaccagtattcttacaatagctaacttatttgagcatttattaagcacttttgtgggatttttttttttttttttgagagggagtctcactgtgccatccaggctggagtgcagtgttgcaatctcggctcattgcaacctctgcctcccaggttcaagcgattctcccacctcagcctactgagtagctgggattacaggcatgcaccactatacctggctaatttttgtatttttagaagaaatgggattttgccatgttggccaggctggtctcaaactcctgacctcaggtgatccacctgcctcagcctctcaaattacaggcgtgggctactgcgcctggacagtaatgttaattatttaatcctcaagataaacttttgagccaggtcttggtataagcccccctgtttacagatgatgagacagctccttatgttaagagatttccccaaggccacacagccagagagtagcagaacagagatttaaacccaggcaccgtggctgctgaaattatagccttcattatctctctactgaatcacctaacagttcttacttcccacatctcattctcctgttctctttttccaagtgtctcaaattcactctccctctctacatatctgcctttcaaaattctactcatctaacatattccagaacaattgtctaattccttcagcaaattgcagtcatgaaaaaaaagtgggggagggagcacagttaagtttctcgggggtcttctgtaccataataacaaaatgtggcctgtgcaccatcttcagattttgagaagaacaaagcaactgtaaaagacatctttaaaactatttgggaaatttgaacatgtgttaggaatcaggagatattaagggatagctggtaattctgttaggcataataataggttagtggttatgttttaaaagatggaacatactaaagtgtttacaggttaaatgacatgaaaaatgggacttgctttaaaatactgcagcaaaccaagaaaacaaaaaggtggaagtagatgaaacaaaatggtaaaatgttgaaaaatgtcaaagctggatgatgggggtaccttttattgttttctctacttttttgtgtttgaaaattttcataataaaatctgtttgttttcttttcttttcttttcttttttctgagacagagtctcactctgtcaccgggctggagtgcagtggtgcgatctcagctcactgcaacctctgcctcccgtgttcaagcaattctcctcccttagcctcttgagtagccgggactacaggtgcacaccaccactcttggcacatttttgtattttttactagagacggggtttcaccacgttgaccaggctggtctcgaactcctgacctcaggtgatccacccgcctcggcctcctaaagtgctggatttacaggcgtgagccaccatgcccagcccataataaaatcttttacaaaataataaaaacttgtttttagagcccaaataaaagacttcctaccccaggaagctttcgctaatgctctgtcagaattcatctttcccttttgggggcctgttgcacattcgcattgtgttataatcatttagctgtgtgttcatctcatgcaaaagactgtacactcttcaaagccacaagccatattatgtgatgattcatcttcacgtccctccaaaaaccagtcatggcatcttaacccctggtgagtgcagagtaaacacacttgttaaacaggatgcgctgagtgtcctactgatggtcctacaaatgccatattattcattttctatcattaatgaggacccactgtaaaaatatctctctgttctcatcaccagaaatagttgtgcttctcctggtttatttttatcatatggacactttgagtcttgtaagtgatcattttccctctttgtgttgctactctaaagcttagaattaaatttgtggcccacccacagcaagggtacaggcatttgtggcgtgtgttttgtgtgttggcttcattcctggactctctttttaattttcctactttcatcttcctttggttgcacattctactttgacttcttttttctgtaaaactgtaaaaatgtataggaactctattaatttcttggtgcaatctatcaggatataaatagtattcattctctaccatcgttgttctagatagaagatagcaaacctttttgtgtctgcagagtaggcagtgtgttaagtactttacatattatttaaattagtcagtaactctggcaaagtgggtatactgacttcgttttcacaggtgataaaactgaagccaaagaggtctttcccaagctcacacatctgatcaatgttggacactggatttgaacttgtttctgcttgtttatacacagcccacagcctcccttccttgatatttccatttaagttttgcaattttgaagtgatgttcctactaagactttagaacaaacaaaatatgctttattaaacatttgtttcatttctgtttttaattattattatactttaagttttagggtacatgtgcacaacgtgcaggtttgttacatatgtatacatgtgccatgttggtgtgctgcacccattaactcatcatttagcattaggtatatcctaatgctatccctcccccctccccccaccccacaacagtccctggtgtgtgatgttccccttcctgtgtccatgtgttctcattcttcaattcccacctataagtgagaacatgcggtctttggttttttgtccttgcgatagtttgctgagaatgatggtttccagcttcatccatgtccctacaaaggacatgaactcatcattttttatggctgcatagtattccatggtgtatatgtgccacattttcttaatccagtctatccttgttggacatttgggttggttccaagtctttgctattgtgaatagtgccgcaataaacatacctgtgcatgtgtctttatagcagcgtgatttataatcctttgggtatatacccagtaatgggatggctgggtcaaatggtatttctagttctagatccctgaggaatcgccacaccaacttccacaatggttgaactagtttacagtcccaccaatagtgtaaaagtgttcctatttctccacatcctctccagcacctgttgtttcctgactttttaatgatcgccattctaactggcgtgagatggtatctgattgtggttttgatttgcatttctctgatggccagtgatgatgagcattttttcatgtgttttttggctgcataaatgtcttcttttgagaagtgtctgttcatatccttcacccacttgttgatggggttgtttgtttttttcttgtaaatttgtttgagttcattgtagattctggatattagcactttgtcagatgagtaggttgcttaatttcattatacatctctttcatggtatctttttatatttaattttgcttcattctcttcttttctgagcacactaaaaatatatccattaaaaaaagaaaagaaaagaaaagaaaaagagtgagttgcccatttagtatgtgtgtctgcagtggccactgaactcagagcactttttctcacagggcagtgttcttgttgagaagaggggtttgggattcagggagtatcaagtcatcccgtagtaacaaaagaatcccacagaaatggaagtttcagaaaacactcctagctgataatctatttagagatcgtttttgacccacctgtaatatccccttcactcatgcaatgacaacggtatcaataactaacattcctgacgtgcttactctgtgccagtcaccatactgagcaatttgcttgtatttactgccatttgattttcacacctatacaatgtgagagaagttcttattattctcctgtttcagaagtggaagctgaggcttaagagaggtcagtgtgcttgctcaaagctacccagctaaagagaagtggagctgaatttagagccaggcaggccaactctagaactggcctttgtaatcatgcctgtggtcactaccgtccgtcctttcccaccactgtcttcatcagtgtgtcgatgagtcatcgccacatgtccatgggcctctcatttctgaagacctaacccagaagccactctcttcatcaagcctctctcacttctttccaaacctcaccactcactgtcccttctcgaaacttccatagaacttcacctccctgccccgctctctttgtgcactccccttttcctgmctgcactgagttattgatgcacgcttctttttcttttcctttcaccattttattctttttttaatgaatgatttatatatttatttatttatttatctatttattttatactttaagttctggggtacatgtgcacaatgtgttatatatgtatacatgtgccatgttggtgtgctgcacccattaactcgtcattacattaggtatatctcctaatgctatgcctccccactcctcccaccccacaacaggccccggtgtgtgatgttccccaccctgtgtccaagtgttctcattgttcaattcccacctatgagtgagaacatgtggtgtttggttttctgtccacacgtcttaagtgtctttcagctctaagcttctcagggacagggtctccatttcattcatcttcacgctccctgtggctctctcggacaatgccctgccctgagtagattctcattaaatacctggatagaaaaagatacttacttcagcccttttctatcaccaactttcagttaattagtgccttatctactaagagcgatacagtgatttgtaaaggtacgtgtttgaggcttatagcacattacctaatgtatcccgctattggccactgacccaaatgagaaataagaatgtctgcctttcctcagtctatcagtataatttgatagaagttaattaccctgggctgagcgcggtggctcacacctgtaatcccagcactttgggaggctgaggcgggcagatcacgaggtcaagagatcaagaccatcctggccaagatggtgaaaccctatctctactaaaaatacaaaaattagctgggtgtggtggcgcgtgcctatagtcccagctactcaggaggctgaggcaggagaatcacttgaaccccggaggcagagattgcagtgagccaagatcacaccactgtactccagcctggtgacagagtgagtctccacctcaaaaaaaaagaagttaataaccctgaagtttaagaataacaataaagaaaaaatctgctttgtcagattaaaataagtgttcatcagaaatacacagttatctaacctttttttgcgtggggggggctggagttttcaggagttgaattcacctgtggtagaacgtaaactaaatccctagacaacaaatctaaataagatagatctgattttgctgtgtttataattcactaggagaaatcttgcttttattttgctttatttttattttattttgaaggcagggtcttgctctgtcacccagtttggaatgcagtggcacaatcatggctcactgcagcctcagcctccctggctcaagtgatcctctgccccagcctcctgattagctggaactactggcacacaccacaatacttggctaattttctgaattctttgtagagacacagtctccctatgttgcccaggctggctttgaactcctaggctccagggatcctccctccatgccttccaaagtgctgggattacaggcatgagccactgtgcctggccccttgcttttagattgagtcgatagtcagtatttcaaatatctctaaacttacaccgtaagggtgatgatttttgaacagttaacctaacttcattactgtaagcgtttactgattcactcaatcagccatagtgagtcagatccttcctctggtctcagctctcatgcaagatcctgaagatatattggcaaaaagcaataatgatacagacaataatcaattaactcaataatcaataatgatacagacatctataatttttcacataagttcaggctcatgaaatccttgcctgtgttctataatttgctggagttaacactatggaactcatttatgagtgatatacataatgatatcttttttatattgtgcttttctgggaggcaaaaagatgtttctgttatgattgataaggaaggactcttacagaaatgattagctaggcaaacacatttgaatacagtggctgtccagaacatgggagatattttcttgttccttctctgcttccagttataaagtcttattttttagaagcaagaaaaggtaatatatgcacatctgatatgcaacttccaagtgatacaaatctcatctttcctgctgcgtggctgcttgcttttccttgtactatttttttttttattttttgtcattgagaggttatgacaacatgagccatattgtatttataaacatcacgtgtttccttgatatggcttgcagtttctgccagacagaacacatggaagaaacatttctcgttagttcagcattggttttagttatgctgatttccgggacaggaaaaatgccttcctactcagaattaactttcatagagtagaaacaaaacctctgaatgtccgtgaaatagttttaacaagagtggatactgctcctttaaaccacatattttgactaaaagcttccttctgtaaaaaacccaaggcttgcatttagtcaccatgaagacaggcaaagctgaaagcattggagagaggggtggtttcgaggtctctgcaagtctagaaagtttcttctagaaaagaaaggctcacggaaaatgtaaggtaagaactgtgcctttatgataggatattatctttagaatcttttttcatgctctggcacgtttatctttcattaacttgtcttctgtattcaagttcaatgcaataggcgattgcaattttaggttttattttaacttcttgcacactgcctagaagaaaacctctctttgttattgacattattctgtttttttgaaatccacttaaattaaactgggctggtcttcaatctataaatcttgtggtctagtttctggctaaccttataatttggaatgggatttaaagtgccaacacagtttgcttttacaggtcttgttgatttatgtgctctgtgacaattttcagtgttttcatgaagttgttgacatacattcagtgtctgaggcaaagtcgataatttgaaggcatggtacaagcaaggagggaaattcatatgtgtcctttaacattccagggaaaaattatttggtgttttgttcttgtgaaaatcactttaaatttaaaaataaaaataacctttatcctggtcttgaaaaaattttaaagaaatagcagtttaatctgtatgaaatcacattaaaaacttctacagttttaaatgacaagcttgatataacaaatctcttatagcaggtttagtgattgcctgaaaaagtctttgacagaaatcttgtttacttgagataactattctgtcaactcttgcagtaattcactcacaatatttttgcattgatttcctttaaaggaatttaataagagcaatgtccttttaaatcagtctgtttcctttcaaaagtacatgtgttcatgaatttgcttgttcatatttctgtggatatctttatcccagtttatagatgagttaatatacctgagaagttgttatccaatgtggtttacgtaatatctattattctatttagtcatcatgataaccctatggaataggtactattacacccattttaagtttggaaaaccaaggctcagagaggaacaagatcaagatcacacacttgtaagtaacagagctgggatttaaatccaggctgactgtcttccttgtttttaagtcctggacagcacagcctcaatagtagctgagagcttcaggtctgtaatcaaatatagatgacttatcttgaaaataataataatatataatgtttacgtggcttcaggataaactattttttacttttctggaattttattttattttagatctgtagcatccaaaacctagtatcacactggttgtttatccagggacctggttacaacttactcagagcataatgaaaacagtgaacatcagagagtgtagagatagagaaaagcactttggataaacgactcttccttctttactacacagacctttcctgctctcttctttgcttcatgtgccgtgttgctcataaaaaaatgtttccataggacagagcaggaagcttgtttgtgagcttgatttgggagcaagaaagtatctttgaatggagactggctaactgtgcctgcccactgcccttcaggctgctggcagagctctcaggagggggacaggaagaatgttaaggctgaaggtggagggttctgaagttagggcagctggctcagctgcctgagagcccgaacttcaccttcaacagtgctcttcccacctcctcctgaagattgagacatcaacacagcagcaaaaatatcctggtgatttgtaatgcaaagtaattactgctaacagcatcaacaggggatgcagctgctcacaacacaggcttcaggatcaaggcttccagccccagttcagcataaaatccaggattggctacacaaccaacacaactcaaagttgattggagcagaaccttccttctccccaacaggtcctagggttagctcccgaagagttctgagccgtggctggctggagtgcacatgagaggtttttgccacatccctctgccctttgatatccaaaccacatcccttttctttgctcttataagtataggtgttggcggagattgcttttgactggggacatatgtcctttcattttcaagttgcatcccttgtacctgcatgttgttcacttgctgaggtcttgcttttctgtgttctttgtgggtgcccagcaaggcatcccagaccatactaggctgttgtctaccacatcagcctaggcgccccgagtcccagaccctactctatagagggcttccaggggaccatttttctcttgatgctgtttctaacatttctcaaatgagcatgtgttacttttatataaatttgggggtagggagagaacacgttaatcttttaaaaagaaaaaagtgtttttaagatacattttgcctactggtaacacattttcttctgtcctagtttttcttgtggagcaggtgatctctgcttgcatgtggtttgcagaagtcatagatactctgtccgcttttgaggaactagagctggctactgcagacttgtaattgagaagacaaacctgacctgcaccaccggtgctccctcaagaaacagcactgaaactaataataattttttaaaagacggttaatggtacagaaaaatcatttagcaggaatgaatgagacggccgggcacggtggttcacgcctgtatttccagcactttgggaggccgaggcgggcggatcatgaggtcaggagatcaagaccatcctggctaacacagtgaaaccccgtctctacttaaaatacaaaaaaaaaaaaaaattagctgggcgtggtggcgggcgcctgtagtcccagctactcgggaggctgaggcaggagaatggggtgaacccgggagtttgagcttgcagtgagccgagatcgcaccactgcactccagcctgagtgacaaagcaagactgtctcaaaaaaaaaaaaaaaaaaaatagaatgaatgagacctagtatttgctagcacaacagaatgcctatagtcaaaaataatttaattgtacttttaaaaataactaaaagagtatagctgaaatgttgtaacacaaaggataaatgcttgaggtgacagacaccccatttaccctgatgcgattattacacattgcatgctgtatcaaaatatctcatgtaacccataaatatatacacctactctgttggcacaaaaattaaaaatgaaaaaaagaaagaaagaggcctgacttatttggagtcgtaggatttttgaaatagaaagaaggtcttagacatcatcttttgtaacccattgccctgtaacctgagacccaggagttccagagtggttggagtgagatggtcaagatcacaaaataaagaagtgacaaaaatagggctggatctcaagtcaccgttcccaagaccagacccttgtctctatgcagtgccatttcagcctgttctctgcttttgttctcacccctctggatcttatgaggtttgtcttcttgattgatttagaaaaacactatctatttgactatctatttgacttctcttagccatcttttgtggtacctgagtccagccagctttcgctaatcctctagaaagcaggacaactctcttttctggattatcttactaaaagagaaccagaaatcctgtagttaggccagagctgattaattggaaatgcatgagcctggactaaaaataaatggattttaaactaaccagatttagattatccagtattttttatggaaggagaataggccatcatgtcaactgaaaaatagcagctgtttcaaattatgagatactttgaatagagcaatattggctcagcaagattgtacagtgttatggcattattttaaaaaacagcctctttgctgtggcaaatagctcctgcagttatgctgtttgaaatgttaatgtatgactcctcacattactttcagagttgttcattgcttggaaccagtgattttaggtggcaactagaaaagcagtttgtaaatggtaataattataygatgttgttttgaatgaatgttggaaagactggtagcacaaagaacttgagagttacttttcattaactccttaagtcacaactataattcttagtcacgactaaggagagaaaaagtcaatttaaaactgayttaaagaaaattattaaatgagtactaggacagctgatacaaagatatagccaaagtggtgatagtatcttgttaatgtatgaagtataaaaaccaaggctttaagatgaagcccaaattgagggttcaaggaaggaacagggtaaaacttgatttaaaagcrtacaattggcaaaaaaaaagaaaaacgaaaaaaaaccattttgatgtccaaatgaattctaattcctctctaagagttctcaagacgatcagcatcgtactatttggcagaaaagacaaactactcattaaatagttttttgagcagatttatttatttaaggtctctccagataaaaggtgtgactacctagcttttcatttaagctagaggacctctttccattgtgcaggcagcactaactcactccatattcctgaaacagaaaatatgtttgactcagttgatcgacacatgtatttgatttctttccttttcttcttttcttgtgacatcaaaggtcgtgctttgccttgttctgatttcactctttgaaactgttccttttcacgcacccttgatagagtaggaagagttaccaaagaaaaacacaaacaacaataaggaatcataccaatgccaatgatggggcaattcaraaatagcaggggcctgatctgtagggtgcttaaacttccatgcatgattttcatgaaatgcagcacctctaaagcatasgactggtggtcagggtctgatagcttcgtctagaatgagcatctagtgccagtccttgcagtcacttacaaggaaggagggcacggaatagaacatgttgtagatggttgaccccttgcagtagggactgagggatcatgacggatacatcatggatggaaatccacaaagtggaaaccgtttttgcttgcctttaaaagcaaatctaaaaatatgttttctagcagctgtgtaactgcaaggaaaaaaaaaaaaatctgctccactgcarcacaactcgctcaccagatatctgcagggttcagatcttaatgcttcagaaatttgttgcagattttactgtatatatttagaccaaggagcctattagcttgcaatctgagagaacctctgcattttcatgaaaatgagaaatgtggcactgttggcaacctcgggctataattatgttaatctgaccattttaagactgaaatatgttgttttaaaatgtttctgtatttttattattcgtaacaatgatctgaagaaatttactgaaatgctaataagtttctattcagtatcactttgagactagagcacaaaaaatgagtcagatgtggaattttgatatttttaattttggcacagaatttttatcgacagatatgtactcayatacatagagtatcttaatataaaaactacccaaatataattttatattttaaatatagatacagtgagtatatgtgcaaagctgtcttggcagatatgtgcaataacaaaacatctctacatttgcattaaattcccaatctttgctctgccaaaaattaattttgcgcattattacaagataaatgtttttctatcaagaaccatgctaaagcacccagttccctgtttttgatayaaatgtaggacaggactagaatggataatgtagttgaaattctgagagcctctaaacacatatcttgagctaattagttcggcttcctcttcagcagccaaagcttgcattctggccacagacaagtaatgacacgggtgctcttttcattcacaaaagagatgttctcccaggtggtaagatgggaaggaaaagagaatgatccaatgccaagatgtgggtaatcacccatctcacagtgattatagataattgcaatttgagtctatttgttgttgtaacactacgaaatgaattgggagtcttttacatatagcctgatctgggttcagaatgatcaattaatttgggaataggaatgaggaaaagtactttttgtttttttctgagacacgagtctccctctgttgcccaggctggagtgcagtggtgcagtggttcactgcaacctccgcctcccgggctcaagagatcctcccaccttagtcccccaagttgctgggactaaaggcgtatgccaccccaccaggctaatttttctattttttgtagaggtagggtttcaccatgttgcccaggcttgttgcaaactcccgagctcaagtgatccaccagcctcggcctcccaaagtgctgggactacaggcgtgagccaccatgtccagcctggaccattttctcaaatatgatatctttgaaatataatacagtatgatgttcttacattggctgcatccagagtcctcattttttgccagttcttgtatctccaaaacgaatgtgtcattcgtttcatccttctgtgaatacattcaagtgagtattttccgttttattcattttcttctgcctcacagctcactgagtgggcccgtgaatgtttgctgatgatattaataatcatgcgtgctcagtgacacaacaatgatggaactcattaggtattcacagcaccagaagagaaagtgcaagaaggttttactgaagcaagtaagcagctgaatcaggggctcagagttcagtgtcaggactacagtcacagttatgagaccacagccaagaagagattcccagcagggaaaaaccaagccctttgagtcataatccagtgctcgatccaccacaccccactgccttccttgagatgatggtgtggaggagtactgattgatgaggaggattaaacctttttttttttttttgagacagagtctcgctctgtcccccaggctggagtgcaatggtgtgatctcagctcactgcaacctccgcctcccaggttcaagtgattctcctgcctcagcctcccgagtagctgggattacargcacctgccaccaaacccggctaatttttgtgtttttagtaragtcaggtttcaccacgttggccaggctgctctcgaattcctaacctcaaatgatccacctgcctgggcctcccgaagtgctgggattacaggtgtgagccactgtgcccggccaattaaaccctttttaattaaaaaaaaaaattggaaactaatttgtgtacttcagtgtgttggaggaaacgtcatcgaaatggcaccagtgtcttgctgccttaattttaagaaatcccctttatttattgtcacttatcttctgtcctctctgggagaagtgttgctctaacgttgcttttctgaaaagtaaagataatgcaaagataaaaagagttggggaggttgggttgggcattgagggaagataagctacctttggttcagcctgcagcttgattctttttgaagtgacttgaaagctcttggtgctaatcaagaactttttgtttgttttttgttttgtgtgtgtgtgtgtgtgtatgtgtgtgtgggtggcggggtttggggggaacaggatcgtattctgtcacccaggctggagtgcagtggtataatcatagctggagtgcagtggtataatcatagctcactgcagccttgaactcctgggctcaagccatccttcacctcggccttcaagtagccagggtacaggcatgcaccaccatgcctggctaattttttaaattttaattttgcagagacagggccttgctatgttgcccaggctggtctcaaactcctggcttctagccatcctcccgccttggcctcccaaagtgctaggtttataggtgtgagagccactgtgctcagccctaatcatgaactttgaaaagtgctccatagattacaaagcattttcttcacttgccttacatcctgtgtgggaaggaagtctttccttcctggaggcaacgggtaagaagagcaactagacagtgtgtagctccttactctcggtaggcatttcgtcatatggagcatgacttattgacttgcttctgttctttctcatgagctactcagtgtcaggagtacagggcttgacttaaacatagggatactcaaaggcccacctggcagtttgttgttgggacacagggaagcagattgtgtctctgaagaggaggcttctgtcggtgtcagagcctggtggggaagaagggattggtcaatatttggctaaactccttcagctgttggtgcagcaaaaggcatggcagggcgtgggcagagatgcctgccaagcccggcctcagggcatgtacagctcccaaactggttgtctttgaggctgttatttatccaaataaggagaagcagtagttttgctgaccatctcagatttccaagccatgctccctggctggctgactgacttgctatttgaactgaaaacacgaaggtattcctttgaaatggagcagtcttgtggggctcgtgagtaccctagagtcattacttggaagaagattttttttgctccccacatttgtagataacatgaacatggcttggtctatttgacccttctcttgtgactctggcaacactcaatacagatggacctgatctgggacagaaatagtactcattttcagaggttcttgaaccactgccctcctttgaagaggattcaaaggtcagacctccacactgatttcttaacactagaatgcaagattattctagcacttcatagatcctggccctgttatctgacttcaggtaagatatttgaagtctctgagccccagtttgttcatctgtgaaatgggaattataaygtatctaatgggaatgagatgagaattaaatgaggtaattttggaaagcattggtaaataggaagtcacccaaaatattcattttcttccctatttccatcttctcttggcagatttaattgacaatatttataatagagaaattctagataattatgattgctgtccaaaggatttaaccaagctcacagtagaatggagattgtgatgtgaacgttcagtgaccctgcattactatgtccctctactcactaaagcagtggttctcaaagagtattccctgaaccagcaggtcagtatcacctggggacttgttagaaatacagattcctcggcaccacccgagacctactgaatcagacacagtggatgttagacccagtaatctgatttactaaactctccaggtgattctgaagcccaccatctgagagttggagaaccactgtccgagagtaactcactggttgggtcggtagtctagccattcccccagggcacctggactttcctatcccttgtccttgaccatgccttagttcctgcctggaatacctaagaaagggacctctttcttacctgctgaaattctattcatcattcatgaacccactctcacctcttcagaaaagtgttcctcagtcatccccaccataagaacctcattattctatgaactaccagagtatttgtctgttgcactcatttgacacttagcaaagttattcttgctttctcatattttaatgttcacgtacatgccttatttttcctactagaatgtaagttcttcagaggtagaaatcatgtcttacagatcccttttccctcatcagccttaaccctgggctttgtatataggtagctactctgtaaatatatggacccacagaatctcatcattggaatgggccttagagaaagtctacatgagatttcttatttacagataaagaaagggatgttgaccaggcgtgatggttgacgcttgtaatcctagcactctgggaggcctaggcaggaagatttcttgaggcaaggagtttgaggccagcctgggcaatgtagtgagctcttagctctacaaaaaaaaaaaatgttttttaattagctggggatggtagtgtgcacctataatcctacctattcaggaggctgaggtgggaggatcacttgaaccaaggaattcaaggcttcagtgagctatgatcacaccactgcactacaacctgagcaacagaatgagaccctgtctctttaaaactaaaaaaagtgaaaagaaagaaaacaatgttaacacctggaccaaaatgctagttccgggactccccatttggtgttcttcccccatcaccctgctgtgcygactgcggagaaacatacctgggggctttcagagccactggcctggccccaaaactagcaggtgttctcatgttctctgccacagacttcaactaaacccaaggaaagcagatgggttttcaaagctatactmatttaatttataaacctggaacctcttacattttttcataactaatgaaaactgggaaagtacaaaattttcattcataagcctataaaattgtataacaaatggcatcaattcctagccttacacgtgagaatttccccagctcacacactccgtatacttaggatacccatggaacttcttttatttttgaataaaasttcacagtgaagatcattcacagtggagcaggcggctcttctgaacccaggaagaatgggcatgagggcttttttaatctaggtccccatcattgtttttttcatgtttattttgaggaaaaattgaacctggcagatctgtgaattactgtctttcggtgttaccctctgggactattccctcagacaatcctttcttctcttgacacatgggctgatgttgtttggctgaggatcaaaataatggcacaactaaaacacctttcatcagaagtcatccataacataccctttaaaatttgctccacagacacagctcactttatgctgtatgttttttcttttgcttggtaatagaacctacacatatcctactgagatcaatatgaacacagcagaatgcaggcaatggaatgtgtttcctgtagacgggctaagacggtaacccaggtccacagagttggtttcagaaaagctataatcaaagaaggaggaacagtgaaggtagacatgagacaggcctgaaggggttaaacctactagggagcaattggtagtaagaagctgagaccacatgaggctgtgagaaaggagttattacagaaacagacatcctgggatttgagtagctccattgtgagaagacattgacagaccacgaataaatggccatatggtttccaagttgacatctgccattccccaatgtgtttaccaccattttctctcacgggctctgaaaaccatctatcctttacactgcaattgtatagtgtgaaattctacatagatcaacatcaattcattgtttcagtttaggtatatcatatcatcaaactaaaatatatatacattttaattttcatgctgtaatcatcctaaagttatataacactccatctagctgttttcatatctgtcctttaaactgcaattgtagagcataacattctttttttgtttttgtttttgttttgttttgttttgttttggtggtggggagacagagtcttgctctgttgcccaggctggagtacagctgcataatcttggctcactgcagcctccatctcccaggttccagcaattctcctgcctcagcctcccaagtagctgggattacaggtgtgtgctaccatgactggctagttttttgtacttttagtagagatggggtttcaccatgttgtccaggctggtctcaaactcctggcctcaggtgatccgcccaccttggcctcccacagtgctgggattacaggtgtgagctactgcacccggctgtatagcataaaattctacacagatcaacatcacctcattgtgtaaatttaggtatgttatatcatcaaactaaaatacatatatacattttaattctcacgttgttgtaatcatcctaaagttatataatgctctacctagctatttttgttcacgatataatcaatttggtcagtttctccagtgaaaagaaagaagagcatagagtgcagcgatggagaccctgtgcctctgtgggtggtgcatgcatctctgaggggcatggtcctgagaatgtcaccccataatggaattagggttgtaatggtaagggattttaatcagctaaggctcagatattttatttcataagtaatccggtgcctgtgactgatgatgactttgtgcatgcttctgtgtgtacatatatgtatatgtatacatatgtataacttgtgatatggtgatatccatatagtactgagtgatgtataatatcgataggtatatataagtataatatatataagcatatatactgatatatctattaaatataactaatatataactaattatataacttactcattttgaggcaagtagataaaacctaattgtaagtcaagagaggctctaaatcattcgagccgaagcccagtgagatgccccagtgattcttttcctttgctgtgaaaatctggacctgtgaatggagtgaggtacttctcaacagacttgttcatgtttcacaccatggccagaaatcgaataaggaatccatcagtgatcacgcgtgggcaggcatgaggaacatcgttctttgcagaatagcttgcagtgtcctgaagtgcacagcaggtcacacgcaaacaaccgaggaagctggggttcttgctgcctcactgcttagcagctatgggaagctgggtgaggttcttaactccctgcacttctgtttcccaactattcaaaaagacataagacacctgttctatgtctttcactgagttctggagcccatgaaatgtcacaattgagagccctttgtaaactgcaaactgctatgtgattattggagtgtttgtgggtggggtatggtgagcacggggatttaaaatctcttgttagaatatgaagtgtcacaagcaaataaagcagtatatcctatatggcaacatgtggttgacaagttacatagtagtttcaagaactgtcataaagagaaaaataaagtctaaggcgctaaaaagttgtagttgggtgccgcagataacttactagcatccaatctagaaaacattaaaagggagctgtgcataaaagaacaaggttcgtccaggaaatgggtggatgtgcagagatggagataagagaaggaattatttgtaccatctgttgcaagtggcataaaaaagatatcattttacaaactgtaactatttttggtacaaaaggaggttgtccttggcctggggaacatgggagtagcccagcagaagattgagtgtcagtgagaaggacatttttcttttatccatcctacagcactgcacaattattgattgtggcttggaagcgaaatgatttatttaacattacttctytattctgctccagattgagatctttaatcactgttggacccaggactggtcagccaggtctggccactggagggctcagtagagttcctctgtcaaaagatttatagaaataacgctcatcttaaatatagccataagctaaccgctgactggaccatctctttcctgggaattaaataattttggcagcagtctgtctgtctgtctgtctcatgtctgggagacattccgtttacaatcaaatgaaacaataggctaactaaaaccttacaaatggcaatcttcccaattttaccaatgcaaacaagatgaatttgaaattttttcaacgtaataatcccttcccttcctaatatcatcttcatatctataggcacagttcagattttctttgagcaaatgtaatttttttaaagccaatgaagaaatgaatatgaaagggaaaataggaatgaatatgtgtcacaatactattggccttgccagagcataaaaattacttcctgttgaggtaatcctgaatatttcctagcacgtccattcttaacactgactcagaaagaatacattgcttccactttgcttttaggcctagtcaatgaaaggaagagggaaaatgaagagtgggacactttatacactgctgggaagaggaacgtagtaatggctgtaatgtcccaaggtagagaaggcagagaaggatctggtgatgtaatcaaaccaaagcgtgggggtgttagtggttgcacacactcatactgaaccaaactttatggtgagttagcctgaaagagcccttctctggagaatgtgccttccactgagataaagccactgggtcctagatggcaccaggatattgtttaggaaattggcttgtctggttcattagcaggtactctggggcctttggagattgaactccacctctcttgggtgagcttggcgcttgctaaagagcatttaactcatccygattcaccgcaggattgggctggctttcaaactcctgacagtgaattactgctcttgtaatgacgaatccatgcatgcatgctacagacagtgccctggagcattttgaaagtgaaaggaaattgctgtgaacctggcaggaaggaagagaagggagaggtaaactagacttcttctcgcattgaaccgaccgactctcattgtaacagggtcaacagaagccacctctctctagcgtaatggacatggtttcttgtggttttaccctttgttgcttttttttggagccagggtctcactctgtcacccaggctggagcgcaatggtgtgatcttggckcactgtagcctctcaacctctcaggctcaagtgatcctcccacctcagcctcccaagtagctgggaacacaggcatgcaccagcatgcccagctaagtttttactttttgtataggctgggcctccctatgttgcccaagctggtctcaaactcctgggctcaggggatcctcctgcttccacatcccaaagtgctaggattacaggcgtgagccacatagcacctagcccatagcagatatgggataacatgtcgaacatggcatgacttgcttagccaagcagcagagagacagagagttcactgtttgtttcctgggggacagcctggccccagacccttcacatacagtcactgggacaagcaaccctgcccataataagcaggtaaagaagaattataagagccatgtctgttagcacacctcacgccataagacagggtctttggaggatgtgataggggcggcatcgtggcctaatcagacaagggggaccactcctccatcccccttcctggaaagtacgtgcttgactgaagacacaaaacaaaacctgcctaatgtataccagattcatcagaagctgatagtgtgtgcctcccatactctggtgagaaataacaaacccttgctgattagattaaaagtcaagagcttccacattccttctactgttttccgacctcttaggtggcatctgttacaaccacttcatccaaatatttttcctagtgagacatcttaggagggtggcaatgtcacgtgctccatttgcccccttctttaataaccacaaagtgatttgatggcagtaaacagtttttttagaaagcctgcaaaggactggatttgaacttgaaagacgtcatggaattcttttggtcagcaagaacaacctctaaaagccttaaaatgttttaaaaatgcacaggctgcccagagcgtggtagttgggtgtggcgtgaagccagtggggcttccagcccagtgagtggagttccttgtcaccgtattcccacttggatagctttcggttccacccagtccccaagggctcagaaaacatgatggtaatcagagcctgcctgggagcgcaggagatgcttcctttctcccccaccttttgctagcaatgcattaatgccagtcctccgctgagagctgcacaagtcacttcgtgttgtggacacgcaccttcttgtacctgttcccctggaagataccagctgtgctgacagcggttgtagccagaggtctctggggatcgcctaccttctcgtccttcatcttgtttagggtggggcagaagggctctggtttcctttccagaatcccctctgcacagccctggtttgccctctctatctttccttctcgtttcagatgtattttccagggtgattgcagttccttgcccggcgctatgtaggactgattaatggctgctacccaaagttcagcgtggtaaaacagggctggttaattaatagacagcctccttatctccctcatgttttccctctggtgttaaaccaggagaagaggcttacgtttccttcagctgccaattcccagacttcaaaagtctggcagcaaagtgggtattgggtgctggtctaggtttttgcagtagcacctttaagtcaacagaaaactgatctgaaagttggctcctctggattgagtatgttgggttttttgacagtttcatttctcggtggctggttgtttgccctttctaatgatcctgtttgccttcagcgaaatatattttgtaatatttcctttgctgttaacccatttacctaggccgtttaaagttccttcattggtgttttccctgtaagcagttgttgaaggactgagtcacccgtgaggtagcctgtggttggatgtgggctgaggttattcagtgactaatttccaaggggaggagaaattgacttatcacggggaaggttactttttatccatgccagtgtcagcttctctccgaaaactgggtaatacgaaatggtctttattggttgtgaacactcgagctgagaaacattttaggatctttgtgtcttttgtgatgattttgtttctgaagaggaagctgtctaaaatattcaagtgtgcaaccaaggatttagatgaagccagcaaacaaaggaatcatgtaatcaggacctgagcgaatgtgcttactcacggcgttagttacacaggtgatttccttaagaaaaagtaagtggctttaattctttgagggtgaaagagtgtcttaagattccwtttcagttttctctgcttacttcattgtgtggtctgattgagtggtatgtttacaaattctagacttggaagggtggggtttgaaatacaacaaactgtacataatattccttttccacaagcaatatatatatatataaatgctccacagacatgattacatgaggcagtttcccaagatgattttaaacaaatattttttatactaggttttttttttctggaaacaattttaatatgttgtttcttatcttacgttcaagaaacttctgaatgagtgatattcgatttgacttatggttcttttgggaaataatatatagctacatgtaagaatttctaactcagacttcagatcttaatttgaaatggccccagatattttctggtgtttcagaagtatggtgtaaacagcattttgatccgtgtgcagtctgtgggcagggacacctgcctgtcagcctgctattatgatgaggctcttgaagaaactaccctctttctaagaactggaagaactcaaataatgaagagacaatagaggtttgggcagtaatggaaagaagaaaagacagtgcctagccaagcagatgaatgaggtagaacagtcttgttcatacattgccattatatctagtgcagttgaatgaacattttctgtgtctgggcttaggtgcaggcaaatagttatctgtgttgtattcagataaggggttagaagaatctttatttttctgtgtcggtcatctctttcttgctgtaaaatgaaattgtttaaagcttacattatgacattagtgttgaaattctgtggggaaaaagtgtcaatggtacaacatagctagttacttaaactcactaagggaaaagagatgataagattagtagcatcagagagatcagtggcagaataagggactgggatatattaatgtgaatggcaactcgtatgtgtgtatgtgtatgtgtgtgtgtatgtgtgtgtgtgtgtgtgtgtgtgttgcttatttattttctttgtaagtttagtataattttctcccacaaggtctgactttgagtaccagcgcaggaaaaacccagtatgtatttaatgccatgtctttactcattagccaaataacagttaaaaaccaaaacaaaataaatctgtgttggtgacagattctaggaagatctctccttagtaagaatacccgcagcaaaggctgggtttgttttaaactgtgaattatacaatcttaaccatcatgctgcttccatctatcagattctggagtctctaaattctactttttattgcaagtgtgaccttggaaatcacattgaagacttgaaaacatccctccagtgatgtccccttaccttcccccacatcctaagagcgagttgccttaggttggtccctgtcttttatggtaggattsccaagttgtctgatcgtaagggttcattctagttgtggttttaaaacaaatgtttcccactctatattgggatcattgtgtcatttttcttcttgggctctgtttagagccaaggatgaaatacatgatcctggttctttttaaaactccgtcttagaaagtcagtcacagcttggcaaaccaacataagaattctgccaagacttccaacatctaagtcacctgtgttgatagagacattcaacctcagattaccaattctgtcacaaccgaatgtttgtattcagcgccactgtggataactcagattgatggtgactctttcggtgacccttttggatgatggcaagattattttgaagtggacagggcagggaagacacacaggattagctccagatccgggctgctgactgttcatggcaagcagccgtcctcattggctgaggtcccattctggttggttggtgtccatgccatactggatattagctgtaaaatatttcgactatcactggtgtttcccacatgaatgcccaatacaatgtatcagaattacttttagttaattgttatatttctttctaatctcatctatacataccactagtaaatctattgagatattctagttagatctttaaatgtttcattttaaaggttatttatatatctcctaaccattttttgcatgtcaccaagcatgtttttaaaatacctatgtaaatacctttgctgttttcaaagaaatgtactcaactttttatgaatttaaataaattttacattttctttttactaatattatttatccttctggacagttctatactctctagaatattttattttattttattttactttattttattggagacagagagtcttgctgtgtcgcccaggttggagtactgtggtgtattcttggctcactgcaacctccgcctcccaggctcaagcaattcgtgtgcctcagcctcctgagtagctggattacaggcgcatgcactgcgcctggctaatttttgtatttttttatagagacagggttttgccatgttgcccaagctggtctcaaactcctggcctcaagtgatccgcccacctcagcctcccaaaatgttgggattataggcgtgaaccactgcaccgagaccctagaatcttaatgtccctttttacactcctgccaaaaagaggaaagcttctgctggttaattgggatcgtagtcccccagataaagatgtactctgaaggtggctaaggaaggaaaagagaacagggaatagtgactgacctagttaggactgttgttcataccaagagggttctagatattatattgattgattgattgattgagacagagtctcactttgtcacccaggctggagtgcagtggtattatctcggctcactgcaacctccacctcccgggttcaagcaattctcctgcctcagcctcccgagtagctaggactacaggtgcatgccaccatgcccagctaatttttgtattattagtagagagggggttttgccacgttggccaggctggtctcgaactcctgacctcaagtgatccgcctgcctcggcctcccaaagtgctgggattacaggcctgagccactgtgcccaggcagttctacatattttaaatatttttctggaattaataacaataatgacaacagtacctaccatttgttgtatgtgatttgccttggacactgtgtaatgctttataaacagtggcatatttgagtcgatgtgatgaatttatctcgatgtttgttttggttggttattgcattgtgtaatctgattatgtggagaatttgcccacatatccgctgctcgctgagccagtccctcctgtattttatgacctgtgaagccctgtgctgcttcctgctgagccatactttgctttttattgagccctgaattgtgaaggcagagtgagagaggtatttatagaggatccgtgtcgctctcctgcaaaacctgtgtcacgcggttgcccagcctccctggaatgagcatcagtcaggtgtattatcatgcaatgaccttgggactgtyccttctggtctaaagcactgagcacctgagtcatgagggtgtccaatgagcagggaggtcctcatgggctggagcatcagggcaggggccatgcagagcagacgcacctggagcctgacctcgaaccttcatatggatccccaagaactagcacatggggagagagaccctggagtgaggacagcatcaggatatcacaagttaggtttagagaagggagaacagattagcctatcataatgggagctctgtgtgtgttttgggaggggagtagagaggaagtggagataaaattgtaattgtgagggaggagcctgcatactccagggggcccagaaatagcccctataggagccaagaggccaattccgtggtgcccaggtcatgtattcaaaaagggctcccttttgttgctacatattagcaccttatttgcacttctcattggtcactttcattatgaaatccacttgtctatgtaaaacttgcagggcagggattctacaccgctggatccttccaggagcaagataaggaagccatgggagtcccactggttgttcctgcattcttatctacgaagtttaagaaagaaggtgccctctccatggcgcttgggagtttccatggaacttgggggcttctttagaactgtatcctagaataaccccaggcacttaccaagtgcttggtaaatactctttactacatgcagtgaatttttgtgataaagaagcagttagtttgtatcctgtgcattaggctctgtttcattttcaaccttctcctggtgcctctactatccctactgtcttccacatcatccacatcatggggtctcttggctgctcatcttggttcttgccattcaagcccccacctctttcctcgggtccctccctcatccaccctccaaccatttatacccttcttctctgtcacatctcctggaagtcaggatagggactgtgggctcctgtgacctcaccaatagaacttgaagaatggatggagcctgtctctccttccctcagttatttggagaatctcagtggtcatttccccactgcaccttgaccaaagcaaaaatatatgaaatcatcatatcctgagttatttttttttttattctactcccttgctaaacacagtaacatagttgcaaattacagttgaccattgaacaaggtgggagttagggatgctaagtcccccacacacagtaaaaaaaaaaatcagtgtagaggccaggtgcagtggctcatgcctataatcccagcactgtgggaggccgaggcaggcagatcacctgaggtcaggagttcaagactagccgggccaacatggagaaaccccgtctctactaaaaatgcaaaaattagctgggtgtggtggcacatgcctgtaatcccagctatttgggaggctgaggtaggagaatcacttgaacccaggaggtggagattgcagtgactgagctgagattgcgccactgcactccagcctgggagacagagcaagactccatctcaaaaaaaaaaaaaaaaaaaaaaaatctgtgtagaacttttacctccccgcaaacttaactactcacagcctactgttgaccagaacacttacagatgacttgaatggtcgattaacgcatagcttgaatgttatatatattatatactgkattcacataatcaagtaagctagagaaaagcaaatgttcttaagtaaaccataaggaagaaaaaaatgtgtttcctttctattaagtggaagtggatcatcataaaggtcttcatcctcrtcaacttcatgttgaataggtgagaaggaggaagagaagggcttggccttgctctctcaggagtggcaggggagggaggatatctgtgtatcagtcaacctgcacagttcaaagctgtgttcttcaagggtccactgccattgtactcttattgcttaattatttccttccagcctctccatgctgatttctcataggctcaaatgaagagttggtgaatgaatgaaacttcccttccaggttttcccccatgcatctcctttccccctgctcatctccctagattgtatccactttgaaagatgggaaacatggttactatttcccagggctaacagtagaaaaacgtgctcaggacaagttttagaagactcagcgtgagcactattgatacactagacctgcatttattaagcagcatctctaagaagctgtgacattaaaatttaagccaccacactattttttcctgaaatcccacaaaattgcactctccatcaggtgtattcatttcttgtggttgctgtaacaaattaccataaatttagtggcttaaaacgtcatgatttttttaaacaccataggtgtatcattttacttttatggagatcagaagtccttaatggattttgcacatcaatatcaatgtgtcggcagggtcatcctccctctggaggctccagagtgggatccatttcctcaccttttccagcttctagcagctgcccacattccttggctcatggccccttctcatagcaccttccaaactcttctaaccctacttycatcagcatagatctcccctggagctgatttccctgcctccttcctccgcatataaagacccttgtgattgccttgagttcaccaggataaagatctcccatctcaccatcctcaacttcaccccatctgcaaagtctcttttgccatgtaaggaaacatattcacagattccaggatgagggtgtatacatcttgcaggggaagtcacacgkttacacactgagacttctcttgaaacacgaatatcaaagtcaactttctgatcccttgttttcttttcagatgcagagagaacttgtttatgcaagaggagatggccctggggcccctcgccccggatctactgctcatccaccccatgcgattccaaattccccaccgtctactccrgtgccccattccatgcccccctccccrtccagaattccttatgggggcacccgctccatggttgttcctggcaatgccaccatccccagggacagaatctccagcctgccagtctccagacccatctctccaagcccaagcgccattttagaaagaagagatgtcaagcctgatgaagacatgagtggcaaaaacattgcratgtacagaaatgagggtttctatgctgatccttacctttatcacgagggacrgatgagcatagcctcatcccatggtggacacccactggatgtccccgaccacatcattgcatatcaccgcaccgccatccggtcagcgagtgcttattgtaacccctcaatgcaagcggaaatgcatatggaacaatcactgtacagacagaaatcaaggaaatatccggatagccatttgcctacactgggctccaaaacaccccctgcctctcctcacagagtcagtgacctgaggatgatagacatgcacgctcactataatgcccacggcccccctcacaccatgcagccagaccgggcctctccgagccgccaggcctttaaaaaggagccaggcaccttggtgtatatagaaaagccacggagcgctrcaggattatccagccttgtagacctcggccctcctctaatggagaagcaagtttttgcctacagcacrgcgacaatacccaaagacagagagaccaggtaaggtgcagtgagggtgaccgagggtggtacctgggcccatgtgtcactgtgggcagctctacaggggtcaaaccgacagaataaatgtctgagcacccatctctgcagcatgtcctgtggatgctgcaggagtcacagagtggtgtcaaagccaccattgtctgcaaatagtttctaaattggcaggggttacagtcattaagccatgttcaagaagacaggtgcagcaacaatagtaatcagtcccttgtgcctctggagcatggatctaagagcattatcatttgtataaatctgaataatttggaagaaaattgtcattagcagaagacagatgaaaagatcaaaaggtcataataattgatctgctactgctgaaaataaggagtgagtgttttcagttttaactgttggaaatggcagtttgtgtttttccttgtggaatacaattttgttttctcatctggttgtgggaagtggaaataatgtgtctgttttctaggaggataaacatctgaatttgcatgaaaatagaatggcttagatttaatatttatctaggagtggtgctgaaatcagcaaaatttttccagggaaagactctctggggacttgaatttctttttaaatagacatattttataatttaccaattcagaagcttcctactctatcttgaaaaccttccaaagttcatatagtaatagaaaagctaattttgataaagggaatttctctagcctgaattggttgaaacaagtcaacataataatcataaaaatctagccaaagaaattgagtccaaagaargtttaagcatgctgctacctattgttatatatgaatcaaggggtatgaaaaataagatgtccaggccaagtgcagtggcttacgcctgtaatcccagcactttgggaggctgaggcaggtggatcacctgagctcaggagttctagacaagcctggccaacatggtgaaaatccatctctattaaaaatacaaaaattagtcgggtgtggtggcaggtgcctgtaatctcagctactcgggaggctgaggcaggagaatcacttgaacctgggaggtggaggttgcagtgagccaagatcgcaccatcacactccagcctgggggacaagagcaagacttcatctcaaaagaaaaaagaaaaataaggtgtctagatattcagttattcaataccttattagaaccactgcttctcactaaaaaatgttaatatcacttactattatataccatgtaaaaagaaggccaaaattgtgaatggaatgtgacctgtctaccttactgttttcacacacaagtcagaaagccctgaagtcctctttagcacagttttattatgaaagggcaatcccttcttacttgttcagttacagggaatatcatagcagaaagattccaggagacagaaagagaaagaacatgaaagttctgggatcattaatgaaacaaaagttctaactctctcatgtagctagaataacaacaacagtgaatggcttgatgatgcaggactaagaaaaaataaggattggaaaatagtattcattctctcctttccaaagtcctcatgaagtgaaattctaagcatcaaagaaagggactcttccygtcactgcagacagctaaggggtataggataaacactcatagtggttcatgggaacagaccaatgtgacatctggagaggaatctaccaagatgtgcgataagtcttggaagcctgtgttgcatacttcacagaaaggataacacacctgtcccctttggcaggctttgaggtgctggttgggaaatggtatgttgctgaggggatggaacttacgggagcaagaatttagaccagaaaacaataaagataatttgtctcctgcatataatgttgagagccagaatcctacctcccacactgacctatcctagataaaagagcatcaggagcttgattttgccatgaccatattgaactgtttccaccccggttcttggatgataaaaacctgaatttgcatgaaaacagattagtttagatgtaatattcttttgggaatagtgctgaaattatcaaaatttttggccaaccaaagatggtgtctgccttctttccagaacctagctcagtgtcatctgtgtgattaccacgcacacacaacttaatgtacatccttgagcctcacttttcaagacgtttagttatggagagaataaaacaaaccctctgctgacctgtggagtcatctctgtatgggatcaaaatcttgaaagattttagcttttggtactatgggtattctttgagagcctccactcccttttttaaaaaagatctgccaaccctagagacttccattttgtaaaatttcagaaaattctatggacttcagttttacatgttagaaaacctttttagaaaatccaaattattctatttccagattaacaatataagaaaaactgacaaaacagatgaatattcacctaaaatacagtcattatcaccagtgtattctgacatatgattgtaattatgaatgtaattttacatgttcacatttttcattccccataatgtaaaatagcacaggaaaaattttatctcatacatcttgccaaggtgactccccacctgtaatcagcttatctccagagggtggaattggaatgcttgggtatatgtgggccggttagattctcttttcctagagacctgcacatagacacacagacacacagagacacacacataccacatggacacacaaagacacagacacacacagacacacgacacacacacaagacagacacacctacacattctctctacatttagactcactattgctgaaagacctaaacactccccgctaactcccctcagtcacatgtcaaaggtgaagaataattctctggtcaaaagaacttgagtctggaacttttgccctcagcactcctacatgcttcccccattgtttcttacatgggacaaagtgacaagggtgaagctcatgccatacttcctcctccaaggacagctcagaatctggccctgaactcttttagatatcttggtaactaggctgacatgtagcattcctggggaatgtataggaaggaggtgaatggcacctatcatttattgagagccttttatgagccaagcactatgtgaagtggtttctatacattatatgatgtaatcatcatgacaacccagtgagatatgtactatcatcatctcctttttacagatggagaaactgaggctcagagaggttaagtaacttgcccgaggccacaaagccagtaggtggcataaaatgtccaggactattaaagaattctacatattccatgctgtttaccactgtgcagtattctgccttgcaaatgagaactataagccccacctccacacaacagagaagttaattcaggagtgaattctaaacatttcaaccagaattcttcaaaaattgtttcaggactagatgctaagtaactgctcctaaaggatatttacaatcataaacacagtagaatttgcataattatgctgctaaatatacacatgccattttaaatataactgccctagmtagtatattagcacaattatgcagaaataggggaagaaagaggacagcattcttggtagacttcatttttttaaatgcatctgagtactatgtcaaagaaaaatgttaaaaacaggaacatcagaaacaattaccgaagcacaaaattataatccattgtctcatctataccatgatgttatttagaaatgcttaatctgtgtaagtattgttaaagaattttcaaccccttaaagcttaacttcatgagcacagggtcgtataaagaaccaatccaatttctgttgcaatttcataatattaaaaagcaaataaatatgagagtgtttttcatatgagagtctcaagtgacattttacatcgaagatgtgaagctgcaaaaacaccagtgggaggctgagaaatcggtggctgtgctttctgttggcactgctgggttcttatgctgttctgaagagcacttcaatatagtagcccaaataactgtgggatgttagaaatcagagggaaaaattcttccttccacatgcatactttgaagacatccagtggtagcttttttgaaggaacatgatttggtaacagctctgttgacttgaaaatagctcactcaagactaagtaattgagtcttcagtcttatatttagtcacataccttgtgctaatgaatttggcatttctttctttctaaagatgcttcaatgagcatctagtaataataaattgcatctagaatatctgaagaacacagtgtctatggtataacattcttgtgatggtaggggtctcctaccagggactttggggtacagtgacagatcatagctgctttgactttcagaacagccattctagtgtctgagcttctagaaaagaaagcaatcttgagtgatgaagtggttttatccaagtgacttccattcagctaggactccaagtagagaatagtcctagtgaccaggagagactgcccaaggagaccatgtgtgacaaatggcttagtgcctgaggctctgtcttctctaggttgtaaaattacttcattaaacagcatcattatttctattcatggcacataaaacagcccttaagaattgtaaaattctgggacatttatgttttgctattttctatttgtagtttggatcatatactgtaatgtaaaatacctttagtgaaataacactcaaaattcaagagtgcttatcgcaaagtgactaccttgccttcgaaatatgtaacagattcctccaaattgatttttcaggacccagtaaacttgaactgagattgtatttttacactattctatacctagagcagstacattcgacaaattagcatagagttacactaggaagaaaaattttgcccattccgagcacctatawctacagaaaagcmaacaacttgagtttctattatgatttttgaggcatggtagacttagcagaaccttctgtgtacaggagkaagcccacatggcarctggcagcttgtgtctgctgttaatcatttcacatcactttctcattttatgaggattcaatgttactatgttggtaacttttaggggtgagatggatccttggttaaacagttgatcaaatgaaagtctaaattcagatttatgtcattgaaaaatgttcactgygactggaagacctttgaagatttcctaaaccatgatttatcctcctagaggacagtcagtttgaatgatgggaaaagaaggattacttgctttcctttcttgctggtatagtaaaaagtgagccacatcagcgatatcctaagtagttacagttagcatctcggtaaagcagagtttcttaacctctgtactgttgtcagtttgggcctgataatttgctgtagggggctgtcctgtgcattgtaggatgttgtcttagtccattctgtgttgctataaaaaatacctgagactgggtactttgtaaagagaagaggtttatttagctcatggttctagaggctgagaagttctagggcatggccctagcttctggcaaggccttttgtgctgcatcatagcatggcagagaaggtcaagggagaagtgaacccaggcaaagagggagaaatctgaggggggtctggtttcctaacaactcactctcatgggaacaaattcattactgatagaatgaatccaatctcttaaaagcgagagcaagaaatcactcactacattgagaacagcatgaggcccttcatgagggatctgcccccataacccaaacaccttccactaggccccacctcccagcactgccacgtgggggatcacatttcaacatgagttttagtggggacaaaccatatccaaaccgtmgcagatgtttagcagcatctctggcctctacccactggaagccagtagcaaataccaaytaccaatcctgacctagccaggataatcaaagacatctctagawattgtaatgccctgcccaggggggcaaaatgccccagcttagaaacgttgctctaaaggaaatttgaactttttctacttttaataaaatagagaaatgaaagaataccccatgttcaagcaatgtaaattgtgacattcgtaaggcaaggaccaggacagttattacctccattctgccctcctcctcgtgataaagcaactcattattgatagagcttgctatgactaccttcaggtcagtcaatctgctcatcaaccagttgttcagaggcagtaacttgtaatggacttccaagccagagtgcctgggttcaaatcccagttctaacacttgccagcagmtgggacctttgacaaagtaccgaatcttkctctgcctccatttgctcaactgtgacatagagataataatagtatctacccmacaggatgcaacaactcattacagttcagtgtgttatggcagcctgggatatactaagtggctgagagtttctagtttgagcaaagcactctactaagtgctactaaagaggaatgtaaatacacagagttggcaaggatgaggaactccccgaagaagcagggagagacatttctgaatataatatcagaaaacacgtaaggtgagcaagggtgagagaattaaactaaatgtgaacacagaatagaatgagctgggcttacagatccaaattagaatgtttagagtatcaaaactgcttcgaagttcatttcaggaaagtagccagggttgcacatctgcttgggtccaggggcaaaaagacaagctaggttcagggcatccttttaaaactgcatctgagctataagactgaagataagacagctaagccaggtatgcgtgaaatcattaggttatctgttttgatgcctaatagtgcttgactgattcagctcttgtctgaattgctttttcatgtagctgtaattatggatcaataaatgtttattgagctgctcttatgtgcttagctgtggactggaggatttgctgcatacaaagaaactgagatatggttcccatacaccaggaacataaaccatgaagacagtcataaaatattaaaagcttaatataaacatataagctttgtcacggtttaagtacaggaagcttcggagttacaaatgcctactgaatacctgtttttgagaaacaaccacaatcattgaatttcacacgtgatatttcttttggctttggtgatgcccagggatgctcttcttgtcattcctgagagtgacaatgtctccttgtgagtcagagaggagagaaggggacatgccaagtcacatggcacccccagaggcttgagctccagagaaagatctcttcccagcttcccaaagtccagcttggaagtcaggacacgttttccttgaaaacaatgaggaacgacgacaggactaataatacattgtaggttaaagaggcttccatgggccagctggaaatccaaccaccatttattccaagttctaaacaatgaaagtacaagtaaacttttcaatgacaagcctgccataatttggggtctgcttgtacataattaattccaaagaagtgatacagacggtaattgctatgaattcagaaaagggaacattttcccaaagttatgtgggtctcagagccttcttgagaacattgagatggtctagaattgagggcatgtacgtaatgaaaagatgtcatttgggaaagaccaactagtctctatccaaaatttgctatacttttaccatcatggtacctataaaaatgacatctcgatatgatgttttgccagtctcagaaatcaagtgctgaccaactgaattgttatttcgttcacaggagtggaatttcatggttaagtcatatttgctagttattccttagactcctgagttcaggcatcagatacttgataaacatactagaccaactaacagatttatgcagctagctctattcttacaccagggatactctgtcagaaatgccaatggaatagcagccacaaggtctgtgtgctactttaaacaaatcaatwkctcaaaaggaaaaggcgtcgtctgtcactaattagatcaaattaaaatgtgctgctgtatctcctttgaatattcatgaggtgctctcaatcagaagccctaagtctgagaccagaaacttaagccagaaaaaactaaatactgtgagattcagataactcggtcctttgccaactagaacttcaaagagaagaggaatagcttaggtgcagagtaagcctcctgaaaagatgacaaaatcagcttaatgcagaatcgtggggttcccacccaacctaaagatggatcgtcaaaatagcccaggagctgataatcctagactctgttgacacacaggacacatagtttagcctctcttgtgatttacttgtccttctgtctggcggaaaccatggagattacacttgtccttatttgaattytggacttcatttttcatgaatgaagtgattcaaaaaatacagctgggtctaagcatgaattctaactttcaaaaatcacagatcttaaaaagtctgtattgaactgggtgcagtaactcatgcctgtaattccagcatgttaggaggctgaggcaggagggccacttgagccctggagttcaagaccagcctgggcaacagagtgagatcccatctctacaaaagactttttgaaaaattaggtgtggtggcacatgcttgtagccctaggtgctcaggaggctaaggtggaaggatcacttgagcccaggagttggaggctgcagtgagctatgattgcactactgcactccagcctgggcaacagagcaagatcctgtctcaaaaaaaaaaaaaaaaaaagtctgtatatactcatgcagggccaacttgtatcaccagtaaatacttcctctgtctccttgtccatcctcaaagctaaagagaccttggagaatactgggtcctaatagctgactttacagcaggagaaacagcaaggagacttcctaaaggtccaaggatgggagctactctagttaaatgacatttcgctatcctgctgccttaagggtggctccagccattgctcttgacctcacagccacccactgggccactccacctccatctctcacctgacttgctacagtggtctcccaaaaggtctccccactcagtccctgcccaccttccgcctgttctcaytggggaggccagagtgaccccgttaaaacgtgagacctttcatgtcgagcctcagctcaggactcgccgtggcccccctcacattttgtctttgcaagcacaagtaactaagacaaaacaaaaaggaaatgcactagagagaccaaatatagcaaatgtttttttcttttccctaagagtcattattttatttcttttgagtccgccctaagatttacagctctaaagcaggcgagagtggggagttcatttccacagtcaccatgaggtccactcaagagaccatctctcctgacaccgtctctcatttgaaggtaaattagctggccgtgttcagctggcccataacatgaagcaactgctattcctacctgtttgtacctgtgcaaaaaatgagatgtcaattccagarcacaaatgttccagattagcctcagggaagagaaagaaaatgcaaaacaggtgatttcataaagcagggtgtaggcttgccctggggagtggcggctytaggcacccagcagagagccaacaggaagtgaagtgcctcaccctagatgtgagtcactaagggaggcagctcagtgccacagagagccctggatcygagaaagcctgcaagctaattgatctgtttccctaagaaaagccctgcctggctaagcctcagtgtcttttgtcctaataaggggatgataatctactcaagagttctgtgcaatttttatttttatttttattatatttatgtgtatatatatgtatatatgtatatgtgtgtgtatatatatatagatatacatatatattgatatacatatatatagatagatagatatacatatatatatatatatwtttttttttttttttttttttttgaaacagtctcgctctgttgcccaggctggagtgcagtggcatgatctcggctcactgcaacctccgcctcccgggttcaaacaattctcctgcctcagcctcccaagtagctggtattacagaagcccaccacagtagcccagctaattttttgtatttttagtagagacaaggtttcaccatgttggccaggctggttttgaactcctgacttcaagggatccgcccacctcggcctcccaaagtgctgggattacaggtgtgagccaccgtgtatggcctatttttatttttcaatgtattattattttagagatgtggtcttgctctgtcacccaggctggaacgcagtggtrcaatcatagctcactgcagcctcgaactcctgggcttaagcaagcctcccccacctcagcctcccaaaatttggggattacaagtgtgagccactgtgcctggcagagggacaagttctgtgcaatttaaatgaaaatagctattagatcactttgtgtactggacagttttctatgaataaatttttcattgacataaaaccatgaagccatagagttgtgccagcccttcggatctgaggggrgttgtgtccttattcctgacttggggctgtttcctggtcccatccagaacagcctacacagaaagtgaattgtgaaatagattaaaggctgcctggagccttccctaagtgcatttgctgtgctgggcagagcactgctagaacctgggaagccaattgtgcatgcggggaacaccaggcctgggtgggactgagcttggacctcctggttggacctgcccgctttttttttttttttttaatagcttcattcaagatcacagacccagaatgggaagagctatgggatttatgtaaatcccttccaaccagaaacttatgtaattccaggattctaagtgaggctggatttctgtgggtagtgggtgtgagagaatgggtacccctgtttaacaaggggtaggggccttctgagactgtttcctctacagagtaagggttcgttcagccttttccgtggcctgccaagaactcaactccatgttccctcacttcctgtawttgaccttgtccaggactttctgaccttggagaattcacctttgctctttctgctgcttcgtgcattcttccaccaaatgtctaactgactggctcctctccaaactcaaggctttgccaaatgccaccagctcagggaggcctttcctggccatgacacttgaagttgcaacactcccccrcagtctccygtgccccagatgtaagttccatgagggcaagccctgtgcttttaccaccatatccccagcatcttgagctgtgcctggcccaagaaatatttgttgaatgaatgaatttaaagggatatcatgaaggcttacacatcctcaatggtttacaggttataatgtgcttcgctacacatttttctcatttgccctcattttgatgtctctgtagggtgacagcctttgggacaggtaaggcagttgttttcccaattcgatggttaaggagcggagacccagagacgttaagtgacttctgagtggagatttgtatctccccgtggatgtctgttaatgaacttgaatgcagcatgcccaaaaataaagtcctatcttccccacatcaggtaacaacagcttcattcatctagtcactcaggccaaaagtcttggtgtcatcttgattgctgtctccccaaccctgcgtttggacacccagacccagagaacagtaagatctgtactcagaggtttcctggctccagccattgctctcgacctcacagctacccattgggccaagccacctccagctctcacctgacttgctgcagtggtctcccaagaggtctctccactcagtccctgccaccttcagcctgttctcagtggagggggccagagtgaccctgttaaaacatgagacctttcacgtccaacctcagctsagacttccccatggttcctatcacactcagggtcaaagtgagagtccctaagatgacacacaagtagggagaatgcccttctcrgctggactgggacagctccagggtatccctattgtccttgtacaatacttgcaatgaccaatggctcccctgtccactttctgaagtatsctggtgtggagaataaatgatttgattcccctcgccacaagccctggacaggtcaaccgtctgcccctctgacatcatttcaatcaccctccccttccttccttcactgcaggcacactggcctccccagctctcctcagtactgccaggcatgctcctgccttgggcagagtgtatrtgtgtgagtgcacctgcccttcccacagcctagaacgttcctcctccagacagcacayatggcctgctctctcacttccttaaggtctttattcaaaagtgactttctcagtgaagccctgtctgctcaccctgcgtaaaatttcagctcttctttctatctctcttcccagatttttttttctccttcatgttcgttggtgtctaaggtttatcatctatttcgctaatggtcagtagaatgtaacctccacgtaagcaaggagttttgtctgktttgttcatgtctatgtccttagtgcctggagcattccctagtatgcagtaggtgctcaataaatgtcagttggattaatggctgaaagaaaggtcaccgctgtaaggatggagtcagagaacaaacacagttaattcctggtccactgtttttgcttccactaaattgtatttggtctacggcttctccgcttgccctggaaccctgctcagaacactgctcccttctccttcttcttctccctccggataaattctgccattcttttcagcatcattcacatctcacctattataagaacttgttcttccgcagcctattgctccgtctccaccatccaggagtaccttattgatagcactgagcacagaggaaccccacagaattctggctgggctgtagccaycatgcccacccaagccaagtcatccgaagcctaggatcaggaagaaaggcatcagcatcactgactctcagcgcccgtcatggtgctcacgcacaaagtgatggtggaagtgaactgaaattgacatgataatcaatcrtctcccgaggccatgaagaaaataaacagcatccctaggagtatgtgaagaactatttattagagagaataccatcatcgccacagcattccctttccacatctcattgccagttttcattctgtcaacacctcagtgaatttatgaagaaagattagaaatagctttttcctctagatccttgtaaatggagcttcatttttgcctgtttttttacaggtatccttaaatgtgtctgtcttcmtgcactgtaagtgaaatgcagaacattttagatgagcccctttgttargttacagactctttcctgacttgggaaaagtgcctaatgagaaggtttcccccaactctgtctccttgaagattaccagaaggagaggacataggaagaaatagaaggggcacaaggggccttttcttctcatttattaccctcctctgtcattcagaaagcaacgtcagtatagcatgggaacagcaaggctgaaaartagcccagatgcaatggggttcagttgggataatgttgaaagtattcagggtccaacctgggtaagaggcaggagaaatgaccagagactgttcagacagtatcgaaggtggagaaagcaaggccaggctacagataaagaaatagtttgtatgaataagagaaatgaagacaacaaaaaatcgccatacttagagggggtcttggagtttcagatctagacagtaacaccattctgagttagaactcaaggtcagaggatggctgtaaagattttgaggctgtatagtgccaaatttctgtaggggttgtaagtatggatgttgaagctacaaaggatggcagctggggtatggtggatgggagcaccagggatgggaggggatttcctgggtagtggtagggaacttagggatgagatagtcaagaattccaaagcaggggagataytgagacattagacgaaacaaaatattgaagtgctttttaggggagacagaacgtagccagtcttcttgctcatgccataagcacagggcccggggagaagaaatggcagccctgactgcccactacaccagtgtctcccaaatagatctaaatgtgtcaatgagaagttaaatgtattgggagtttggggaacaatgtctttagttacacagcttttccaccaataggttaacttctggcagaaatagaaaggtcattgcttagagtcacatttgaagctttaccacaaattcagacaatttaaattcctttgttttgttgaactcrtctgaaaacagtctttaattactttgggtttttttttcctcataccagagtcagggcatgaacaaacaagggcatagcctcgctttaaacctgttcactattgcatcctggaaaaatgccttcggcactgccaagatcaaagagttttagttcaggtagattgctcctagaaaaaaggaaattgacattgtcaaagaaaggcatgcctgggaaaggggatgcagtgcctctgctgtgtccacggcagctagcatgttacctagcacgtattaagggctcaaaaatatttgttgattgactctttggccatgtaacactttctggggtggggagagagatgacagggaatgagcaggaatacaaagaaaaaaattgcaaaatttagaactagaagcaaatggcggaaccacctagtagggactctcagaaggccagaatactgcagttgttactgactacagtgggttgaggctgcagtgagctatgatcattcgtgctgtactccagcctgggaacagagtgagaccttgtctcaaaaaaaaaaaaagttctataaatggagtcactggctaaaaatcatcccctaactggttaggaaggttaatgcttcagaytagggactaatcacatcagctcggctagctggtttcagccatcttctgtaatatgtcttctggaaacttaagaacaaatcctttgggattcttaataggggaatcgccagcttcatatgctactgacttgtttcttaatagccattcatttacttagatatataataaggacttaattcaggcttagtgacactttggtcagtacaaagtctctagtcaaaaaaaaaaaaatcaaggtgaaacttgaatcaaaaagttatataagtgggccaggcatggtggcttatgcctgtaattccaacactttgggaggccgatctcgcttgagtccaggagatcaagaccagcctgggcaacatggtgaaaccccatctctactaaaaatacaaaagaattagccaggcgtggtggtgcrtgcctgtggtgccagctacttggggggctgaggtgaaaggatctcttgagctcggtgagttgaggctgcagtgagctatgatcatgccactgtattccagcctgggaacagagtgagaacctgtcaaaaaaaaaaaaaaaaaaaaaaaggttctataaatggagtcatkggctaaaaatcatcccctaaacacagattcttttttttccttttctgtgttccaaaggcagaacagaccaccagcggtatgaattttgcttcgtcttcacagacagacatggagcttgcaggaaagttgtttagagtaatcggacttttaacactggaaacagcacttccctgaatttgacttgagtttttttattaatattatgtttggatcatgagaagactcattcagacaggctgacttaagacattaaatgactagttaaccatatacactaatcacataaatatggtttgtggaatgatataaaatggtttaygaaatcatttttaagccatcttttcaacagtaattgtatcagtcctgtcatattttaaaccaagcgatattggcaagaatgagcctaaatgtctttaatattctgatgatgagcatgaaaaattgccactgcaataaaatgacagggttgtgttcatttctcttcttccatggcactttgctttcttccctttcaactttaaaacacacttcctaacatttcatcatgggagaaggctgcataagtttccagttgcygtaatttacttaaaccataaaattgtttccagattaccaaccataaaatggaaagacaatcttatttattaatgtataaatcagataatgtccccaatatgaatcctgaaaccagacacactttgacgattaaataggagggaaaatgttttctcattaccatatgtcaaaagaatggtatttttgtgaagtggctttggtcaagagagtagagcatacacttgtattcggtgctctgtgtgctcccacccaggagagaatggcttcccctctactgtcaagcatctgaactctccaggggggatgtcagatgagaagccacctgactcagtatctctgatgcagygtgtctctttcctggtggccttgcaggtgacrtgccctgaacraggccatccagggagmcttcactcccttcctcacagatacaaaaaggcaagccaagcatgtgggtacctggagtgcatatagcccttttgttctaaaagcacccagactcttatcccagaccgttctgcaactctgtcaatgtcagccttaaagaagaataggatgttgtttgggagttgtctctctctgcaccctaaaactattacctggtgggagctcagggtagaagctgagtactcactgagccaaggaacatgccgaaggtgtgtctgcagctccccagacttccatgtgtagatgacgtggtctgtgttgtgacattctatagttctaacctcgaggatgaatcagtagaggagcagcaatgttgtttatccagaatgattcaggtgctttgtttcttttttttttttycyttttttttttttttttttttgagacagagtctcgctctgtctcccaggctggagtgcagtggtgcaatctctgctcactgcaacttctgcctcctgggttcaagtgattctcctgcctcagcctcccragtagctgggattacagtcatgtgccaccayacccagctaatttttgtatttttagtagagacgggatttcaccatgttggccaggctggtctcgaactcttkacctcaagtgatccayctgccttggcctcccaaagyactgggattacagatgtgagccactgcgcccagcctgttttgaattttaatgctgatgctctcctttgttggacratgtaatgaaacctgttgaccagactggaagcagaaagaaggctggtctagccctaaccagcattgttcttgtggccagcgatggaatcccaggactcccytctgccatttccctcttagcagagtctcatttagtctctacataaatgagacctacctatttcttgcatttcttaatattactgtcttctgcatgtactaaggttgtcatcatgccttcctatcccacactccagctgtacagaaccctttaagcaacttccttaccaaagctgtctagactctaaaaatgccacgttacctttttttttttcttaaaggaatatcctttgcatttgcctaggattraagaaaagcagtaaagtsgtacatctcaaggtagccctgaatgcacctctgctcttactgtcattcattttactccagcaccactgcggatagagtccctgtgggacgaatgaggacactgggcaactttcacctggggctgagcattcttccgaggaagtcattcatttcccaagagtgtgtrcaagtctgtgccccccatgtggcaggaagagtgaccaaccaccactcccattttttctgagatgctactgtgacttgggtcaataagcttgacattgctgatggatgttcactaacctgctttccttatttgaatttcttaccattgtttctctttgatatgtggactattttatggcaaagagggttgccaaggtatgactgaaatgctatatggctgagaggtttagcatcggctggtgtacctggaaacatttgcaaatcactccgtggagatatatttccacactcaccgtttgagatttcttatttccattctattacagcagagagaccatactattaatacttaaaattgcttggtgttttttttcctccttggtggatttgcaacctttaactatccagactgcatgacttatatgcaagaaactcagtattgtgacagaccttcaattttaaactaaagaaaatgcatggagttctgatatcagaagcttscaattacaaaattaagatcagtgttacatatggcactgagagttacattccaaaggcaaaactcaaggccgcaatgcttgagttggacaaaattacccttgaatatcatcttgattgtcacaaaattcaggatgcagatgcaccagcttaatcagttggctttttctagtggaagaacaggccatcattactttttttttttttgagacagtcttgcactgtcacccaggatggagtgcagtggcgcgatctcagctcactgtagcctccacctcccaggttcccgtgattctcctgcctcagcctcccgagtagctgggattacaggcatgcacaaccacacccaactaatttttgtatttatagtagagacggggtttcaccatgttggccaggctggtctcgaagttctgacctcaggtgatccgcccacctgggcctcccaaagtgctggaattacaggcaggagccaccgtgcccggccagaccatcattactttttccactgacaatcagataaattagccagcatgtatttaatagtgtaagaatatactgtttgcagcatgggaatccccaccactcacaaacscagaggcctgtgggactgagatccgcagtgaggagtgaggtcccctctcttatctcaggctcaygcaaggacactcactcatgggagataacagcacaggcaaygcccatgccatatacattgttctcctctctctccttttcctgttttgaactaacaaatatgcataactgaattcacaygaggtgacatgtgaagcctctattcacttactcgtattgttgtttttaacaatgtgttgaaaacatggcaatagttctgcgaaacgtccattgtctgaggtctagaaatgtgagtctatttcaaatgccagctaaactgtaatgaaacatcaaagagccctggagagagaggaacagtatctgtatatggaaatcattgggaaatttttcattaacatcttgagatggccaagctgttagggatattcgtgttcctgcgtgattctataaaaacctccaggctaaagttcctatgacattagatctaacatcatctaccttcaaataaatgggttgttttgttttgttttgagacagagtctcactcttttgcccagtctgtagttcackggtgcaatcttggtagcagagacagggtttcaccatgttggccaagctggtctcaaactcctgacctcaggtgatctgcccacctcggcttcccaaagtgctgggattacaggtgtgagccaccgcgcccggccgggtttcagtcatatttctccatggtctaaagaagagacatgtttgtgttgcccctaagctgtgacacaagtgttactacccacacagcaaacagctccatcatttacaccaaaaccactccgcagcctcccagctgaggtgtacggcatagaaatgtgtgcagctaggtgagatctggcctgggacactgcgaatgctagggaacagcccttttgtgcaaggtgaaagaaagaaagcagggcagaaagactcaaaaacataggatgtgcaaacaggagtgtttccgagggagatgtctttgagttggtccgtgctgtgtctttttttagccagtcaggtcactggcttgatactgaacactgatcacgaatcttgacctgagctaaggatgtgcggctcttcatgttcctgagccaggttgggtgaacttccacggccttctagrtggtaccttttataaccctcargtggtgcattcacccggacaaactggtytgaaagtcmataaagctttaacaaacaattctcttgttttacagagagaggatgcaagccatggagaaacagattgccagtttaactggccttgttcagtctgcgctttttaaagggcccattacaagttatagcaaagatgcgtctaggtaaaaaagaagaaagccaatgaaaaaaataattcaatctgtttctcttttaatcattaagataattcattcattcaaatctgttttcttgtaatcatttcaaggctgaaaatattcacatctctatggatcatgggcgttatttttttgttttggggggtttggttgctttttttctttcctccttctggtaattcttggtcgaaagtaacactttggcccaagaaggtaaatgggcttcccagtgcatgtggcttcatggaccactcaccgtgcagtgcctgcaaccaccacccttgcgtgtccacgtcgccatcatctgaaagtcacaagtgagcctggctgcattccacccccagtgtcaggtgcacacctgggaagccttttccatcctggccaattgtgatgctgatgctaaaataccttcattgcttaatcccatcactgccaattgcttcaaatagtggatggaatgggctttaaaaaaaaaaaaaaaggcattttggaaactgcatagctgactctctttttcttttattcagcgagaaaatgatgaaaaccacagccaacaggaaccacacagatagtgcaggtaagtaagtgttyttggagctgtaggaggcctgtgggctgcctgggatgagccctggctggtctcagaaatgtttaacatttccctaagtcacgtatttggtatgatgtcaggggattcctagatattcctgccaatactgaaattccagatttattcattaattcgggggcaaagcactgtattctcccttcggttttcattcattcgctcattcatttgttcattgatatggccacacggtggtcatcttgcagacacggggctgcctgcctagaacttagaattcagtggggaagatggaaatgggacaagtaattttatgtgtgtcaagtgtttaaaagtgcaggataaatgtttcaccaataggactagcctataccaagggcagtccccagacaaagtgacataaactaagcccagaaagatgaagaggacttagggggaagaagggttgtccagtcaagggaatttaaaattgttctaagtgcaaagtgaagccatcggaaggttgtacactggggaaggacatcagcccagctgcaatatggggatggatgagaagggacagtagccaataaggaatgaccagtgtccagatgggagaaaaaggagtacttggactagggcctactttttattttatctttttaatctcatgacagatgacaaggcctgctttttaaatgccagcattccccagaaagacagcccagttctgttagtagtggcgttcactagtatccaggtctttgcaatgaatgtctcatccagcagtctcaagccaggcctctgcaagaagatgaggtcttccctctcatcgggttagaaatagaaatccttagcaggaacacattcagatactaaattacacagaaagcatatggcaagttgggtgaaaccccaaatttagggaagccacgtgtactagttttgtgcagcacggtagagtagacagaattggggacttcagtttagggctctgttggtcgtggttcttctctggctgagcacaatttagctacaaagccaacagggccactctgccatcattcctgatcctgacgggatttgttgttttgcttagaaatcaatcagtggccttggccgaagccagagaattatttcacggaaattgctaaacttgtcttcagagcaattgccagtttgtttcggagatacttaattcattcattttttaaaatggattgtaaacttagggagaagaaaggaaactactaaatactaaaagctcccatccttctataatccattctagaaatgattcatatctgaaagcactgctctaagcaatatgtacgtgctgttttgtattctccttttatttctttttgctttatagagaagaagaagaagaataaatatgtagtgagtgcttcctatgcacttttcatgcattcactcatgaactccttaccgcagcatctagggagaggtacmgtttttattctcatgttccagagaagaaaactgaatgcacatccacacacgtgacacacatcatcatagtccaaatgcctcccatttgaactcmttttatgttaagatgcctcagtccctttaaagatatataggttgtttcatttctttgttctaaaaactcttgtcaatttcttttcaaatgtggggaaaggagccagtgtcatttcctcagatatatttcccaaagtggaatcggtgggtccaaagggacagttcagtgccactggtgacatgctgttagttttctcttctgaatggctgagctgatttgcaacgccactggcaatgagcacgtggactcactccccacgtctctgctaggtttggactttctcactctaacgtatcagggcgagatatcgtccacaggggcttcgttgccatagcagccttgtatagtgcacaaaatataataaytcttccagaatgctaggaagtcagctacaagacaagtattatccctgttctgtagacaagtaaacggaattatatagaagtcaaggaactcatctggccaagagtaaaggaaaacccagacttcctggctacttatggaatgtgtagtttactgtggaaagagaacagatggaacctcccatctcaaaggtttttatactgagcattagatcatttaacacacaaaaccctataaggaagatgtcrttacccatattttacatgaaaagaaacagaagctcagggaggttaggttagttttccaaagsgacacagctattaagagtgacagccaggctgggcatggtggctcatgcctgtaatctcaggaccttggaaggctgaagtgggaggactgcttgaggctaggagtttgagaccagcctgggcaatattgcaagaccctgtctccacaaaaaatgagcrtggtggtacatgtttgtagtcccacatacttgggaggctgaggtgggaagactgcttgagcccgagaggtcaaggctgcagtaagccgagatcaagccactgcacttcagcctgagtgacagagcaagaccttgtctcaaaaaaaaaaaaaaaaagtgacagcctgactggctgataattgagtagatagtggtgccactggctacaattaggcccgtattataatggacattggagactcagaagtgggcagggtgggaggggatgagggataaaaaaaactacgaattgggtacaaagtacactactcaggtgatgggtgtactaaaatctccgacttctccactatacaattcatccatgtatccaaaaactacttgttcctcaaaagttattgaaattatatatataatacaattaggcccacagagacagaaagagctttgtggaagacgagtggaaataatgaatttgacttgtttatggaaaagttcagtagtggcgtgaaggcgttagtatgtggatctgaagatgattgtgtgctgctgacgagggtgcgggagaccttggtgggtggtggtagcagaagtggcctccctagaaagtatgtccagcaagaagagaagtggacccagggamacaacatatcaggatttaaaaggttggcagaggaaggagttagaaaagagattgaccaagacggagcagcagaaagggaagaagatcatggaaagtttcaaagtgactaaaaggaaaagaagtggctgacaaagcttagtgtcacattgaagcaaaggagagagtccacaggggtgacaactagaagatcgctgaaatgaacataaagagccatttcagagaatgaaggagctatgacatgtaccaaatataggagattaagaggttatagatgaagatttttttaagtgagtatagattccattaagaaatttggttgtggcttggcatggtgacccacgcctataatcccagcactttggccgaggcaggaggatcgcttgaggccaggagttcaagaccaccctgggcaacatggcaaaaccccgtctctacaaaaaatacaaaaatattagccagatgtggtggcacatacccatagtcccagctttggaaggctgatgtgggaggatcacctgagaccaggaaggttgaggctcggggaattgcaccgctgcactcaagcctgagtgacagagcgaaaccatgttaaaacaaaaaaattgcgctgtgaaagttatcttcttaaaccagttatcagcattcaactgtaacaactagtacctagtcttcagccttttcctccatggaataaaagatcgaggggagggaggtaccttggtggcctcagaatgtgtaaggagaaagaggtatagaaagaatgtgtgatttcctttggctgaggaattagcagaatggttcttagtagcaaacagaaggtagcacagtgtcatctttgttggagaaataccttgttatcagaaatgatatggcatgttgtgagtgtgtgtgcgcctatccctcaaagagtgcctatccctctctgtctggggaatgatgataaagtaatttgactgattctgtaaggaaaacttccaatggattgtggtcagaatcactgacattggaaggcactgttaactctaacatgcagctgtcattggaaatgttatcagatatgttttacttggtactttcatagttggagaatatccttttgaacaacagcagagatgacaaatcttgctctttcgaggatgattttgatttgaggggtggaggaaccaccagaaattggtcagagccatgactggtgatgtgagtgaccatttaggcttagaaacataacgtggctgggcgcggtggcccacgcctgtaatcccagcactttgggaggccgaggcaggtggatcacctgaggtcaggagtccgagactagcctggataacatggtgaaacctcrtctctactaaaaatacaaaattaactgggtgttgtggtgtgcacctgtagtcccagctactcgggaggctgagacaggaaaatcgcttgcacccaggaggcagaggctgcagtgagccaagatcatgccactgcactccagcctggacaagacagagcgagactctgtctcaaaaaaaagaaagaaagaaacataacaaaaagctcgctatcgggtctcctggagctccattgtcagttctttaaaatgccttctggcctgctcccctgctgcctccccaagagggccattagaggggctgggagactggccctatttggatggtcactcatggatgaagaccatggggcgccagcagcatcagcatcgccaaggccaagcaagaaagaggatagtttcagggagctccctggctcatgagccactttgagctccactggggcctggctgagttgtgtgtgctggagcgggaaaggttcccgaaatgactgagccaggatggaaagacagggtaccaccacactatagccactccagggtctgcaagtggccagcagtgctctgtcctgcaaggccagcctggcctgtgacaaagctttacaggaaagagaactgaacagaagtgtgtgtgtgtgtgtgtgtgtgtgtgtgtgtgtctttattagtaacatggatccagcctctactccagaagagtgtgtgtgcgtgtgtgtgtgtgtctttattagtaacatggatccagcctttactccagaacagtgtgtgcatgcgtgtgtgtgtgtgcgtgtctttattagtaayatggatccagcctctactccagaagagtgtgtgcgtgtgtgtgtgtgtgtgtgtgtgtctttattagtaacatggatccagcctctactccaggtacctgtatcaatagaattgcattgtcctttttagagtcccctcctgaagaatttttgcatcttgccttattttcttactaaaggagttgtgtgcagaygccctctttcttttcattttggaaatctgaagggattcaggacagtacccagttcttactaatctccccttggcgattggctgaatctctgcccagaaataagttgcatgtccttaggttacatttgcygtgcagaaaataggcacataagcactctatattaggtctcagaattttaaaattagttttctctattataaaattgcagatattcagtatgcagattttagaaatacaaaaaattkgccaagtgcggtggttcacgcctgtaatcctagctcttagggaggcagaggcaggaggatagcttgagcccaggtgttcgagacctgcctgggcaatacggtgagaccctgttctcaaaaataaaaaatagtaaacaaacaaacaaaaaaccttatattggaaaagcacagctggagataccgttaacactttgttttatacacttctaagcttttctctatgcaaacctgtgtgtttaaaaaagctctacttccaggggttaagaaaagaaaaaaaaattaaaaaaaaamataaacaaaattgatcaattgatagaacaatcagtggatagatagataggagcataggcagctctgtggcctgtcttcctatggcactttcttactaaacttctagaatgtgatcattgcacactgcataccataacactgtgtgattcatatatatgcatattttttgtaatgagagaattaggcctttttagaattaccagtcatctgcattgggatgggatgcatagcttagactttcctttgtggccttctgagttctctgatgcacttttctcataggaacgcmccatgtgtctggtgggaagatgctcagtgctctggagtccacggtgcctcccagccagcctccacctgtgggcacctcrgccatccacatgagcctgcttgagatgaggcggagygtggcggaactcaggctccagctccagcagatgcggcagctccaggtattcctcatgcacgkyggcctctgtctcggttgccctgagctcttcctaccttccttttcctaggggctccgtgaagacctagagaatgtagaaccatagaaacagcatggcttcctctctcacacacacaatccaagtytagagccttccactgcaactatagtcaatctataaccacttctttttttttttttttttttttttttttttttttttttgagacgtagtctcgctttgtcccccaggctggagtgcagtggcgcgatctcggctcactgcaagctccgyctcccgggttcacgccattctcctgcctcagcctcccgagtagctggaactacaggcgcccgccaccacgcccggctaattttttctatgttttagtagagacggggtttcaccgtgttagccaggatggtctcgatctcctgacctcgtgatccacctgcctcgrcctcccaaagtgctgggattacagtcttgagccaccgcgtcyggcctacaaccacttctttaagctgtgcgtacttttacgcaggaagagactctagggcatttgtttttggagaagagccgaaaggagaggggccacggggagcatgccgacagccagtgaaggctgacttctgacagcttggaggctccatcctcctccacactgaacggggacaaaggtggatagtcagccaagctttttttttttttttttttttcattttttttgcaaggatctgtgatgtatttagaactatgagtttagaatagaagatgaattcataaggaaaaaaagccatcatggtgatttgttacgaaaaacatctgcatttcattcaratactgtgatccatccgttccttgctcttttccattgttaaggartatataaactctacgggaatcaggrtaagtgacccttcaggtcacgaatcttggtcaacaaatcccrtaaatctgccaaagcaraataagctgtctcctgggtaataaggaggtagagatgtgcatctctgcatgagaccacatatttgctctgtgcaccttctcccacctccctgccctggctggtaggttggtcgttgaggatacagtgctggcctaggctctrtacagatatcctccctgacttccagaagctcataatccaaatagtgctagaagatagggccaggtgtcatggctcatgcctgtaatcccagcactttgggaggacgaggcaggtggatgaygaggtcaggacttcaagaccagcctggccaatgtggtgaaaccccatttatactgaaaaaaaattagccaggcatggtggggtgtgcctstagtcccagctactagggaggctgagacttgagaatcacttgaatgtggaaggcagaggttgcatgagccaggatagcaccattgcactccagcctgggcaataraccaagactaygtctcaaaaaaaacaagataaatgtatccaggatcctggagcagccatggggatgcaacctcctgagccctttcctctaataggaaaaaggcttccaatcggttctgcttcttcagcacagcgacagcacaagccctaagttgtttaaccacctaatgaaagctaagaaaacaatttccccttgccctctgcctaccagaaaacacacagaaaggcagctggtttgagagacctgccccaaggccccagcatggatcatgasggttgctagaagagtgagggctctgatctccaaaggctactctgtctcttaggcaacatcccagataccttgaacatctgatgcaaattcatttaaatctcctagtgaatctcatcgtctgtgatggccccatcctttgcattagcttcctctcgctttgcaattttaaagacacattgcaatgaaatgaagtgtacgggttgggctgggttgtgtcagggggtgacaaagtcacatgtcttcagtgtccgggcagtaacagcaagtgaaatggaggagagaccacagtaaattggcccctttaaaggatagtagccactcagttccaactggctcttaacctgatagaataagtatccagtgtttctagatgtttcaatatttcaagcaaatctggagacacaggttttatatgaattaccgccatttaaaaatgttggaaagtaattgaaaactaattactgagtactctgcaggccaaaggacacaattgcagttcagagggggcctatcggctcccaagttcgttcttacctggggctcstggaggtcaagcccttcccttcactgctcctgccttttggcaccatctgctggccatttcgaaattgttacctcctcattgcgccctttaagaaaaacatacrtatcatttgtatggaagtacctaactgctctcaaaagtgagcatttgttggtttggggacagggatggaattgctttagcataaatgccgcacttcccctgggaatttcacaggcgttagaggtgaatttgataccaaggctctcttgatgtctgtagctacagcgtcaccccatcagtggctggsgtagtttggtcctctggccggctgggagggatctctcacacttgtctcgccttgcaacccttgaactgtgcagctttgtgaaaaagagcagttttcttaaacaaagaaggtctttggtcaaggtctaggaatgctgtgttaaccacacaagtttctttattgytccagaactactcaacttttctggctttctgggaataaagaacagtgagcaaatgtgcttttgagcctgggaagttgggcagttctaaagcgcagactcgcagggaaaaataagcatggtgtttcctaacctggctgttactgtttctrcctctgcatttgtattccctgggtcccattcagctttcctccccatcaaacttctgtcttttcaatcgagggagtctacttaagacaaaaacagcttagaataattaagctatctcggcaccaattctccttcaacatgtgcggtattatataccaaaaatgaactgcagccgcacagtggctctaagtccaataatggagctatcattagagatatacgaaacactagactagtctcaaaagaacaaaaattgaatyagaaattcaaatrttctttgaactgtgttataaaatagtgaaactgaataaaaccatttgtgcttggcagccagctccagtaattagataattaaatcattggaaaatcctagactgtagagcatatcctatttgagcatttcattttcaaaactgatggattattctcaggaatagaaatttgttgcagacacaatggggtgggtagatttcaatgggacaaggggaacctaagcagaagatcaaggaaaccactaaaagcttgttcatgttatcttctgctctccaatttcacaggagttatcrgtctaagagtggttctcaatcctggctactcattagaattatttgaaacccttagcaaaaataccagtgctcaggcacgatggccagagtctgacttcactggcacggactggaggctaggcactggtgactctagaacattccagggtaaaaactactgtttttacctcttggctacaggtaatatgaatgcttagtccatgaagacacctcctggaaatgttgagatagccagctattaccaatgacttaaagccttgacttcaaacaatgcacctcattcccagtggctaatctagtatgttctctgctagctacatttggtatgagagctatatggaacctttatagtgtgatattcccattcccarataacggttgggtctgtaattagctagcaacaatgggaaagggttttgtcaaggttttgtrcctaacagatgttctcctccaatgatgattaygtttgcctgttacctttcctgatatcattttgaaaaaaagcccactttttctaaataatgaacatctttttcccaaaatgccacagtacttgsattttaccaaagtcatcccatatctacagaagtgactgcacttcttyccctccttgtgggtggctgaggagagagagagaagcttctggaagagatggtacaggttctgtggaggccagataggcttggcataaagagaggatggcgacctcctacttctttcatccccaatctctttattctgcttcctgataaataaaaaattgggttgttcattacatttgtaggactcctgagaatttactgtcccttcccaagagaaggaggaggtaaaatatcaacataaaaaataaacacagtagtgcatagagccctatgtatttgaaatgatacaattcaatacaatttccttaatgtgtctttttatgagatggcgcctcgtggaaatgtgccagggtctcatttatcttctgacatgcataacaatggtcacgggaatgcggatccctgagaacagcatattggagtttcccatgtgcaacagacccgtgtcccctgccaagcaraaataataaacggaactagtacagggcttgacgaytaggctgcttacaatgtrccaagstctagtcagatcttcagacaacaagaagctttctaagatggggagacagcaccccaataacatgggttatatagctgtgaccaggcatcccttgtcttgttccctgaagcctgcaggaacrgatccaggtgggatcaggagtcgttctgaggtctggctttcctyctgaatctttctgatttgtggtataaccactgttccatgtcactgctagacagcaaaatcagtccaattacattatccattgttggcaagacygatagtcttagattttacctaagaaatcaaaattgagtatgtgagatataggtccattttcaggtkggkggaattaggtttaggcatttgctagtttctccatgaagtgatttggataacttatttggtccaattaaaattttaatggacaagagcattatttctgtctcttattttacaagagtgcttataaaaatggcaaagcattttcaataaattatctttctagctatgaggaataactgcaactctacttgccctcccactgtgggcaactagaaaactgaaaaataagcaaatgtatgaaacaaatgttttcagaaattaaacaacacaggaccgtaatccttaggagaatggggggaaaaaacctacagttgacccagctttctgtctggaggcacttttcagatcttggtgcaggaaggaaaaacccaagcatggcactgacagtgagttgaggagataagaccaaagtttagagagakctgaaacagctagaactggtggactggagaaccaaacacaagaaagctctgcagagaaagaagtacatcaataaatgggtctgttattaaatattaagccaagcatgtacagtgtgaaagcaaccgctaagccaggcagaaactaagtcgggggctgtaagccaaaaagttcccgaagttcacacaggcctgggagatgttcacgttttgaaaagcaaaaagcgaagaggccttgttgagcacctgggcattttgtagagatcggagaaggactgtgcctcagtcttaggactaaactagccccagaggaargactacccttgatttaacctaactgcttaaaaataagcctttaaaggacaaagctgatccacaagtaactggactgtctgccagagaaagtcsaaaatctgtaaaggaaaacaacaaaattcagagctccatgcccaatatccactcaaaaattactagacatgtgatgatgctgacaaatgtgacctataacattaagaaaaatttgtcaagagaaaccaaccagacatggcagggataatgaaatcagcagcaaggacttcaaaacagctattataattattctcaaggatttaaaggaagacatgaacataatgaggaaagaaatggaagatataaaaaatatccaagtggagctttcaagagctgaaaaacaatatccaaatgtgcttaacagaagattaatcactgcccaaaatgtcagtcaccctaaaaacagcaatggaaactgttcaaactgaagtatagagagacaagagactaaagaaaatgaattaaaatgtagtgaccagtgagacaatattaataaaagatgaagtggaargagaaaaatattcaaaaaggtaatgactgaattttttccaaatttgatgaaagctgtaaatccacagaccaaaaaagctcagtgaacccctagaatggtaagcacaatggaaattgcaccaaagcacatggtagtcaaattgctaaaaaccagagataaatggaaaaatcttcaaagcagctgggggtggagagaaaacccattacatacaggaatcacaattaagaattaatgccaacttctcatcagaaacaaaaggcaagtcaggacacagtggaatgacgtctttaaagtattgaaaggaagaaaagtctttcagaaaacagagaatacttcctaactcattttatgaagcctgcattaccctaagagcaaaaccagacaaaaatattataagggaagaaaaccacaaaccaatatccctcacgaaaatatatgtaacaaatccttaacaaaacrttagtaactgaatccagcaatatataaaaagaataatacattatcctggggttttattccaggaatgcaagattgttttaatacgaaaaaaatcaacgtatttgaccttattaacagaaaaatcgtatttcaataaatgcagaaaaagcatgtaacaaaatttagcatcaatgataaaaacagcgctctagaagtagaaggaagcttccttaccttgataaacaatgtttgtgaatgacctacagaaaacatagttaatggtgaaacactaaacacattccccataaaatcaggagcaaggccaagaaacctactctgacatctgtttaacactgtactgaagattgtagcaagttcagtatggctagagaaagaaatagagtcacacaaatcgaaatgtaaaatgtctaattggctttactcacaaatgacatgattatatatgtgtaacattaaatggaatctacaaaacatgctactagaaataagtgacttgagcaagatcacaagaatcaagtcaatgtacacaaatattaaaattttgttatatccatttgtacaatgaaatgccacttagcaataaaagaatgaatcactgaaaaactcagcaacagggctggatctcagaaaaacatattctgaacaaaataagctggacacaaaggagcacatgttatataattccatttttataacgttctagaacacaaagaactcatctataatgacagaaagcagagtggtggtttctttgggctggggcttggggattgattgtaaaaggtctcaaaggaattttttaggatgataaaatatatagctgtctttcagcagtggttacatcagtgtatacatttgtcaaaattcatcgaacggtgcacttaagatggatatgttttattgtctgtaaactttgtgcctcaagacagttgattttaactattgaaatgtaggtatcacctcttaagcaaaaaccaacttaacaatttgagcttccaaaaagtaatttacttgaagcatttagagaaagatggtgatccacatcatatctttagcacttttttacactgtgctcagataagcaggaactgtcctgcagcctggagacagtggcaagaacaccagacagggagggcagggggactgggaaagcagacagagaacctatgtagaccttgttcattcatgattcactcctcattgcccacgtgccagccggtgagctatgacagcttccctctttagtaccctcagcaggatcctgtaaggccccgctttctagacaggaggataataaagcctagrattgaaacagagcctctccctctcctcctcttctagtggagtaagtctagttgtgtttaaacattatgccccgttgtattttccaatatttcttatccttctcagaaacgttatattgygattcattcatagagcaaatacagttgccccttgaacaacatgggggttggggtgctgacccctcatgcagtaagaaatccataacttttggctcccccaaacttaactactaatagcctactgttgagtggaagccttaccaataatataaacagttgattaacacatattttgtatgttgtacatattatatactatatttgtttttttcacatgcctgctgtgtcaaatatatactgtattctgacaataaagtaagttgaagaaaagaaaatgttattaagaaaatcataagaaagggaaaatcataatattcattaagtggaagtggatcattataaaggtcttcatcctcattgtcttctcattgaatagattgaggaagagaaggggttggtcttgctgtctcaggggtggcagaagaggaaggaaatctacatataagtggacccatgcatgcagttctaacctgtgttgttcaagtgtcaactgtatatgttgggtacctaccatgtgccacacgctgcttgtagctgtgaacaaaatggcatgctccctgccttgatagaagaacaacttggggtggtggggaaattgatgarttgaattcagaagacctggttctaatcctaactgtgctctctaattgccgagcacaccctgagcatgtcctttgacttctcaggkcctcacttttcccacctttcaattttatgaattttaaatattccaccaataatttctagcatgatatccattgttaatatccactatctaaccagaccccagatttacgtaagcttgttttaaaatttgggcaggagggttaggtgccctgctgtgccccatagctcatggcacagtgacatcatctgtctattcaaaagcccttttcttagtccatgaaatcatccttggtggcaaatcgaatcatatgaggagttttagaaattcccaacaaccagacggtacctcagaccagtaaaatgagaatctctcagttgggacccaggcattggtcactcttagacccatttaattatctactcattttcccctcacaaccctgtcatcactcattcccgcccccttcaaaggcaggagctctgtgggattggacacagrgactgaagttgagcaaatcatcttgatagcacgtggctttgctgtgtgtggttaatcaaccgatatgaacagtgctgacctgtagccctgccacatccccgcagtgagagcaagacaaggcacaggagagctgatcccaacacatatytaagcccatgggtcacagcaggtttcaaccatttagagaagaattttggattcttcattgttgcctgttcttatcaatgttactgattcattcagttcattcattcaacagatgtattttcagttttctgctaatatgccagacacagtgtaccagagactctgtggagggcagaaattaaccaggtggagggaagagcattctgggagatgggaatagcaggtgcaaaggcctggcaaataggagtctggcggaggttgcagtgagctgcgatcacaccactgcactccaccctgggcracagagtgagactctgtctcaaaaaaaaaaaaaaaaaaargaggagcctggcccctatgaagaactgaaatgatgtatggcttgagcaragtgccaggtgcatggagggagggagattagccacaagggaagcgaccagattgcccagcgcctggagaatgggctgcagccagagagagcataggaggatgttgttctctgtacactgtctctaaaaatggtgctttttggctgggcacggtggctcatgcctgtaatcccagcactttggaaggctgcggcgggcagatcacttgcggtcaggagttcgagacctgcctgatgatcatggagaaaccccatctctactaaaaattcaaaattagccgggtgtggtggtgtggtgggcacctgtaatsccagctacttgggaggctgaggcagaagaatcgtttgaacccgggaggcagaggttgcagtgaactgagatcgtgccattgcactccagcctgggcaacaagagtgaaactccatctcaaaaaaaacaaacaagcaaaaaaatgatgccttttagcaaaatagtgactgactggcttttaakaccacaataaaaagacattagcaaaagtggtgtgagagcatgatcatgagtcctgtagagaaagtaaccaaaagtgatacatttctatgtggttccctcccagacaaaatgccaggctccacccactagttcaccctccctgttagcaatggctggtacgtgttcaggtttagattggtgccagacactttattttattgtctcaccgagtctccatgaccaacytacgagctatgagatattactaccccttttttggatagacacagaggtgaatagcttgcccatggacacacatctactaagtggtaaaactggaaatcgaacccaggcagtctttccccagaggccagttcatcaccatgcagtgctgatgttgggacctaatggtggttctgcttgtggcctgtgttgaaatrttttatctttattcagagaaaacagaaggcatgatgtggctttaagcaggtggtgacatggtcagattgcatttcccctcaatttacatggataatggacagttgacaaagacatcatcacccccatgagatgataaaccagtccatgaaaccggaaaacaggaaaccattgaaatttgttaaatgatatttcagtggaactttggggataatatactaggcataatatcattattgtgatggaggctgattgagtgaattcactcgatggagctgctgttagaaaattgtcctgctccagggactcaagtgctcaaccagactcctgcgaagcctgaataaagctcccacctcctatattctctgggatgagaaacaagaatgttctcggaactgtttggaaattgtgagttctgtatacaggtagcctacctccaatctagagaaattcataaattgccaaaagccctggactcatccagaatcattatcattgccaacattaaagtcctatgttttaagcatctgtgatttcatggtacttggtacatggaaccatgtgaacgaaaaggacacagatcctctttgaactgatactgacrtatttcatagccaaatcaccacgtgttgagttcccattctacaccatgcggtatttcatgtaaccctcaagaatggccaaggaaagtggattccccatcattagaggtaaggaaatgaagaccaagggagtctaaataatgggcccaaagtctcacagtgggctagagagagagtatgggattagacccaaagtcttcttggctccaaagcaggtgccctgtgctgctccctctaaagatacatcagtgagagtttacgcctgttgtccatgatgcattgaccagagtagaaaaaggatcctttgtcttgcaggcagtctggttgccagttggctgccaaaattcagatgttggtggaagaagccacattatgtacagtctttgctccctttcctttctcattgaaataagtaaagattcagccgcagggctgtctacccaaagtgctccgaagacttcaaggyattcactcgcctccatttcaggcaggcagagcccactgagkttgatttttttgtgttcacagctgcagaaccaggagttgctgagggcaatgatgaagaaggcygagctggaaatcagtggcaaagtgatggaaacaatgaagagactggaggatcccgtgcagcgacagcgcgtcctagtggagcaagagagacaaaaatatcttcatgaggaagagaagatcgtcaagaagttgtggtgagtgccagtcacttgcatgttgagctgtttcacctgcaaaggaaaattatcattactaagaaggaggtccttcccagttggtggtcttgccctctctttattgagcacctactgtgtaaaagttagagttctgctgatgctggtatatgtggacacttcagcacctgtccatggaggcccaggaaattcagtggccctcaggtgactgaatttctttaaaagttgcggcattgctgggcatggtagttcacacctgtagtcccagttactcatgaggctgaggcgggaggattgcttgagtccaggagttcgagaccagcctgggtaacacagggagatcctgtctcttaaaaaaaaaaaaaaaacagagagagttgcagcttcatactctcctccagggctcagcaacacacaaaattaaaaggagtaaatggcaaaacccaatggcaaataggaagcctatatttcatctcaataaattaaaactaatggccaaaataacacagctctaaaattatcttcctattattcaactgtagttaaaattgcaaaagaagaatttaaatgtaaaatgtatctgatccagaatgaaaaatgcttccttagctgttatgaatgttatttaaggttcttattgaaagcatctatcaagtcctactattgaaatgagcagaattttattactcccccrtcaccaggcaggcacatcttttatggtaattgtatgttttggtatgcaatgaagatttatcatagaactatctcaccttttagtataatgaatagtaattttgaggggtttctccagtgttgataattctcttgtttcttggaaaacttaaatctttcaaatggggattgtaagggagcagtttgcaaactcttctcatggccataatgagaaaagatttccatgatggaaagcattgtgctcagtcacctatctcctattggagctgtggctcgtgtcgccctggatgccaacctaatgtgtttgattaaaattagagtgtccctctcagcagtctagagggaaaaaaacatcaatttgagttattcttttcctaataaattaaattaggctgctgttcatccatatctcaaaatagcttccaaaattctrcttagttcacacatttatagacagagttaatcacccaccatgagttggtaaggctgttatttgtctgaaatgtctttgtgacagcccaattatctaaaactaggtctccagtttcttctttaaaacttcttttaaaatgcatatcctggctgggcacggaggctcatacctgtaatcccagcactttgggaggccgaggcagccagatcacctgaggtcaggagttcgagaccagcctggccaacatggcaaaaccccgtctctactaaaaatacaaaaaaaatagctggccattgtggtgtgtgcctgtagtcccagctactcaggaggctgaggcaagagaattgcttgaacccgggaggggaaggttgtggtgagccgagattgcaccactgcactmcagcctgggcaacagagcacaactccgtctcaaaaaataatagtaaaaataaaaataaaaatatatatccttttaaaaacatttatataaattttccaataaaattatgaaaaaaaatttttttgagttggagtcttgctctgttgcccaggctggagtgcagtggcatgatctcggctcactgcaacctccaactcctgggttcaagcctattctcctatgtcagcctcccgagtagctgggattacaggtgcacaccatgatgcccagctaatttttgtatttttagtaaagacggcgtttcaccatattggtcaggctggtctcaaactcctgacctcaggtgatccacctgcctcagcctcccaaagtgttgggattacaggcatgagccaccacgcccggccagtaaatttcttctttttaaaaattgtgtttattggttagctgagataattctcacttctggcctagaaaagccatctttaatctcaataatactctgagattacagcctagcataggaatgagacagaaaaggtagtggaacgaacatatcataagagggctttatckggttggatttgtgggaaggccacagatgagtaaaagaggcaaagagcccttgaggatcttcagtctagcaaaggcaacctgatawataggagtatagccccgaacaggggatttacaggtaccagttgtacccacacaaaagagagactaacccagggatcaggaagacttaacctgaatgaagtcattctttgtatgacccacaggccacaaacagtatcttgcacatagtagtttcagaaatggtttgttaggctgggcacaatggttcatgcctatagtcccagcagtttgggaggctgaggtgggagaatcrcttgggaccaggaattcaagaacaggctgggcaatatagcaggaccctgtctctactaaaaataaaaaattagccagctgtggtggcatgcctctgtagtctcagctactcaggaggctgaagcaggaggatcgtttgagcccaggagttcaargctgcagtgagctatgactgcacctctgcattccagcatggatatcagagcaagactcaatctctaaaacaagaaagaagaaagaaagaaatggtttgttaaactcaactgaggtggccttgaagatggggagattgcatcagcagaggctagagatggaaggacttccaggcagtagaaccctgcaaaccaacaagtttctggcctggaaaatgcaagatgtctttagagaactggggagcagtccagttaggcagcagagttgggtgcaagatactaataacatcccatatttggggagtgtcattcccatttgcacactgacttcctgtatcttagaccatactcaggcctcacatacctgcttgatgcctgtctgggctgtgcctacagagattggaagattctgtaagagaaacctggatttctggcttttcttgaaagttccggggttcaaccccagattmacaatttctgtggatggggcttaggaatctgcagtttacaaacaaagccggtgattctgaagcactttcacatttgagagttactgcctagaatgatgaggaagacactgagtgtttgggtttgtttggtttttgtttttgatcaaggaagtagcaaagctagagctgtattggagagaggtccctctggtgatcatgtgcvggactgattragaggaaaatagatcagtgactaggagaccatatgggaagctactgtatcygtcaggcaaaaggcagtgaggcctgaaccacatagtagaagtaagaaagaagtcaaatgcaaaaygtcctatggtattcaccgtctaagactagctctcaaaattcttctttaaaacaccttttgaaatatatatccttttggctgggtgcagtggctcatgcctgtaaccccagcactttgggaggctgaggtgggaagatcgcttgagcccaggaattcaagaccagcctgggcaacgcaggaacacagggacacccaatgtctacaaaataaaaattaaaattaaaaataaaccctagccgatcatggtggcacacacctgtggtcccagctactcaggaagctgaggtaggagcatggcttgagcctggcgggtcaaggctgcacgatcacaccactgcaccccagcctgggtaacagagcaaaaccctgttaaaaaaaaaaaaaaaactaaaaatatctatatacatatatatccttttaataatggtagtgtaaattttccttccataaggtataaagtaggttaactgattggatggctagatctgaatggcaagacagcaggttataaaagacagctgsaaatagctagaagagaagaactagaatgtttctagcatgaagaaaagacaaatatttaaggtgacggatatcccaagtacactgatttgatctgtacaaattatatgtactaaattatcacatgtaccccaaaactcacatctattatgcgtcgatttttaaaaagagcttattttttaaaagccagaaatttcaactctggaatatcagaacagtgatatccctctttccttcccctctccctcctcgttctccttttygttcttctccttcttcttcttccaagtactagaatataagtctccttgtggagcatgttaggwtgaattactggtgagccattcagaaggcagagagaagaaacttgggcctaaaactrtgaagagatgggctgggcacagtgattcacacctataatcccagcactttgggaggccaaggtgggtagatcacttgaggtcaggagttagagaccagtctggccaacatggcgaatccctatctctactgaaaatacaaaaattagctgggcatggtggcgggcacctgtaatcccagctactcagcaggctgaggcaagagaatcacttgaacccgggagacggaggttgcagtaagctaagatcaggccactgcactccagcctgggtgacaragagagactgtctaaaaataaaaaaataaaactatgaaaagaaattgggtctagataatttctacatgaaaataataattggtcttctaataacagtcaagtgaaatacattccaacaaactgcatgcttctttttaacaaagctaggatgaaaagccacttaaacaaatagaatgctgtaaactgtgacgtctatgaatatctgacattctgtggagcaaagctgatattttaaaagtcatattgattaccatgtcaaaaatttatttccagcattcattttagccccatgtctctgttacatttttgaatgaacaaatttgatttttaatgttttatctaaagtaggtatcataaacgtttgcatagaagtgatattgttgtgtacaattgtatcaatatacatttctgtatattccataaagctgtgaagtttaagcgtctccgtatgcaaggttgtgaaatccaagaggcatattgtatagaagagatcaaaacagaattctaggcagactgactttgagtcagatgacagctccttgaagtattaattacgcactgacagacatgttggttgttcacggaaccaggaaaatatttggtccttagctcttccagcaaagctttgcaggactggaccctgtgtccagtcaatacagggaagtcattctgtttggttgtgcaatagaaaagaacttttccacacgaagttaccatatttatttagagcccttcagtgaggtggcacaatctcttcgtgtcaagaatccaatagctgtaggaagtttcccgtgggtgtgttcacagaacactgggcccctttccatagttcacagacgtggacaatgagcagatgaggctttctccctctggtcctgaagtrgcatcatttcatctgaaatggccacaagcaattttggtttatttttcataacagaatcaaagacatcaccaaaaactccatcccacttcttgcaggggaggaatttgttattttcccttggatcctgttgaacacatgtggcatcctgcctgaacccctcccgcagctgccatgcgatccagagctccatccacttgcccacctaagtggaaagggccttcgagggccatcagtttgcagacgacactgtgcattcctttttctctttcggacgctggctccacaatccgggctccaggaggtggaatcgctgttcacttactgccccctagtggtccgcatttctgaaagttctttatccctgtttcctttgagatttttctccgtagatttataggtgtttaggatggggttagtaatgtggccaaggaggtggttgttttctcaagggtgagacctcgtctccgatctccgtctcttggagctagcattcccctctatccacagacaccacgtctgtcgtcatttttattttctgcaatcatttcttctcttggtagcttggagaagarttcatccttgttgatragacaatcagtataaaccagaggttctcatttaggggcaattttgctcccccttccccagggacattggacaatgtctgggtctggagacattctggtttgtcacaagmtggggtaggcaargtttctactggcatccagtagatgaaggccaggggcgctgctaaacatcgtaccgtgcagtttccccacaccacagcgaagaattacacagcccaaaatgtcaaatgctgaagttgaaaagcctgatattaaccactgkgggcttcttgttttactgcaccgcaggtcggtctccctctctctctctttctctctttctccctctctctcctaccccaccctcccacctatccctccttctgtccctctgttggcatcagcaccactgaataaaaagactcggtcctctgttagccaggcacaatcgtccctttggccaatgtrgaacattccctggaaaaccctccttgtacctgcctcacaccactgcaaaatgttcccagccactgttaaaagatgagcgacccccctccaccaccaccacacgaaaggcaggggggaggagctggggctctacacaaaatcagaggctgagacgggcactcggcccctcctcttcctctgtgaggcctcgtgttcagctctawgtgctggtgtccttgctcccgcagcgagttggaagactttgttgaagacttgaagaaggactccacggcagccagccgattggttactctgaaagacgtggaagacggggctttcctcctgcgtcaagtgggagaggctgtagctaccctgaaaggtaaactttctgctgggtcgggggaggagtytgagctgtctttcctgcggtgtttaaaaatctgccacatagaggattcattcatgtatgcaagtatttattaaacgtctacatgtgccaggcattgttctggacacttgggataccccacagcacaaagtaggtgcacatccccctcttcttggagctggtattagagtgggtgctgtaagatttcacactaaatgattccagtaacactttctatttgctaggctcttacagtgcaccgggatgcatgtgccaaacccgttaaaaacacaaggtgggaggatcacttgatcccaggagttcaagaccagcctgggcaatatagagagactcacatctctaccaaaaaaaaaaaaaaaaaaaaatawatatatatatatatatatatatatacacacacacacaaaaaaaaattagccaggtgtggtggtgcatgcctgtggtaccagctacttaggaggctgaggtrgtaggatctcttgagcctgtgaggtcaaggctatggtgagccaccattgcaccactgcactccagcctggcagcctgggtggcaragtgagaccctgtctccaaaaaataaaaataaaaamcaaaaaataaaaaattaaattaaattaaaaacctgtaaccaggcacggtggctcacgcctgcaatcctagcactttgggaggccaaggcaggaaaatcgcctgaggccaggagttcaagaccagcctaggaaacataacaaaaccccatctctaaaaaaaaaaaaaaagttttkttttttttttttttctggccaggcgtagtggctcatgccactttgggaggctgaggcgggcagatcacttgaggtcaggagttcgaaaccagcctagccaacagagtaaaaccctgtctgtactaaaaatacaaaaattagctgggcatggtggcacaaacctgtagtcccagctactcagctgaggcaggagaattacttgaacccaggaggcggaggttacagtaagccaagatcatgccactgcactccagcctgggtgacagagggagactccatctcaaaaaaagaaaaaaaaagttgaattagctgggcatggtggtgtgcagcacctaaatagtcccagctatccaggaagctgaggcaggaggatcgcttgagcccaggtgtttgaggctccagtgagctctgatcatgccactgcactccagcctggatgacagagtgagaccctgtcagccagtcaaattaaaaagtaataataataaccctaatggtcaattggctttatcccaaatacacagacaggaaacaggcctagaggagctttacccttgcccaaggtgagtttctccaatgctcctctgtgctcttaacccactgccacctgaagatgtgtgagccacyctgtggcttgtgaactctgcacttctctgtccagtatcggagtgcgggatgagggttgtmgttctggctttttctcctccaattcacctgctggtttgggcctgcaggagaatttccaaccttacaaaacaagatgcgagccatcctgcgcatagaagtggaggccgtgcggtttctgaaggaggagccacacaagctggacagtctcctgaagcgtgtgcgcagcatgacagacgtcctgaccatgctgcggaggtgaccgggccctcatcgtgctgggggtggcctgcggaggggtgcactgggaaaccgagagtggacgtttgggacttcagccttccaccatgctcccaggacacatccagtgtcctgaggaaaagccccaagtccttctcacccttgaacttttattgcaatatggcttgaggttctaattcttcaacacaggattgctaggtggagcccatcctagggtttaaaattaatagacacagtaaacattgttttaaaatcatctgaaaggccaggtgtggtggccactcaggaggtacaggcagaaggatcccttgagcccaggagtatgaggctgcagtgagctatgactgagccactgcactccagcctgggcaacagagaaagactccatttcttttaaaaaaatcatcggaaggtgggttttttaaaataacattttgaagttgaaaaattgattgaaatagtttattagcctccttcacttcaggggcatagatgaattcagttcaaagaaatgtaatagaagtaaacaaagtctttcttaaatgacctcctgaaggagtatctgtgagactgttggtcccacctagaaaagaggaacaaagcattttgagtggcctgggccaggcttccttaccaaaggtaaacctgctcaccgaagaggtcacagtggagtaaagaccaaaagacattcaggaatttcactgcaaagaaaattccaggactccacactcactgaaaacacatatgcatgcaaaatttgtgttgccagaagtaccttcactggccargcacagtggctcacacctgtcatccccgcactttgggagctgaggtgggtggatcacttgaggtcaggagttggagactagcctggccaacatagtgaattcccataggtattacaggcggtggcgtgcctgtaatcccagctacttgggaggctgagggaggagaattacttgaacccaggaggtggaggctacagtgagccgaggttgtgccactgcactccagcctgggagacagagcatgaagtcagcttcatggagatgattattgaaaatgggaaagatcactgggtgcagtggcacgtgctcgtaatcccagctactcaggaggctgagatgggaggatcacttaggccaggagttcaaggctgcagtgagctatgatcacaccactgcactccagcctgggtgacagagcaagaccccatctctacaaaaaattattttaaaaattagccaggaagggtggtatacacctgtagtcccagctacttaggaggctgaggcaggaagatctcttgaacgtaagagtttgaggctgcagtggsctaggattgagccactgcactccagcctgggcaacagagcgaggccctgtttcttaaaagaaaagaaaatggaagagatggttgaggcagaatgatagggaaaggagagaacaaatccttggggatctctaagaatctaagggattggggtaaaaaaagaaacagcaaaagaaagagcactgagtagcagaagagttatagaatgcaatgtcttttttcaaataaaaaaaagyaayataataaaaaggggatgagggactaactaaaaattagaggtcaagtaccatgtttgacattgcctcacacataactttacaatgttaatgttagtcctaacgacaggtcctgaggaagtcattatcatcaccatcgtcatccccatcttcatcactccattttatgcaaaagcacctgaggcttaaagaggcgaagttctcaacgttatataaagcatgaactaactgctattcaaacacagatctgacaccagacactctgtcttttccactacatcatgggtggggagggacatatagcttcaaatgactccaaacaccagaggaagttgaggaataaacacgaccgttagatttcgagtcactgtgtaccttgtggcaagacttsgttgaatccaggtggggaagccagtgagcaacaggttgagatasagaagagcaaacagaaggaattagaatgtgggcggcccacccaagatgcttggcagtgaaaggaggagggaataagcaaacttttggcttagaactaagcatatttgagggctgcataggccagaatcaggcggaggagttagagaggctgctgttagactcatgattcattttcttctacccaccccccaaacaatgatggagttgcaagggtctgagcacawctgcaccagcagaaagggatatgtctatacatgtccctaagcrgctactctgagctttgggatgtgtgactctcacctggctttgggatgacatagcctgcaagtataccaccatgagaaagtgacatgagggttaatgccgctgtgcatggtttctcctagacatgtcactgatgggctcctgaaaggcacsgacgcagcccaagccgcacagtacatggctatggaaaaggccacrgccgcagaagtcctgaagagtcaggaggaggcagcccacacctccggccagcccttccacagcacaggtgcccctggcgatgcgaagtcggaagtggtgmctttgtccggcatgatggttcgccacrcgcagagctcccctgtggtcatccagccctcccagcactccgtggccctgctgaaccctgctcagaacttgcctcacgtggccagctccccagccgtcccccaggaagcaacctccactctgcagatgtcgcaggctccgcagtccccacagatacccatgaatgggtctgccatgcagagcttgttcattgargaaatccacagtgtgagtgccaagaacagggcagtgtctatcgaggtagagtcctatttctgtttctcataaccccataaaggagtctratacatggacctttcccttaaagcatttataggtcagatgatgacatgattgtgtatggatcagagacagggttttggaagtggaagtgggattcagtggccaggttaagagataggtcatgtggtttcagagaagggtgagacacctggcctgtaggaaggtgagacacctggcctgtaggaaggtgagacacctggcctgtaggaaggtgagacagcagtgtgctggtaaatgtttaacaaccagctctctggtagcggttgtggcggcggggtgggggggcagagtgggtgcgtgcagatctgtgtgtggcatttgccaatttccatggtgtaaatatcgcaaccatggctgatttcaagttatgacatgacaccactactgctgaagttgggagaaatgtracaatcagctctcctgggccaggacaagccggcttcaagcactccactgaggtgaaggcagcctggggagggtctgccacwcatctagatgataagtggaacctggttagcatgggagggtggtgagggcatcctargatactaaaatgctggatcaaagtctgggaccrtgactaagcctgtctaagtggaacaagaacgaggacctaagactggggaaatgggctggaaactgacttgagtgcttgaaaaacagtccatgatgtttggagtttatttggaaggtatcagagaaatgctgcagctctaatccgtgattttttttaaatggcatcttctggaaattaatctagaaacaacrtacagaattgattgaggtggtgggtctagaattaagagagctggatgagaaattactatagtcatctaagaatgaacggtagagcagtcagaatgaaaagagaaaactaggtcttaagaccaaatgacatgaggccatgtgtggtggctcacacctgtaataccagcactttgggaggccgaggcgggtcgatcactggaacatgagtgcaagactagcctgggcaacatgacaaagtcccaactctaccaaaaaaaatacaaaaattagctgggcatggtggcgcgtgcctgtagccccagctactcagggggttgaggtgggtggatcacccaggcccagggaggtcaaggcttcagtgagccaagatcacgccactgcactctagcctgggcgacagagtgagaccctgtcttaaaaatcataagatcaaatgacatattatgtttttaaatattctttttatcaagggctggtaccagtgctccgataacacatttgtcttttctacttcttttttcttcttgcctcgtaacttttcctccactcatttgctttatcacccaacaaccttgtcgtaaccctcctgcctctactgaaagtcaccagtggagaggtcaggttgggtatatcgagacgacctggcaaaactgccacagccacggtcgcagcctcggggcctctgaacactaggtggtttctctgtgtcgcaagggccctggcttgcctctaatcagagccagctattttaaaaacgcatatcacaagggtacagaaatgtgattgacagagtgtgattctattcccagtacctagtagggcaggggagggaaagacatttcctcctaagaaytggcagatccgtcacttaagacgtcttgccactttaaacatctcaacatttaaaggatgtcagtatgatggcactcttatttaacaaatctctgttgagaacctagtgggcatagttatcattgtgatgtgtgtattttacgctttgagaggagacacgagtcatctctgaaaatgccctgatccacaggtatggaggcctgggtttttctgccagctctgccactgacaaatggggtgagctttattcattcaacagagattactgagcctgttatgtaccaggccctcgtaggctcgggggaaagccagtgaacagaagagacaaagtctctgccctcaagacacttacctacttgtaggaagagacagaaaaaaagtatatgccaggtggtaataaatgctaggaagaaaaaataaaggagggttagaatggtgaaggtggtggctattatttatatgtaatgaaacwtgggcaamttctccatctcgctggacctcaaagttcccatatgttgattcaatgatctttgccaattcttaggttataaggttccactaatcttggtgtgaatttccactctgcccccttagaattattaatgtgctggttcaaaagtcacagaaaacattcttttaaaaagtatgcagatgttttaaaatgcattttatgtataactctctgttgtggaacttaaaggagtttacaggtcatctaaataatacctcctccctcattttataagtaggacaatgtgacccagagggcatatagcaattctttgatagaagtggtactaagacacaggatttttgttcttagtgttgtgggttttgtttgtttgcttggacatctcttctacaatgaaaactcaatttaaaaaaattttaggctgggcatggtggctcatgcctgtaatcccagcactttggattataggcatgagccaccatgcccagcctaattttttttttaattgagtgagactcatgtctcactcagggcagaaggattccttgaggcaggttgtttaagaccagcctgggcaacgtaacagaacccattgctacttaaaaaaaaaaaaaattagccatgtgtggtggctgaacatgtgtaatcctagttactcaggaggctgaggcaggaggattgcttaagcccagatgttggaggctgcagtgagctataatgacaccactgcactgcagcttggatgacagattgagaccctgcctctaaaaaaatacatcttggtagtagaaaaaatacttttaaaagcatcttttttaaagttcaggggtacaattgcaggtttgttgcataagtaaacatgtcatatgggtttgttgtgcagattatttcatcacccaggtcttaagcccagtacccattagttatttttcctgatcctctccttcctcccaccctccaccctctgagaggtcccagtgtccgttgttctcctctatgtgtccacgtaacttcctttacgtgctatattcctccagaaagcagaaaagaaatgggaggaaaaaaggcaaaatctggatcactataatgggaaagagtttgagaagctcctagaagaagctcaggccaatatcatgaagtcaataccaaatctggagatgccgccagccacaggcccactgccaaggggagatgccccagtggacaaggtggaactttcaggtaagttccggtcccacagcaggaatatatggaggtacatggctttgggcaaatacagtgccatccacgacagcacatactcatcaacagaaccaatgtctcagttcttacaaatcttacaaaatgtaaaacctggaagagcaaatcctctggtgttccttagatctttactactatctctctctttttgttttttttttttktttttttttttgtttttgaaatggggtcttgctctgccacccaggctggagtgtagtggtatgatcttagctcactataacttccaactactgggctcaagcaatcctcccacctcagcctcccaagaagtagctagggctgtagatgtgtacaccactgcacatgtctaatttttttttatttttttagagacaggtttcttcctctgttgccttggctggtctcgaacttctggcctcaagcaatcctcccaccttagcttccagagtagctagaattacaggcttgagccacacttgatttcactactactgttttatgctaaccacagtagagaagctgagttctgtgttaggattctagaataatggccaataaaggaaaatttaaattcatagtgtttgcgttttctatgcatttgtgatacttcacagcaagagctgggaaaatattaggcctgcatttaagacaagagcttttgcagaaagaaaatggtagcttttatgagctctcgggggatattagatcataaggcaaaattgcattttttaatcaaaattattagaatatgtatttaaccaactcaactatggaagttaaatgccaacatgtgaataataatataacttctaagaatctcaacctattaaatatcctatcagttacaagccacgcgtcttattctgatcttaaaattatggacccggatgttattttacttgcagtctaatgtctctgcagtgtcacattccacagtgccttatccagcaactaaaattaatttggaaaggaatccccatcttgacttgcatgttgagaaacattaaagtgtattccatttataaccaccgtacagtcatcccttggtatccatgggagattagttccaggactcccatyggataccaaaatctgaggacgttccagttcctggtataaaatggcatggtatttgcatgtaacctactcacatcctcccatatactttacgggccagaacacttcagcagtgtgattctgctgcctgcctccatatactttaaatcatctctacattacttatgatacctaatacaatgcctacacattacttcatttgtgtggattcaacatagtacttggcacaaggcaaattcaagttttattttttggaatgtggagggaatttatatatatatatatatttttccatctgcagttggttgaatccacagatgtggaacccatggatgcagaggaccaactgcacttgtctcctccccagttttcatccatttcatcccctaaagttccactcactgcatccctccccctcagtctgtgctaagaggcttttcttacacctttccccaccatccagctgtgtcaggtctgtctagggtcctgggcggggcggctcttctcacacaaagtgactttcctctcacagtccccgtggagaatttctgatggagaaaatgccctagctcatcacatttttttttttttttttgagactgagtctcactctgtcacccaggctggagtttagtggcatgatcttggctccctgcaacctccgcctcctgggttcaagcaattcttctccctcagcctcccaaatagctagcattacaggcacccaccaccacgcctagctaatttttgtatttttagtagagatgggtttcaccgtgttggccaggctgatctcgaactcctgacctcaggtgatccacctgcctcggtctcccatagtgctgggatttcaggcctgagtcaccggccagctcatcacatttttatcttgtgtaattctgttctctctgccccattattaattttgtcatagagtcctttgatgttttatataggtctcataactgttccttctcatgattgaacaacaaaaacatattacattttgttcacttacctcattttggctcttgattctatctgattttttaaatttgcctaaatcacttttaaattactccccaaggtattttgacttagttaaaatgctcttgttttttcttttttaatgcatctctgacctggtctcagaaacagtacagtgatggacaggctaccagagatgtgtaaaggtagcatccgtgacctgtaaacattagtttctgtcattttaatttatttgtcatggagttatcatttttaatgtatttttgtttattaaggaggcaaatttctaagtgtagagttttaaataccatttgtatttccccttgtgtgaattttctgactacttggataatggaggaatatgggtagtgatcaaaaattgataaaggctggcgtggtggctcatgcctataatcccagtgcttttggaggccaacacaggaggaatcacttgaagccaggacttcaagagcagcctgggcagcatagtgagacccccctctttacaaaaattaaaaaatccgctgggcatggtggcacacacctgcagttccagctactctgggctggggcaggaagattgcttgagcccaggagtttgaggctgaggtgagccgtgatggcaccactgcacttcagcctgagtgaaagagcaataccctgtctcaaaaataaaacaaaaaaggcctggtgcagtggctcacacctgtaatcccagcactttgggaggctgaggcagacagattgcttgatcccaggagttcaagaccagcctgtgcaacatggcagaaaccccgcctgtaaaaaaaaaaagaaaagaaaagaaattagccaggtgttgtgacacacacctgtaatgccagctactagggaggctaaggtgggaggatcacctgagccccggaggctgaggcctcagtgagccttgatcacaccactgcattccagagtgagtgacagtgagaccctatctacaaaataaaaaaaattaaaaaatttgtttaattaaaaaaatcaaatccacttcctctccaactttgttctttgttctcatttgcatcccattttttctctggccctccctaagccagattctactctgacattgaccttcagcagaaacccctcttgctgatactgttttttcagactgagggatgaagtatttggaggccaagccaggggctatggatttgcctttgggcttcaattttttttttttatctatccaagtaatactcagctttttccataacaagaatgttatttaataatagtaggtaatactttacatagcatttacactatgccaagctcagcgtataagtcattcaatccttatgacaccccagaggaaagtatattatactacccatttaacagatgagaaaactgagaccgagagaggtttagtaacttgtgcagggtctttttgggatttaaatccagtcactctttagggtctatacacttaatccttgctctatggagagaacagaaaatttttaaatcagattgcattgggtttgtagcaatataccagactttctggatrttttcttgaaaaaagattattcttgtaatggtgcactgttttccagaagattctccaaattcggaacaggacttggaaaagctggggggaaagtcgccccctcctcctccgccacctcctcgtcgaagctaccygccaggatcgggactcaccaccacgaggtcaggcgatgtggtctacaccggcagaaaggagaacatcaccgctaaggtctgataggctaagccctggtaaactggcctctgggttcagatgatacccttagacaaggttctctctgttgraacataaaaagtagtgaggcagagaagtagtaactcgaccacacaagatccccaggaagcaccacagatggaacaatggcagccagtrtgattggactagacccagaccatgagttttatccttattttacttttagctgcaacaatatgaaatgcaaatcacaagctatttcccatgtgggcatcataagattgaaaatgagggtaggagggggaaacgcaagaaagattatcttccaaaggtaactgaggtgagctgacaccgttgtgggagtctatacagaaagatgttcaatgagctttaaattccacttaactaaccaagtgttagctttcatgttaaatgtaaaacacaatttccaaagagatgcagtatgggagggcctttcatgaggactgtattagtctgttctcagggtgctgatagagacatgcctgagactgggtgataaagggaagagatttaatggactcacagttccatgtggctggggaggtctcacaattatggcagaagatgaaggaagagcaaaggcacttctcacatggtggcaggcaagaaagagattgtgcaggggaactcccatttataaaacggtccgatctcgtgagacwtattcaccacctcgagaacagcacgggaaagacctgcccccatgagtcaattacctcccacctgatccctccaatgacacgtgggaattacgggagctacagttcaagatgagatttgggtggggtcacagccaaaccatatcaaagacactgaatgttgaggagttccaattatattataattatttaatccattcaccaaaatgacaacttatgcaaacacaaatacaaactaaatgcaaaggaataaaatagcctttcagctattttctcagctaagatctaggaagcaagtgttctagacagtgagggaccatacgatctgtcccttttttgctagcacctaggagatgttaaaccactatctgttgtttcaatctcccacaggcaagcagtgaagatgctggaccaagcccacagaccagagctacaaaatatccagcagaggagcctgcttcagcctggaccccatccccaccgcctgtcaccacctcctcctcaaaggatgaggaggaagaagaagaagaaggagacraaataatggcagaactccaggtatgtggatgaggtgactgacattggctccttgcctcccgmctgggtctctscagccatggcactcacagatttgttagcgagaaggccagggaagcgcatggaccgggaccatagaagctgtgtcttctggccttagcctttgctttcccaagatggcgctgaacaaggctctcaggatgcctataagatgtgcaaggaatgaccatttcacaaaacaactcacgctttcctacctctggctgtaaaattgactttcctttctttccatcttaagagattctgcttcatttcaaaagcaagtaagataaggattagaaataccagccattgtcctgtcttgataaggacagactgaaggacacgttacgtgggttcccgttccttggctttaccacttagagccactgaccttggatcatggactcaaggccaatgactggcctcctgtggtccataaccaggtccctgttcaatatcaatgtcatcttttcagatattctgaaaagctgaattattttgttttccattttccttggtctatttgagaaatgatactgtatcagttttagatatttattttttaactatgacacagtccactcataggatgaaggatggcgtgccaaggctgtgcccaaaactgatcccacattcccatcacggatgtgattctaccccaggtctatgtcctgagaacttgtctcatcagagacatataaacaattcctagaacaaactttgtgtagagtatttcatttgcctcatgcttcttataggatttttctgtcaatcagatagttggaacaccagcaccttggggctcaaaaacatgttagctttttaccgacgtaccaatggctttgtgccaacccataaattttcctcttttctttggagtagggagaaytttcaatctacattgtttttactgcacttgttctactctggtttccatggtaataactgccaaaattgagctgcctggattttgcagggaaaacagaactgctggttgatttgtcacatacgtgagccctttcacacttcactaaaactcacagactagcctgggacatccccgcaaccaatcaggctatttgcaggtttttagaaggcttggataattgttttcataggaactacagatttataaagctggtatctttcaggcttgtggataattttttacacctctctaagagaaatactaaatttgttgcagccacttacagcccaccactgagggacactcttctccattgaagtctaaatatttgatgccctctttgaccactgtacagacattggcatatctggcttcatgtcatattcttggtggttacataataaaagtggtggccaggcatggtggctcatgtctgtaatcccagcactttgggaggctgaggcgggcagatcacctgaggtcaggagttcgagaccaacctggccaacataacgaaaccccatctctactaaaaactacaaaaattagctgggcatggtggtgggtgcctgtaatcccagctactcgggaggctgagacaggaaaatcacttggacccgggaggtggaagttgcagtgagccaggatcacaccactgcacttcagcctgggtgacaagagtgaaactctgtctcaaaaaaaaaaaaaaaaaaaaaagcgtggtgaatgaagtgctctaaccttaacttaaccaaaccctgttagccctctggctgggatagaaacccagcctgctaaatccgcaactcgatcaatggccagtggccataatgattctcttgtttctgcaccttctcaaggcaggacaaggagcagctgtggccccttctaaggacagttgtggaaccactttctgtgctccacatctccaggcatcagaagaaaacacaggctctgaaatcgagggtctaatagctcaaaggagatggcaattggcatttgtaagcagctttctaagtaagcggataaaccaaacacatccggggcaagctaggactggtatgactaaggaacagcaaggagaccaggtacagcagagacaggggagcaaacagtcatggaagaaaaggccagagaaagtccctcatcagccaccttcagattttaggaccagtgttggaatgtttactgagggaggacatacattattctttctgctggcagagatatctccaaatgacaacatttgacataaagaaaacactaggcaattatttaggctgattcatttaaataagtggtctttcaccaggcacagtggcttatacctgcaatcccagcactttgggaggctgaggtgggcagattgcttgaggtcagcagtttgagaccagcctggccaacatggtgaaaccccatctctactaaaactacaaaaaaatcagccagrcgtggtggcgggtgcctgtcatcccagctacctgggaggctgaggcaggagaattgcttgaacccgggaagcagaggttgcagtgagctgagatctcaccactgcactccagcstgggcgacagggagagactctgcctcaaataaataaacaaacaaacaaataaaaatagtttttaatcctagctgcacattagaattactttgggagttaaaaaaaaaatcctacagctcagagattctgatttgtgtattctctgagtggggtctcaagagtatttgagaacaacagtattttttttttaacctgggtggtatatagcctggttgagaaccactgttgtccataaacttgggtccctgagttaccagtctctccttctctcatgatcatattatctgggcattgcccacatgcccgcttcctttttagccctgtagacacagtctatgtctatactttctccctttgtctgagaactgaccttcctgactgaagttcacaagagccaacagttggctcttatagttttcagagacaaatctccagggttcaggcagctcctaggccactcggaatgacatcgttgcttaaaagcatcactttactctaaatgagcctcagaacacctcggagcgyggtagtacctgttactatttcagagaaggattgctaagagtacttttattgtaagacttaaaggtttaaaacgtcttgtgagcttttgctgtataatttcaataaaactcataaaaaaagaggaataaaaaagaaagatagttttttgttttaatttatttacatattgagcattttttaaatgtcaaagcaagaagccctcctaagtaccaatttatgttcaccccagacaggcagaaaaggtagtaatgtctattttatcttggcattccccaagaaaggaaggcagcctttgcctcggactctgcctccaagccagctttgtcaacatgagagcacgtgaggagcaggatttcagggtgctgcctccctggcctaaacctgcgtgcaggacccgggttggggtccacaagcgtctggttgttcctgcctgtttccctccattctcctcagtacccttggatccctgttaacctcagtattttaattccttaggcattccagaagtgttcctttatggatgtaaattcaaacagtcatgctgagccatcccgggctgacagtcacgttaaagacactaggtcgggcgccacagtgccacccaaggagaagaaggtaacgtggcaactgcacatttgccacacggttgggagtccttccttccttgctctgacactaacacggctcttatactcgacctttgtcccctctgtcttttttctctctcttttttttaactaatggagacacaggcataggttaaaatcagagatatcttgctcaggttttcagagcaaacactgtgttccagcccacagcatacaatagtatatgcagaatttagacactatcttcccaaactaaagagtgaacacctttcagtactttctagaacaactctagaaagaaatatatagaaacagcaaccaagtatttagcagtttttctaatttgtaagaccctttgggaaaaaaagaaaaacaactatatatgttaagaaaaataggtaaaaatcggctgggtgcagtggctcacgcttgtaatcccaccactttgggaggccgaggcaggtggatcacctgaggtcaggagttcgagaccagcctggccaacatggtgaaaccccatctctacttaaaatacaaaaaattagctgggtgtggaggtggacacctctattctcagctactygggaggctgaggcaggaggatcgcttgaacccaggaggyggaggttgcagtgagccgagattgcgccactgcactccagcctgggcaacaagagcaaaactctgtctcaaaaaaaaaaaaaaagtaaaaacctttgatttgggaaagaaaatgcatggtagaaagtatctaccaccacacactggtgtaacctcatggaaacatacaaatgtgtatttgcacaaacrtccaaggatgccaaacagaatttttgctaagtattatccatttataaagtgtaccttccaagatagtaagttcagtatagttttagtgttaacatacatgtgtgatgtcaaaaaaagaatccaggctctgaaacaaagtctgctgtcattgtataagtaagcactctagggaaacgaccatagcctgaatgtttgaaatgcaactttaarttgcacctagagcatctctgattttcagatataaagacatcttacttgaattaagcttccatctaaacttcaggataaaaagcttgcaaggcctaacatttttctccagggacttatctttcagaattcaaagattctagctttccttaaacaaaatcaaactaatcagatgcaagagagcccaatagctactacagatgggtacctcagtccatgtacgacagctcaaggaggtagatgtagtatcacaaaactgaaaggctattctaacacaaccattcaagagacacagttttgggctcccagctcccagccragaggccttgccaaggaggccagcttgcttccccctggctcataaccaccacggcacccttgtgtaaactctctgccacataaattgacatgtgacactgttaatgggggaagggaatctcgctatatccaaggggggttattgttgataaatgtttctcatgaagaaaacctggcctggcatggtggctcacacctgtaatcccagcattttaggaggccaagacggaagaatcacttgaggccaggagttcaagaccagcctgggcaacatagtgagatgaaagaaagagagagagatatggagggagagagggtaggagggatggagggagggagggagggaggaaggaaggaaggaaggaaggaaggaaggaaggaaggaaaaagagaggaaggaaaaagagaggaaggaaaaagagaggaagggagggaaaagaaagaaaacctactaatttgaactgaacccatgaaaccatgttggaaatatattgatttttattgtttttggttttttttttttttttttgtgagaccgagtctcactctgtcacccaggctggaktgctgtgacgtggtctcggctcactgcaacctccgcctcccgggttcaagcagttctctgtttcagcctctctagtagctgggattacaggcgcctgccaccatgcctagctaatttttgtatttttagtagagatggggtttcaccatcttggccaggttggtcttgaactcctgacctcrtgatccacccgcctcagcctctcaaaatgctgggattacaggcgtgagccaccgcacccagccggaaatatattggtcttttcagtatgtggaatttccttatgagggcttattaaaactaactcatggaaggcctggtatagcatgttatacttaggctaatgtgaccatttctgtctagaacactgactgggaatttggactttctcaaagatccctctggagaccattattgtctcattgtagaatttttcttttcttttcttttctttttaattgaaatggagtctcgctctatcacccaagctggagtgcaatggcgccatctcagctcactgcaacctccccctccccggttcmagtgattctcgtgcctcagcctcccgagtagctgggactacaggcgtgcaccaccacaccyggctaatttttttgtatttttattagagatrgggtttcaccttgttggccaggctggtcttcaactactgacctcaggtgatccacccgcctcagactcccaaagtgctgggattacaagcgtgagccaccgtgcatttctaattggctagaaagtggcatgagatttcttgccccataattagaaatccatatcccattggtctcatttatctcagttgaggatccactggctaataagcaggtctttattgagtgcccaacactgagtttagtcacaggtgcttattctggataattaatctcagtagattaaccttcttcagaatgaccatgtatatcagacttctcttatccccaattctgggtccttattaacctcttccagggctaagtatttacccttccataaatcggatgttttctkaagcattttttctcctgtcatcactgaaactccagcctagttcttcacttgtatgcaattttcttgtaaccctgtctctcgttttggtttattgtccatatgcctattgagtgcttttccagttgtcttcataatccaaatcccagggcctataaatacatattaaagaggcayaattacctttcacccagagtcttgaccatctaagactaagaaatcactgtgagtttgcatgacaattatgaccaagctcctgcacttgctttgatacattcattcatttttttctagcccagtgataaaaagtataggtcgtgkgaaaaccaaacttcacatttttatcctagtgactttccattagagcatttatgctactactcagttttaaaatacatatattacaggggggatttttgaaatttatttatttatttttgagaccgagtctcgctctctcgcccaggctggagtgcagtggtgcaatctcaactcactgcaacctccgcctcctgagttcaagcaattctcctacctcggcctcctgagtagctgggattataggtgtgtgccaccacgcctggctaatttttgtatttttagtagagacagggtttcaccatgttggtcaggctggtctcgaactcctgacctcatgatccacccacctccacctcccaaagtgctgggattacaggtgtgagccaccatgcctggcctgaaacgtttaatgatgggaatggcacaggccatgaccaaccaacagacaccagccctaacctccagtaaatagacccccagaacatctgccacgtgtgtgtctttagatcacatgccaaatccatccacgattcagggggcaaattctcatttgggtcctagcatgatatgctgactccatatttggagttgtaaccttaggctgaaacctttttttwaaattcatttacatatatatatacatatattttgagacagaaccttgctctgtcgcccgggaggctggagggcagtggcacgatctcagctcattgcaacttctgcctcccaggttcaagcgattctcctgcctcagcctcccacgtagctgatattacaggcacccgccaccgtgcccagctaatttttatattttcagtagagatgggatttcaccgtgatgaccaggtcggtctcaaatttctgacctcaagtgatccacccaccttrgcctcccaaagttctgggattacaggcatgagccactacacatagcctatttttattttttatttttgcgtatatgtgatggagtctttgccatgttgcccaggctgttctcgaactcctrgactcaagcaatcctcctgcctcagcctcccgagtagctgggattacaggaagctcaattatttttcttctttaaaaccttttacttgacgtattcattgtttcatattttaaatttaaaatcccacaaaagaagccatgtggctccgctgcagcagccgaatcatggcacttgtttgggggcttcctggggagcaagcagaagtaaaacaggaggtatttggtggctcgtgtaccttgtactttgcacagtatttgcgtgtgattaattctgactgcrttgtttgtgtgtcattcctcaggcgtgtatgaacagtctttccattcttaagtaaggtcataggggttgctctgggttgactttggctgggcccgggtgtttgtgctttgtgttgtcattgctttaaccaagcagccttcatgggaattgtgctccatcctgctataatcaatcacctcagcatgaagaaagggcagcagtgccttggawccgacaaggcatcactagtgttagtgttatgtcagggcctgaggctactgatacaccttgggaaaggccaggcctccaggtgaagcgccttgaatacctgggtcctcaccactggatccttcactcctgaatcttggtgagaccctaagacatgtatcttcagtctacactggaaaatatagagaatgaaagctgagtcgtgacgtcaccgtcaccaatgtaacctcaaatatctgctttgtgaatgtttaggttctattgtaacagcatgatggatatgaaccaaggttctattgtaacagcatgatggatatgaattgaggttatattgtaacagcatgatcactctgaatttggatttggtcatcgtggctatgaggagtgtgaaggttattttggcacttcgacacctgcagtacaaactgcatttcaatctgtcatttgatcaggggaaaataatgttttttcgtccccaaatgccaaacccaaccaaggcagatgtctttataggataatctccataacagaagcagagggaggactgaaataatgagctgtaaggggaactaaaattcccctgggctggttcctaagtttataggcaagaaaactgaggccaaagaagtaaagtgacttatctaaagtaacacagtttagtggcagatcttgattaggatcaaaactttctgtcagcccatacattgtgcttttcacaattcttcaggttttaaattctgctaagctcacaatctgatgttgaaaagaggacatgttagtaatgactctgtccctttattttcttcaccactcccctacaaaattttaaattcttgaaatcttttgctaattgagattttcatcttgtgcaaacacagggcatttttggcagttggagaacaaagcaatccaaggtaaacagctgtaggctttggattggtgtgtaasaaatatgcgtggcccgcatgtcttagaaatgtaattaaaggaacgatttagttatagtccacttttttggggggatgtggttttgtggagtaacatgtcctacactattctaccagaatttggaatttttccatgaagatgtacggaaatctgatgttgaatatgaaaatggcccccaaatggaattccaaaaggtgagttcaccagatctgggttccgaccaataccatgcacattaagtacctgcctctgcagatccattgctgattaacgtgtgtggtttccctcctccgttctccctctcaggttaccacaggggctgtaagacctagtgaccctcctaagtgggaaagaggaatggagaatagtatttctgatgcatcaagaacatcagaatataaaactgagatcataatgaaggaaaattccatatccaatatgagtttactcagagacagtagaaactattcccaggaaactgtgcctaaggccagtttcggtttctctggcattagtccattagaagatgaaataaacaaagggtctaaaatctcaggcctgcaatactctatacctgacaccgagaaccagacgctgaattacggaaagacaaaggagatggaaaagcaaaatacggataagtgtcacgtttcctctcacactagactaacagaatcaagcgtgcatgattttaaaacagaagatcaagaggttatcacgacagattttggccaagttgttctaagacccaaggaggcaaggcatgctaacgtgaacsctaatgaggatggagaatcaagttcaagttctcccactgaagaaaatgcagccactgacaatattgccttcatgattaccgaaaccactgtccaggttctttccagtggggaggtgcatgatattgttagccaaaagggagaagacatacagacggttaatatcgatgccagaaaagagatgaycccccgacaagaagggactgacaatgaggatccagtcgtgtgcctggacaagaaaccagtgatcatcattttcgatgagcccatggacatccggtctgcctataagagactttcaactatctttgaggaatgtgatgaggaattagagagaatgatgatggaggaaaagatagaggaggaggaagaggaggaaaatggggattctgtagtccagaataataacrcttcccagatgtctcataagaaggtggccccaggcaatcttagaaccggacaacaggtggaaacaaagtcacagccacactccctggccacagagaccagaaacccaggaggacaggaaatgaacagaacggagctgaacaagttcagccacgtggattctccaaattcggaatgcaagggtgaggacgcgacygatgaccagtttgaaagccccaagaaaaagtttaaattcaaattccctaagaagcaactcgccgctctcactcaagccattcgcaccggaactaaaacagggaagaagactttgcaagtggtagtctatgaagaagaggaagaggatggcaccctgaaacagcacaaagaagccaagcgcttcgaaatcgctaggtctcaacctgaagacacccctgaaaacacagtgaggaggcaagagcagcccagcatygagagtacatctccgatttcaagaactgatgaaattagaaaaaacacctacagaacattggatagcctggagcagaccattaaacagctcgaaaatacaatcagtgaaatgagtcccaaagccctagttgatacctcatgttcttccaacagagattctgttgcaagttcatcccacatagcccaagaggcctctccccgacccttgctagttccggatgaaggtcccactgccctagagccccctacgtcgataccttcagcttcacgtaaggtatcttggtctgctggaaaatgaaaagacccagctgctttcctaaatctgccataatcaccattagtgaaaggtgtcttgtaacttaattgctttctttcaggtggcttttttttttttgtctgttcgccatgaaacccttctttcatactttctccctcaccttccaaacaacaacaactaggtatctaacagctaatcagytctgtttttgcctctgttgctgactggtgttgggtaaacacgaggctgctgggtcagccatgtgctgttgaaatggttgctctgatactcrcattaaaatccgtttgatcagtagtgagcagttgattctgtttgattcttctgattaaccccagttggtgtctcctagatctgtcctgcatgtagggctgtggcttctcaccttgagcttctctgcacatcgtggggcagcctcacagatgacctactcatgcgcttctccttctcttccccctctcactggtccttcccacagggctccagcggggccccacagacgagcaggatgcctgtccccatgagtgccaagaacagacccggaaccctggacaaacccggcaagcagtccaaactgcaggatccccgccaatatcgtcaggtagttttaccttaaacccacttttggatggacgctatttcagttaagcaagtcactgacttagtttataccaaatattgtgctttctttgtaagataacggtttacatagacatcctggatctgggggcatgaagaaagtctaaataaacctttgttacacttttttaccacgcttttgcatgcttgcaataaaacatcttttactttgtgactccaaactccaaattttaactgttaacacacggtgccagaccaggtggcttttctttggtgaatgtagtgtttcatctgaacacctcgggaagcagagacaaaccaacctgtggttgaactgcccttaacgtcaccactactaacgtctatgttgactgtattgtgttagaagcacattaacactccgtcacaatgcccgacccccaccccagtaattatccagacgcatggcccacctggcacacaggaaatggtagagctggaatgatgggactcctctcacaaatgtattcttcctttcctcctttcccgtccatcctttgctatgtacatggggggtttctaccaggtccagtagagcacaacaagacttagctcaggccttgaactgtgtttggttggttttctttgattgaattattctcagaagggctgtgttgccaggccctgtgggttgatcatgtgaccrcctktctgacaaaatgtctcccgccatctttatttgcaggctaatggaagtgctaagaaatctggtggggactttaagcctacttccccctccttacctgcttctaagattccagccctttctcccagctctgggaaaagcagttctctgccctcttctagtggtgacagctctaacctccctaatccacctgctactaaaccatcgattgcttctaaccctctcagcccccaaacaggaccacctgctcactctgcctccctcatcccttctgtctctaatggctctttgaagtttcagagcctcactcatacaggtaaaggtcaccatctttcattctcaccgcagagtcaaaatggccgagcaccccctcctttgtcattttcctcctcccctccttctcctgcctcctccgtctcactgaatcaaggtgccaagggcaccaggaccatccatactcccagcctcaccagctacaaggcacagaatggaagttcaagcaaagccaccccatccacagcaaaagaaacctcttaaaggtcaaatcctattaggcacaagtcggagttacatttaaaaaaaattaacagtctacaacaactgttttcacaagagaatgtaacatattgctgtatcgtttgaggcttaatgctaaatatgtgctaaatactggattaatagatttcagtaaagctcgttcgttttgtttggttttctttttacctagttgctatagtgtctacagtctatactcaatacctataaaatgcagtaagcatgtgttacagaaagaggttctggtgggagagaaaggtgcgtgtgagacaggagaattgtcttaagcatataaaacatgtatgattccagaattttagtatgttttgtataaaactatttttcattacggagactagaagtgaacagagaattacacaagtgtgactatacaaattgtaaaacagatactataatatttccttttattttagtgttatttagctttattacagatttctatttttgtcaaaacttcatggttcctttcaagatcttttttgccaaaacattttgatactatagcattgtacatttgaaagtagtgttctagactataaaaccaatgaacttctacatgagccctacagacaggcatgtgtagaaggcaatttatcaaacctattgcactgccatgaaaagtgtgtataataatttgctagcccaagcaagctagttttctttgcttgcttcttttctttcttttttccttccttttttttttttttttcttttttaacatgttgagattctctagttgttttctttggcgtatctaaccccttctkttgttttctgagacctggtaacccacgctcttgcattgtggattttaaaatgtatactctgtacggttctgtaaaccgaaaaacttttgtaaatatataaatatacatagacataaaaatactgtatgtgacagcacatagagtagttttcccacaccaaagttaatttttatgcatgctttaaaagtatatatcgggaccggcagaaatggaagtatccatacatttttaaaaagcaacaagtttgcacagctagagtgtttttgtaaataaatgtatttgtataacacagtcatgtaatatacagaactataagcagagactttgcaaaactaaataaagggctgcatgcttattattttttgtaccttgtcactataactacttcctagtcaaagaacgaaatgtaactgttaccgagttaaatgtttttcckctttgagggatgtaaccacatccactcagaggacactacttttctgaaagctctggggtgactaatgatgagttcctaataaattaattgcaagtgtggtgccttggatgtggcctgttggctcgctttcttctctgtggcttatcaaggtgtagatgacagaaagcaaacctggatacagagtttccaccctcagttcctggaggggctcttattattttctctctttttaaaaaacttccagtagaagtaaagtggaaataaaatgtctttatcacttggctttttttcttttgagtcctcaacttaaaaaattattgttggcctagagggaaatacgcttacaccatatgttttcatttgttaaaatgggaagaagccaggcacggtggcttatgctttgtaatctcagcattttgggaggctgaggcaggaggatcacttgaggccaggagttccagaccagcctgcgcaatataatgagaccycatctctaccaaaaataaataaataaatttaagttaggtgggcatggtggtgtgtgcctgtagtcccagctactcaggaggctgaggtaggaggatggcttgagcctgggaggtggaggctgcagtgagctatgatcacaccactgcactccatcccagatgacagagcaagaccctgtctcaaaaaaaaaaaaaaaaaaaaaaggtgtgggggaagaaaattagtgaaaacaataccaggattatgaattaaccacaggaacaatctcaggaaactacttagatttttcacctcagaatgtttcatttggtgatttcatgtaaaaagcaaatatttttggaactcagttgttcagtgtttctgagtttcaggctttcttacttcaggatgcctccgccagaaatattcatatctctgttcattatgttaatggcagtcccgtgtttcaggtggcacttaggaaagtatttagggtccaacatttcaatcatgtcccataatcaccttaatgacattatattcatttatatataaatatatctcatagctaattcatgccaatttatttgcttctgtttatggacaagctgaaaattctttrtaagcagcaaaacagcagatggtgggctcactttttcagtttagcttcaggcttcccagagagctctgacaaggtcacagaggtgatggtagtttcagccaatgtygtgaaggatgggacatgttcaccmggtaagggaaaactccacacagtcccatccactgccctgagatcygasccagtgctgcctgcctcttcaggaaactggaggagaaactaccatgattggagaaaccagagtcaggtgttgcaaagacttcctatcacagcacagacccaggaggtgcctgtctaaattagtgcaatatagctcctgccttggtacccatttttaggcctgacctaagtatttattgagacggagtctygctctgtcrcccaggctggagtgcagtggcacgatcaaggctcactgcaacctctgcctcctgggttcaagcaattctcctgcctcagcctcctgagtagctgggattacaggcgcccgctaccacacccggctaattttttgtatttttagtagagayggggtttcactgtgtcagccaggatggtctcaatctcctgacctcgtgatccgcctgccgcggcctcccaaagtgctaggattacaggcatgagccaccgcacccggccmacctagttgtttgaaaccttgtaccctgccctctatggcctcattaaarcttcgcctcccagtgtggtkgtttgaaaaatacagcccaggmtccttcctcatcccaccaaccaaaaacccaacatgccccacacctgcgggcccgtggtaaaacctgatgattaataccagagtcgtgtcaataaatttcccctgcgcacgtgttttcttgaaactaaccaatccacgacccccatgggaaagcctaaggggtaacrcccctggaccytgatagaagcacagcccctcaggcttgctcactctcactctctccccacctcttggttgagctctgctgtcactgcctccagacctctcatgaaggccccrccaccaccctccctggaatctgtaagtaagatatttcctctgtttggtgcatttttggtttcgcctcctcactgtgccttagctgaccaacacacccaaacctaactgcaccccaccccatcagggcttccctaaagaggggctatctcggcttatggccactctcgacagggaaacctcaagaccaagttagaaactgtaacartaaaaactcacgatagcacctcggttctttgaatatctacagtgaatgatgttgggcaggatgagctcagctcttgggttttcagattttgctaaactacacttaacagacactcagttaagacagtctctctctctttttttttctttkaagagacaaggtcttgctctgtccccscaagctggagtgcagtggtacartcatacctcgctgcagcctcaaacttcggggctcaagtgattcccttgcctcggcctctggagtagctgggattataagcatgcaccaccacacctgcctgtcttttaagttcaccattcagttattcactgtatctaaaaagattcttagaaataaaccatgtggcttctcaggtttattcaayratcagtccatccagccctcactgagcatcttctgcacgtagcatgggatgaggaaggcatctggcccayggcatcagtgctgctttctggttgtgccaccttgggtgtgttttggcttcttcacctgttcatggagaataatagcacctactaaaaaggatcattgggaggattaaatacgatgtatacaaaattctgaagacagagtcaaacatacggagcactcaaaagttaatgagggccgggcgcagtggctcacgcctataatcccagcactttgggaggccaaggcgggtggatcacctgaggtcaggagttcaagactagcctggccaacatggtgaaaccccttctctattaaaatacaaaaaaattaactgagcttggtggcacacatctgtattcccagctattcaggaggctgaggcaggagaatcgcttgaacccgggaggctgaggttacagtgagccgaggttgtgccactgcactccagcctcggcaagaagtaagactttgtctaaaaaacaaaaaaagttaatgatgatgattattactgctgcggtgacagctggaaccagttctgcccttgagaggcatcagtctagttggggaaagcgtggcacacataccggggagatcaagtcacagttgatgcaggtgggggagtgcgagcagtcctggcagttggctacaggagtgcagagcaacgggcttgtctggtgcttcacagaagtggtggcacctggcactgacaggtataatacagaacttataatagcgttacagcatttttaaagaagctggttttcttttaatgctacttgtgactggatttttttccaaagtaaaatagacatttacacagatggagaaaagccaaggccctgggaatcatggctcagaattatggttcttttgtgaagtcacatgtgcaggcttgggagaaggtgctcccaggtcaccccaacccatattcctcagatgatgctcattcctgggcttgagtgcaaggggccagacccatggggtaagagggacacatccactgggtgctgagagcaggtctggccactcccctcccygcaggccacatttaaaacataaacctgggcctcttcctgaatgccccaccttgtaattctagctaaggtcctccccacctccaaggctcagtaaatgcaaaggcatttcagagcaagcaggaaattttttggaggaagtagaggaatgacagctgcttcaactgaaaattcaaaaggtaattttgcaaaagaggccagctgacgttgtccaggaaaacatagccctggcatcgggcaaccaytcattctttgatctatgctcctaagaaggtaatgtccgaaagaataacccgaaaagcacctctgagaagagagtcccaggccctcccaaggtgcatgtccatctagctccaagtcaggtgcccaccttagaagcaaatgttcgccctgatggaacgaggaaggttaagttatgctcaccactctctgccaagaaggcaggagagcttacagtgcatgccttcgatttgcacaaaatgcttaatattttaattgcccaacgtattgggtggtccttaatccttgtgtctgtgaacacatcagcaataactgccatctgttgcctattatgggccacgtagaatgctaaggtgttttgcatctattgtcttttaatcctcacaaacactgaaaaagttcctgtaatttatccctcccccacttcactgcaggacactgagaacaggcaagaggtgacaagtgcagtatgcacctctgggcactcgccatcctgcttgcggtgggggctgctcaggttgcccctttgaaagaaggtggctttaaggggaggtttttcattcctggatcagacgaatgagcacaatgcagaaaattatccatttgtgggattattagattgcaaattttggttgcctcaccttcaaaagatgcgtaggtagagaccccttccacttaaaaggctaatgttctcatctagtattattgttggaaaggcggtgaatctggattggaacctgggataggtactcctcttcccctaagccccargtggtcaactacaactctagggccctgagctgggactgcagggaaggcttcacctgccagaaagaccacaccccagacaagccaagccaagcccagcctaggtcctacccgtaccaggccccacctcctcctggccttgccacgcccctccaggtactgcctcaacctgcctcagctaagccacgccccacctttctggtcacacccctcgaggcctcaccrcrcccctcgaggcctcaccgcgcccctcctgctggtgccttcgggaacttcagctgctggagaccagggtaagcggcccccaagtgcctcctaaaagggttttctcgaagttcggcttctcggcagggacttgtgagtaggcacctcagcctctcagagtgatcctttgaaattcaaggataagtctcaattccaatggatccaagcccccttttagttacaaatgttttgtacgagatgaaattccttatgacatctcctacctactcgccttgtttcaaaaataaaatacaatgtcctagtggcactataacaaaggtataattattaccgtgccatgcacgcacccatcagcagaattcacwttcagagacgagtcgtaccggggactcgaacgctgtgaatggctggtaatgtgacttttccsaaatagcgaatgacttggttgaaagctttgaacaaagcagaatacgactctccctcactttacacgttcctgaaaaattttattgcacattttgaggctgcaaaagtgtttaaatataaaataaaattggcctctacactcggatcattataagcagggtttttccttacgcatatgtccagtgggacgtgaccaggtcgtgctgggggtgggggacagtttttcctgggcagctgactgtaggacatcccgattcagcatccctgacccctacacactaaatgccagttttgcctctaacattgggacaaccagaaaactctccacaaatacccaaaactgcctttcaagggcrgcattgctgtgactcagaaccactggcacagagtaatgaacaggggcctcattgttgagtcrggacaaaccctgagggcataaggacccaacagggaatcttcaaagtacccagcccagtgacccctccctgtgtaagaacagcccttaggtacacatggagagccgggggtgcctcagtgacctgccactcccgggggattttcaggaagcccatactggtattagcatttctgttcttttccttcatgcctggaagaccaaatggttaaccaggaaagggccaggcgaggtggctcacgcytgtaatcccagcactttgggcggctgaggcaggtggatcgcctgaggtcaggagttcgagaccaggctgcccaacatggcaaagccccatctctactgaaaatacaaaaattatctgggtgcggtgctgcattcctgtagtcccaactacttgggaggctgaggtaggagactcacttgaaccagggag

SEQ ID NO: 9958 - DNA, 13856 bp, Homo sapiens
aatttgttccctgcacagaccaataatgaactccaaaattgaatcagtaataaatagcctatgaacccaaaaaagcccaagacctgctggattcacagccaaattctaccaggtgtacaaagaagagctgttaccatttttacagaaactaatccaaaaagtttaggaggacttctctttaattcattgtatgaggccagcatcatcttgataccaaaacctggcagagacacaacagcaacagaaaattacagaccaaaatccttgatggacatcgatgcaaaaatcctcaacaaaacctttgcaaactgaatccacaagcccatcaaaaagctaatccaccatgatcaaataggcctcatcctggcatgcaaagttagttcaacatacaaaaatcaataaatatgattcatcacataaacagaactaaagacaaaaaccacatgactgtctcaataaatgcagaaaaggcttttgataaaaattcaacatcccttcatgttaaactatttcaaaaaattagatattgaaggaacatactaaaaataataagagccatctatgataaacccacacccaacatcatactgaatgggcaaaagctggaagcattcctcttgaaaaccagcaacaggaaacgattccctctgtcaccatttcttttcaacatagtattggaagtcctggccagagcaatcaggtaagagaaagaaataaaggacgcccaaaaaaccatagagtatgtcaaactgtttgcagttgacatattctctatctacaaaaccccatagtcttggctcaaaagctccttcatctgataaacaacttcagaaaagttgcaggatacaaaatcaatgtacaaaaatcacttgtattcctataaaccaacaacaatcaaatcaggaaggcaatcccattcacaattgccacacacacaaaaaatacctaggaatacagcaaacgagggaagtgaaaaatttacacaataagaattataaaaaaacttcccaaaaagatcagagaagacacaaacaaatgggaaaacatcccatgttcatggatacaaagaatcaattattaaaatggctgtactgcccaaaggaatgtacagattcaatgttattcctatcaaactaccaatgagattcttcacagaactggaaaaatttattttacaatttatatggaaccaaaaaagagccctaatagttaaagtaatactaagtgaaaacaacagagctaacaaagctagaggaatcacattacccaacttcaaactatgttacagagctacagtgaccaatatagcatggtactggcataaaaacaggtacatacaccaatggaacagaatagagatcccagaaataaggccacacatttatgactatctaatctttgacaaaactgacaaaaacaagctatgggaacaagacttcgtatttaataaatagcactgggataactggctagctatctgcagaagatcaaatctgaaattcttccctgtaccatataaaaaaatcaagtcaaaatggattaaagacctaaatgtaaaaagaaacctgtaaaagccctggaagacaacctaggcaataccatcctggacctaggaatgagcaaagatttcatggcaaagacatcaaaagcaatcaaacaaaaacaaaaattgacaaatgggatcctattaaacttaagagcccctgcacaagaaaagaaaatatcaacagagtaaatcgacaacctacagaatgaaagaaaatatttgcaaacaatgcatctgacaaaggccttatatccaacatctataaggaacttgaatttacaagagaaaaacaaccacattaaaaagtgggcaaaagacctgaacagacacttctcaaaagaagacgtacatgtgaccaagaagcatgtgaataaaaacttaacatcactgatcattagagaaatccaaatcaaaaccacaatgaggtaccatctcacaccagtcagaatggctattactaaaatgtgaaaaacaatcagctccatcatggtggatgggaggcaggactaaattgcagttctgacttggaaagacagaggagcttgtgaaggcttgcatcatgaattttagctccagaaagactgcagaaaaaaatcaggaaatgcgagaggacccacaggttttctgaagaaagtgggctgctcctgcagaacctgggagacaccccaaatactgtgaaggcccaaattgcagaagtgggaaagggagatcctctgcccccaaacacaacctcccctgggaaaactgaaggtctattttatgggaaaagattacaaccttacctggagctgagtyaatttagagagctgagcaaaatacaggaatagagggagcagtagaaaaggccctgtgagctcgctgggtcctcaagcaggctattcctgtgtggcatcacaaagatcctttgggagggtgacaagagggaaatgccacagagagaaggaaatcaccagctgaattttggaacaatttgaagtcatcaagaagcctcctggccagaactgagggaagagttcaaatccattgtgcagactaaataggcaggggaagaactaaagtcctactttctttcacagctaggaggtgggtagcctgtggcaagttctcagccctgcttgccgactgtctggaaacagacagggtgccattggggaggcatggtgggagtgagaccagccctttggattgcatgggagctgggtcaggcctgtgactgccagcgttctctcacttccacgacaacctgcatgactcagcagaggcagcttccttctaggtgcataactccattaacctggaaacctcagccccatcccccctagcagccacagcaggagagagtgagtctgagctcagacatgcttagctctgccccacctgatggtacttccctacccaccctggtattctgagcacaaagggcataaactcttgagagttctagtgacttacccactgccggtgcctcttcatactatcacagctgatgctctctagaaagaactacctcctggtaggaggccaaccacacaaaaatagagcattaaacycccaaagctaagaaccctcacagagtccatttcacccccctgccacctccaccagaacaggtgctggtatccacagttgagagaccaacagatggtttacatcacaggactctgtgcagacaaccccaatatcagcctggagcctggtggactttcttggtgactagatccagaagagagataacaattactacagctcagctgtcaggaagccacatccataggaaaaaagggagaatactacatcaaagaaacaccctctggaacaaaaaagtctaaacaacagccttcagccctagatcttttctctgatagagccyacccaaatgaggaggagccagaaaaccaactctggtaatatgacaaaacaaggctctttaacactccccaaacatcacactagctcaccagcaatggatccaaaccaagaagaaatccctgatttacctgaaaaaaaattcaggaggttagttattaagctaatcagaaaggcaccagagaaaagtgaagcccaatgcaaggaaatccaaaaatatgatacaagaagtgaagggagaaatattcaaataaattttaataawawaataataaattttaataataaataaataataaattttaataataaataaattcaaacatttgatacagttagtacataaattttgatgcataaaaaagttaaaatgaaacacactaatctgttctgtatacacctaaatgtaactttgacactgaaatggattaagacactgctcttctctgaggaactgagtttttattctaatttctggatgtagtgtgtgggaattattatttttgctgctctttttctgaaaaagattgcctttccctaagagctgttgttccaatgaaaacctagtgttttcaacccagcatgaatgatgcaagtgctgaggtcctttgggcgagaccctctggggttattgtagctctcactggagacgtgagctctgctctcttttcaaagtatccatgaagtctcaacagaacccaccacacaaccccccacccaccatggtagtttgtctttctctttgtcytctttcccaacctcatctttattgcctggatatagcgaggccagggtaaccttcttgtctctatgtggatagtacgtttgtacttctagccttgggatttttccttaatatttgtccatgctagctgagtttgccttttcaatagctctcttgactaaatatacggtaatttccaagatattttggttttattttattttatttttgcttagctttgcttcaggggactgaaggtgagggatcagttcttcatagtggaacaccttacatctttctctgccatctttgacgtttatgaggcatatttttctactttgtttggtagctgttgctgaatttgtttcattggtgctttgctcactttacttacttttttagctattgaagaagaatgactgtatcatgctgctgatttccccgtcttggctagacagtatgtcatcctttatctacattggtccctgtagtgaggatcatggagtagatgttgctgggagagtgagtatatgtgaaaaaaatgtgaaggtatttggtgctgatgaarcaatatgccctactgggcaggggagaggcacagaataagaattcttgccatgtggatgaactcattcaaacacaatgactgctttrtgagacaatagatagatttctacctcttctcacatgtacagagaaaatatttccaaagtctccggaatatttacatgtattactatttaatataaacttgcaagtctttttaaatgtgtttaaaactatcacagtactaaacatgaactagatgcataataaatgctgaaagtaaaaagcctgaattatttaagtgaaaagagaaaaagatttagatcccaaataaatgtatgcgtttgtgtgtttgtgtgtgtgcgcgcatgtttgctgggcatgtacttgtaaaaagtaaaataatagaaaagtattattcttggtacccagcattctaggaataatgtcttccacaagattattagaaaactctgctactttgtaggaggagctttggataactatgaataagtccctttacagacttaactttaaaaaaccatctgatttttctttaytttctttatttttattgtaaattgacatattttacttgcatacatttatgaggtatcaggtgttgttatgatttatgamtactatgtggaataattaaatgaaactaattaacgtattcaaatgataataaatataacagataacaggtaacaaatatttttttatggtgagaatatttgaaagttactttttcagcaattttgtaatgtacaatacactattattaaccatattcacaatgctgttcaatagatctcagaaaagcagaacaaaacttattcctcttgtctaactgaggttctgtaaactttcaccatcatctccccatttttctccacccaaacacggaagtatgtaaaaattctcagtgcttacaaagtttcatataccaatttttgtaatgatacttccccagaactcaatttgacagactgaagtatgtagataagacaaaaaaaaaaaaaaaaaacacacaaaccaatgaaaataaatatgtccttatttgcatgtttacaaatgagaattcagtgtttcctttctcaccagctacaaaagacttcagcctactgtgtataaggcacacagcatctggatgaagctcagctgagctgtctggggaaatacagagatttttatgaagagagctttaaacccagccattagcaaatctggatggttgctggtttaacattccctttttaaagggaatatattattgaattttcaagaatcagatatacatagcattttagatgaatgcattaaraagtcttcagcagtgatattagacattggggcatgctcttacaggcaatgggtggtgtcataaagagcatatttacattcgttttaattgtggaatttataattggaaatttaggaaatagtttcatagcactggtgaactgtattgactgggtcaagggwagaaagatctcttcggttgatcggatcctcactgctttggcaatctctcgaattagcctggtttggttaatattcggaagctggtgtgtgtctgtgtttttcccagctttatttgccactgaaaaaatgttcagaatgcttactaatatctggacagtgatcaatcattttagtgtctggttagctacaggcctcggtactttttattttctcaagatagccaatttttctaactctrtttttctctacctaaagtggagrgttaaaaaggtggttttggtgctgcttcttgtgacttcggtcttcttgtttttaaatattgcactgataaacatccatataaatgccagtatcaatggatacagaagaaacaagacttgcagttctgattcaagtaactttacaygattttccagtcttattgtattaaccagcactgtgttcattttcataccctttactttgtccctggcaatgtttcttctcytcatcttctccatgtggaaacatcgcaagaagatgcagcacactgtcaaaatatccggagacgccagcaccaaagcccacagaggagttaaaagtgtgatcactttcttcctactctatgccattttctctctgtcttttttcatatcagtttggacctctgaaaggttggaggaaaatctaattattctttcccaggtgatgggaatggcttatccttcatgtcactcatgtgttctgattcttggaaacaagaagctgagacaggcctctctgtcagtgctactgtggctgaggtacatgttcaaagatggggagccctcaggtcacaaagaatttagagaatcatcttgaatatattagaaaaaaaatagctcctaagaaattcttgtatgttatataaatttatacttccttaagattctttcattgtgtataactttgtgaattttacaaagatrtgcttggaatcaacaccatccaaacatatcacaaattaggatatatgaaagtatgtatattaccatacagagaagaatgcgaatactataaagagttcttatacaaacagataatatagattttgtatcaatcattcaccttttttgagatttttaaatgagaaaacctataatgtataaaatacatgtgtgtatgtatgtatgtgacacagttactaaaaataggcttcttaaacttacatctcaatctggtagataaagtacataaaagaatatggaattttagtacctatattaagtgtttttawtttttgtataatatttagtacctgattagcgtgtatgcaaaaaastaatttgcttcgtttgttgaattagaagccagctgccttactaaactaccacatttgctttgctcattctcttggctttgcagatagaaaattatatcatctgcatatagtgacttataatgattattttacttctccattttactacttgtaattcttttttggtatcagttgtataatgaaatggtttgaacattcaaagtgttaagtaatcctgatcgtaactgctgtctttgcaaatggagtgttttctagtgttttaacaataaacgtaatactgactctagctttgagataaattcttttaaaaatattmttcagggagaatatttgtttcctatcttcctgtgtatagtattgtaataaaatctctgttaaaaactatcaaattttttgctgtttattaagatgatcatattttccctctcctctgaccaattaaaataatgatacttgttaatggtggtacataaaacaatgacatgtcttctagtctatgcattctagatttaataaaatacaatatacatattcatacacacgcacgcacacacacacacasagagagagagagagagagagagagaaataaaattgcaaccttagaggcaaatgggaattcagaaagcagctgcaaggtagtgagaggtaatctccaaaaggggaagataatcccagtttgaataacatgaaaaattgtgtcaaagaactgtatgccagaagacagttgattcattttttcaagggctaaggaatgtaaccgtaatcctgaattctttgctaaaaatttgttctggggtttgaattaaataataacattcccctctccccttaaaaaaagatgagggctgtttactaaacatacstccttactgaaaatgctaataaccaatctgcttcagaaagactgttatggactgacttgtttgtctccaaaatccatgtgttgaagcccacactctcaatgtgactgtatttggatataaggcttttaagtaggtagttaaggttaaattaggccatacagtgaggccgyagtacaataggactggtgtctttataaaaagaggaagaaacaggcatctgtgggcacagagaaaacacaatgatgtatgattccatttatataccattctagaatatggaaagtaatctatagtgactgaaagcagatccatggttgcctggtaactgggggtttgataaagaatgggcagtggtaagttggaggaataacacaggaacataaaggaaagttttgggggtactatatatgtttgttacctgattatagtgatggtttcacatgtgatgagtatcacatggtgagacactcatgaaattgtacactttatatctgtacaacttattgcatgtcaagtatacctcaagtggcatattagaaacaaytcaggaggaaaactgcacataagtatgcattcttagaaagcttctctttgcaactttggaagaatcaaatattattatttcctattcttattttttgatcttagcctgggccttatgtttactggaataaaatatgtaggaattcttgttgtcttatctaccttactggtttgtcttccccagtagtaagtttttaagggaagaaagctgcaggggtgtgtgtatgtgtgtgggggcggggtggtgggagggataggagagcaatagcagagagctcctctgaagtgagttctagctttcctggagcctaggttctgcttcatcatcgaatgccccatgaaaattcagtttcagagcctactccattaccccattttcattcttgtaggaattggtgtgttcctcagattcagctcaatatcctggaagatgccaagcctgtaatgtccatcctacctctgcctgggtcatgtgttggcgctcctatccttgaaagttttttcttaaaatttcccatttttgcctgcttaactcctcaatctggatccctccaaattcgaggatcatatagacaacattacagatctttgctgatgtagtttattgctctctattgatttaaaaattttcttgaagaaataagaatatattgggatttaactccaccgtgttgtttagcaaacctatacttacttactttggagtaagatttaacagccatagaacagatgttgctcagcagaggtgtggggaagctgaataaaacccaacctttgataactctaggggagtgggtattactgagtagaggagaagtacaaaatgaggacaattcatgctctgcagatgttcctctgcattctcaatattgtccctatctggctttaacaaagaggctgctgtgtgggattaatatagagttctatcagttttcataagccctgtaaatggttctcaaatgttcctggatattttcagttaagtattagagaatatcaagggtaattatgtttttaaaatattttgatatataatattttttaatgtcaggataagcttaataaatattaatgaaggaagcaagaattaattattagaaaatcgaagattttgaatccatgtgatttcctgagccctatattcttattgccaaaaagacagcagtcattcctggacaataatcctataaggttattctgcaaagtgtgtgtatacgggaacttgcaaacaattaattgataaataaatgtaaattatcagcactcagcattcaggagttatggctcctctggattcattcagtaaatttcaatgctttgaattataagagctttggataaactatgaaaatatcccctcagtcttccctcagcattcctcagtggagatgattttagtgctcaatatactccatctactaatttacatatttgctatatgttatacttctatccattgaattttaatgcaattgataacaattaaaattaataagcaaattgtgaagagattagataaagcaaacatgcacaatgatgcagagaattgtctttatttgtttattaacaatgagaattcagttttttctttcatcatgaagtatgagaaatttcactttatgttaagaacatacagtatctggatcagaatgcagatagctgtctggggcaaaataatctttttgtgaaaaaagctatgtgcccattcattagtacaccttagtgctttctactttcatattgagcctatagttttttttttaaaggaagaaattaactgcacatccaattaataagtatgtataacaggtacatgtgatagatgaagaaattgtcagcgttgcatttagacattggagctctctctttgcagccatgctaaatgccttgtatagtatcctcattataataataaatatataattcctaattggaattttggggaatggattcataacactggtgaacggaattgactgggtcaagatgtgaaagagatcttcgaatcctcacagctttgactatctccagaatttgtctgatttcggtaataatggtgagatggtttatagaggagctgtagttatctttacagatgagcagaaagaaagccagagctgcaaactcttgtggtgaagagaatacatcactagggggaacccatccctgggaaagaagctgttcttaaaatcagaagtggaaataacttagagtaaaataatcagatgcttgctatcacaatggcattaaaaattcgaagactaggccttttggttcctttgtgaataatcattttcttattatatttactagctggtcattgtgtaatcacaaagattctttagaagttgaattaataaacggctattgtattaaattttattttaattacaatggttttccttcctttccttttttacctgagtagaatctcttgttattttctggacagaaaaacagatctgcatgtggtggtaattttastccttccatttgaatatatgtatctctgttatgtgcttgtttatctaatattaaataaaattattcacttyctaattatccacaacattgacaagctttttctttgtgccttttyattagataatttttcagggtgttgcagatacacrtaaggttagcagctactttgaggtacaccattttaatcatggtcagaaggctaatcaaaaaagtattttacaagaattgttttttaaaaaatatattaaatattatcaaagacaacgttggcatcttttgagatggtcatatttttttttcctctgctgacttcattatccaaaacaaataatgracattccttaacattcctrgaatcaagtctgcttggtcatttaactcatatatcactttaatttgttttaaattatttaaagtgagatttatagttattactgttagagtagtcatatcaaaaaattttttttcaagaacttggggtatttctcttcttttcagcattttgtataaatcagcatactaaaggactgcctgttaatgaggaatcttccatgaaggtgcttttgggaggagtgaattctctattaaatttcatcatattttacttagatattaactactataatgagtttaatatatttttaaggtcattttgtatataagtcactccatattgtrtatctgtaaaaactgtgttcagtttttcatgtttgcttttcagaatgtaggaaaaactcatcttttaaaacacttgtttaagctttacctgattactctgaagattatctgtttcccttattcttccagaattttcacaatcttttgccaattttattggattttcaagaagttattactgttagttcaaaatttatgaatcatttcttctcattcatttaatcttttaaattttcattaattcttatttctgttctcccaagtgtattttgtctctcttttttaattatttgagctcattgcttacttttttttcaatactcctggttgcattataaagtcatcaatttctaaaatgttttctgactattgtgtaaatcaagtcacatcaattttcacacgcaattgcccttcaaattatgctgccgccttgatgaaatccattcaggttttcttaagaatggtaagaatcataggcagggacagaactgatcagtgataaaataggggaaaataggtctagtggcttctggggaatacaggcatagaaccatactcactttcctagaaaacaaaataagttactctcaaacttgttaaagtttctctcagcttctgggactttctttcattggtcctgttttgcttacattcataagctgactagactatcaggaaatgacctgaaaataattgtgcaatttaaattcgagctaagaagacagagaaggaaagaaacagtggaactccttccccaggcagatgacttaataaggataaggaggaaagaagcttgctggaaacatcaaggagaaggggtcctggatgttcttacaatgtgaacatgggtctcagattccagagtcccaaacactcagaaggagatgctataatcagaaattgcaagctgattattttattggtatattgaagttagagcatgatcacattatgtttcaaggcatttgaaacactgtcatcttcttattcacttcctgaaaaagacaaggaagattataggcaagacttgacatggcaggaaatgtstaatacctcattggtttactgcggtgaggaagatgcaaaaccatccttttgccctctatcccttctacagcccccctccttaatatcattttctttgttcacactttctatgccattgcacgtaatgtgctttaaactgttgcttagatgaggacgaaaaacgattattgttaggttgttcatgctttgtggctgttggatacgttaagggttattttcagaaagatggggactgcaacatatcctgtaatagggacagtgtgaaagcagccttaatgttcagtgacaaggattggttaagtaaattayggaaaaaccaaacaatagcatcatatataattgtaaaaaaaaaaactaaccaataaacactgaagagatctaaataaactcatgtgaaagctaagaaataaatttttccaataagtaagacacagaactgaatataaagtgtggtattagtggtgggaaaattatatatagttatgtagcaataaatatttcaaagaggagtttccaaacagtaaaaagtgggagttttggtaagggtagaggggaggagaaatgaattgctatttagcttggtacatgtctattcagtgagattagtttttgttagcttaagcatgtatgactttaaatgtgaaatgtgttttaaaaaatgagataccatttaacagctaaaagtccaaggaccatttagcaggaatactggacttgaaatgctagtgtgaggcaggactgagcctgtcctgaacaaggagtgttcag

SEQ ID NO: 9959 - DNA, 337588 bp, Homo sapiens
  misc_feature (5156)..(6000): n is a, c, g, or t
  misc_feature (146893)..(146893): n is a, c, g, or t
  misc_feature (162075)..(162075): n is a, c, g, or t
  misc_feature (183865)..(183884): n is a, c, g, or t
ggtgattgcatgcagcttgggctccctactagcatggcagccttaggacagttgaatttagttgaatgtcttacatggcaatgtagggttctagtgacagtgttccagtggacaagctgacactgcattgccttttatggatcagcctaggaaggtaagcagtcatttatgctacattctatttaggacaagtgagtcaccaagattggcctagattcaaggtaagaggatatggacccaatctttcaatgggagtgtcgaatttatgacaagtttttcaaaccatcatagatagtatttttggccttaagactaattgagatcacctaggtaaygggtgtagctagaaaagaggtgaagttctgagccctgggccactccagtatttgaagatcaagaagataaggatcatccagygaaggagactgagaaagagtggccagtgaggtaggagaaaatcaggagagtgcggaaattaagtgaaggaaagtgttttagttaagagaagtgatcagcactgtgaaatactgttaaagcggcaaatgagatgcggactgaggactgcctattaactttggtaatgtggaagtcactggcaatcttggccagagcaatttccagagtgtggtaactgaattcgtcaactttcacctccttggctgccagcctctrtaggtcctgggtgtgtcacctccactcccacctcaggaccgaaggttcacactggcttaattggtttggttttgtcacyacacgttgcaatacagtctttatcaaatgttttctgctgatagaatttatgaaagaatgccacttatctttgcagtgttcaaatttgctaagtagctctaatagccgacaatatctgtattataatgtttgattctaaacatattttggaaagtcccatttatagtagagctttagtgagagattttaaatgataaatttaaagatagggcaagatggacaagatccattgacaagcaagtggaaactattagtctgtatacctaagtaaacctgccctaatgagggttggattgttttttaacttcttgagggacaaaacaacaacagcaacaaccaaaacaaaacaaaacaaaaaacaaatttgaaaaggaaaaggtaaaaacttctcctatgtttaaataatgccacgtcaaaatctacttaatggttgttcagagataaaacatttgttttattgattttattatagtttcggttaaactataactgtgttgattatatgtgtgcaaattctgcctgtttgctcttgcattcatttcttacccattgcctgctctactctgtctttggggaccagtcatgcagcctccctttcagaggctccgtgttagcttcaaatgacaggagatttgtggtaagaggattctcctcccctctctctgactatggcagcctcccctgtagcatttgcatctcttctgtggctccatctcccaccagccctggttttagcttccaccagcctaggggtgggaatagcttcctgctgctgccaaactgggttacctgacttgccctgcatttcctcagctcttccaccatccatggaaccatgtgtcagaattaaggtttctctggttttggtcgggcacagtggctcacgcctgtaatcccagcatttgaggcgggaggatcatttgaggtcaggagttcaagaccagcctggccaacatagccctgtcactactaaaaatacaaraaaattagccagatgtgggccaggcgcggtggctcacacctgtaatcccagcactttgggaggctgaggcgggcagatcacaaggtcaggagatcgagaccatcctggctaacacagtgaaaccgcgtctctactaaaaatacaaaaacttagccaggtgtggtagggggtgcctgcagtcccagctacttgggaggctgcagcaggagaatggtgtgaacccgggaagcagagcttgcagtgagctgagattgtgccactgyattccagcctgggcaacagagcaagacttgtctcaaaaaaaaaaaaaaaaagaaaagaaaattagctggatgtgatggcatgtgcctgtagtcccagctatttgggaggctgaggcaggagaatcgcttgaatcagggagatggaggttacagtgagcatgtgatcacgccactgcactccagcctgggagacagagtgagactttgtctcaaaaaaaaagctttctctggtttaaataaataggtgatttctgcttttttggttgaactctgatataatcatgtgcgtagttctttcttttgccctcatatcaacttctaatgcccaaatatgtgaattaacaacacatcccacttcttccttgttacaataggaaggaaaagttgagtttatagaacctgcagattttttagacctcacttgctttgtgattaaagccatgggcactggcatgagacaggcctggtgttgacttgtagctcctgtgtcaattactagttgtgtgatctttcacaagttaagatctctaagcctcagcttcttccatcgtctgtgatatagaggtaatttccctacttcatatggttatgatgattgaataaaacatgagctcaaactacccaggacagtgtttacaggttgttaagtgttctgtaaaggaagcaattattaatcagaaagtttcttttttatatacaagcccttgcagttgatctcactcatgtcaggagcctgacatgaagacaggacaggcatttgctggcattttatcctgggagggtactaagccaagtcattcatttgcagggtcaggatgtggctaggctaaaaggagatgtggtaaaacatcctcagtgttgctatacattaagccctactgtggcacgcaccttgtttttggctccgttctccagcaatgaccctatagttattctgaagttagatataccaaggtgagagtgaggctgactgttataaatattaattggtggattaattctcctgcttttagccctgaattggaggattagttgaagagagcttgtattggggactaggcttaatgatttctgtcctgccttcttctttccaccttcctaccttcttgtcttctcctgtcctctttcttttctgaatggtcagattaattcccagcatcttcataaaacattctctgattatttcaaacaaattgggtgtttgcagtggtatacatctaatctccaggcccccaagcagaatttcacaaagaagacctcctccagactatttttccccaaagaataccctgcgaggcagcctgtggcactcttgttttgcaggaacacttcaagcactgtacagctgctgggctgtgcctttctttggcttaagaccggtttcattaacaagcatgttcacacttcarccggaacatttaaaataacacccgcacaatgtgtttagtgtctagttaattattaagtctctgagcttgaattattcaagcaaaattgattgggttcaagctccttccttctctttgtgtgtgtgttttttaaaataaaaataaattctgctctctactttctaaataatgtggaaagggttatttagcaaccatcaataccctggactgtgggtggtacccargcgctaatagaataggtaaagaactgacagcttgactcttttgttaaaaaaaaaaaaagtatctacatctcatatacttccattgtcaattagcatttagtgagacctaacatgttttaggttctcctttaaacttctttctagttatttgtaagttggaaaagcaggtatcttggagccatttctttagttaaccgtacttgaaaaagcagaagaaattgcttccttctttgctaccgcatcttatggtcaaatgaaactgttaaaattggcttcaccattaaaatccatgttgttgaagaatgtttgttgaactgaaaaaatgtccataatatattgctaattgcaagcaagaggctataaaactcttttattatgtatcatttttgttmaagtgcataggaaaaagacttgaataataaacaccaaaatattgcttattatctgtgttaggattaaacttttctactacttttagaattagacaacacacacccatataaagatgtcatggctggaaatgactgaccttttgtttgaatctaagtatcattcatgtcaagaccgcattgaaaataatgctgttcttaagccaggcaagtgtagacsttgtagatttcataaaagattcacactatttcatgaatcacaacttgaatcgacttctgttagccttcattttacgtctaggccctcatttctaattcttcctcagcttccatattatcaagatgtaagatgcaattgtggacatgaacatagaaacacaaccgcctcacaggtgtggggaaggaatataaaataattgtattttagagaacgaccataaaggagatggcaattttgagagaaagtaacagaactgcaatgacctagttttgtggtgttaatttaaatgtggcatcttccatgagaattttataaagggagctctcctaaaaccgagattcacaaaaacctggaagggccctacagggatcaggtgccctakctattcagcgatttgcctttgcttccctaattcctgcattgtgccactgggttacaagtgtgtgtgcgcrtgcacacaggggtgtaggtttgatgacagtggtgaactgccttgactgccttcacaggctgaatcccccgcaggcagtaaccatggctagggaaaaacaggcagccgckaggacagttccggaggagacaacaccaggctcccgtrgggaaacttttgggaatggagatgggggattccatcctttgcgtgcagacccaagacttcgatggtagctcggacaagtctgtcattgtttttgtcctgggaaatgacacacgaagtgctgtaattagacacctaagaaacgattactctggagtgtgcgcgaaccgaatctggggggccggtggggagcaggtaaggggctgaaaggcaccgtctcctccagctctgtcggaagcctaaagccctctgcttctgggcgcccttaacaaacgcgccagacaggtgatgtctccgaggacgagcaggagccccccttcgcgnnnnnnnnnnnnnnnnnnnnnnnnnnnnnnnnnnnnnnnnnnnnnnnnnnnnnnnnnnnnnnnnnnnnnnnnnnnnnnnnnnnnnnnnnnnnnnnnnnnnnnnnnnnnnnnnnnnnnnnnnnnnnnnnnnnnnnnnnnnnnnnnnnnnnnnnnnnnnnnnnnnnnnnnnnnnnnnnnnnnnnnnnnnnnnnnnnnnnnnnnnnnnnnnnnnnnnnnnnnnnnnnnnnnnnnnnnnnnnnnnnnnnnnnnnnnnnnnnnnnnnnnnnnnnnnnnnnnnnnnnnnnnnnnnnnnnnnnnnnnnnnnnnnnnnnnnnnnnnnnnnnnnnnnnnnnnnnnnnnnnnnnnnnnnnnnnnnnnnnnnnnnnnnnnnnnnnnnnnnnnnnnnnnnnnnnnnnnnnnnnnnnnnnnnnnnnnnnnnnnnnnnnnnnnnnnnnnnnnnnnnnnnnnnnnnnnnnnnnnnnnnnnnnnnnnnnnnnnnnnnnnnnnnnnnnnnnnnnnnnnnnnnnnnnnnnnnnnnnnnnnnnnnnnnnnnnnnnnnnnnnnnnnnnnnnnnnnnnnnnnnnnnnnnnnnnnnnnnnnnnnnnnnnnnnnnnnnnnnnnnnnnnnnnnnnnnnnnnnnnnnnnnnnnnnnnnnnnnnnnnnnnnnnnnnnnnnnnnnnnnnnnnnnnnnnnnnnnnnnnnnnnnnnnnnnnnnnnnnnnnnnnnnnnnnnnnnnnnnnnnnnnnnnnnnnnnnnnnnnnnnnnnnnnnnnnnnnnnnnnnnnnnnnnnnnnnnnnnnnnnnnnnnnnnnnnnnnnnnnnnnnnnnnnnnnnnnnnnnnnnnnnnnnnnnnnnnnnnnnnnnnnnttcaccggaatccgttgaaaataggactgactgcaaagccttaaagaaagaaggacctcgggaggagaaacgaaaagccgcctccgggcaagacttggcgtgctccgagccgaggggctgcttcaggacctcgccccctccctttcccgctggagaaattgccgctgatgcattatccaagtggtggttgggaggatttgcagcaacatttttggttttccctcccccttctatgcattctgtttttttcctcccttttctgtttttcttcttcccgggaagtgaattgctgatgcaaatcggactttattcattaatgatgcaaccggattcgtttcaggattacgttgcacgagttgaattttgaatgaaggagaagagtttttttttttttttttaaagaagtgttgactctctagttcgttgtacttttaattattattttatttaaatatacgacttaattgtattcttttaaaaatgcattaagtatatattttatggtaatttaccctcaaaatakatgtatatgggtgaaattgaagacgcttcagttaagtgaggttactggtgtgttggatgtttaattcagcaccagcattgcatgacagttgtttgaataacaagtggtttatttttaaaaccataccttttaaaatttaggttcagataatagtaaaagtcatcataataatttaaaggaaaaccagcagaaatcgaagcaaacatgtctggagaagtgcgtttgaggcagttggagcagtttattttggacgggcccgctcagaccaatgggcagtgcttcagtgtggagacrttactggatatactcatctgcctttatgatgaatgcaataattctccattgagaagagagaagaacattctcgaatacctagaatggggtaagtttgtaatttttaaagaaactgttaatctttagctggtcattatgatttaattggtatagagagttatgagtaaactctactccgttsaaagaaaaaatacaataaaaaaacagacactagttattcaagattttccgctagtttttggtaaatattttcccaggagtaraattgtgctgctcaattgttgccttgatttaaggcctagctaatgtggaacttggctatgaagaacttatgtttttaggtcaacagtaagagattttaaatcaattctgtgatgggcaaaagtggattattggttacagttgcctaatacatggcactataatagtccttcatttgaaaggtatttattggtggaarcattcagactatggaaattattctcaaaatrggaggagatattaaaatatctgtgtttgccttaggtcaacagaaagctgaaggtggtgatcagtgggttttatttcatctctacatagtacaaggaaaggaaactgctaaacatggactttccaaaaattatgtttgtaagattaaatgacatagtttaaaaatyttgtgatagtagttagagaatgtttgggggcagcttccacttgagagttagattttactcgaaagttaatttaaatctaaactggttaggtttttggcttcattcttctaaatatagatgtgatttagaagacctactgtagtggaatagatcaatgatgtgagcaaacgctccatgaccttcaagcttgaaggcttggctcaagttcttcagcgtctgctgttayatacagggcacattctaaggtccagaagttcactgttgcaataagcacgcatcgtcacccagatctgtctgtagtagtggtacgttggcttttgaaggattttggccaaatatgattttgtacctttggaatactaatcattttagtttgttcttatgctaagttcttatgctaaaatatctgttcccaagtaaaactttattttcctgaagtaaaagtcaagtgstgattgtgtctttttttttttttttttttggatttgaaatttattcaaagttagtttctcaggtaaaccactgatacaagaatgtctacacgtaataactttaattattcaatttgccagtrtaagaaggtttctagcaaygtgatgtcataaggtttaaaaaaatatgtaaatgtgaatagaataacttttcaaaacagactgccagactcatcckgggaatgtaagaaatctaaaccatctttcaagtaacttctcacttaagagtgagacaattttggctttggtactggttttgtgagtawacgtcttttatttgttgaataaartattttgtaaagcatatgtagttttacatcccatgtttcacaaattgagaaattctgtagtgttaatttttttttttaagacttaaagggttttggtacttttagagttggaacttgagttcttaagttatggttccttaatgacactctagtctgtgatttttgtcatttagtattctttcctatctgcgaagctatgggagaactctatgtaccagtagtaaatataattttaaatgatttatgataaagagaaaactgtatcctccattgccttctgattattagagtttaggtaagtagttttatgttatgagatatttcgctgtattatcagaataatttatatatattttccattaaatatgttttcttggatgttgtttcttatatatgtataagaacacctcatttatgtatatttttatataagccaaatatcaaataagtatttggctgagtattatttttattagtatggaagtctggataaagagtaaaaagaaagttaagaatggaaaaggctgtcaggagttgcgtagtgagtagtggtatttgctgtctttaagttatttgagaatttaggttaaragtgccagtctatttaagaattgaaatagatcagatgttcttcatatgaattgatamctgcattttggggaaatgtcctattttattttaattacttaacaatatgtgaaaatcagttaagactaagaatatttccaaattgtgaattgacctcagttcagtgttctaaacattattttttgggactctggtggaaatttacagggattgttgttggggttaaatttggtaatttagatttgccttaaatggtgtaattttaagtttaatttttaataattgaaaaaatattgtcttttatttaaatctttaaaagactatttgcaacaggaacgcagtattaataacacaagttgttacatatttgtgttcgttatttatattaatgaaagtgtcagctagatgctacttatctttatgctgatgatagattactcttaaagtacagtcagccaagattcttaccggctgtattcagcttcatttctatcaatttcattttattcctagttttagtccattttatttttatattggtacagttaatgttttgttcatagcagtatcaaaacaataagaaaactgacaattcaaagtcagatatgttgtttttctttgacagcctttcttgcttttggtgctgatggcttgagggaggaaataagtggaaagagaaagagaggattaagccaatgatcactagagcaagggaataaaagtgccttaagactatagatcacatttaaatttaataagatgtattatttttcatttatagtaamtagtatttgaaagactatgttttttgtctgcttagttttaagttgttgaaatgattatggtttgtatgtttgtgtatacagtaatagtcgatgtcagcataactctagaataaattacagtggagttgtagaagtaaaaataacttccacattgtaaactaatttgctagtaatgactgaattagtatatcattcgttaaatcggccaccccctactttgaaatgggaaattggaattttggggaattatttaccaatttacttaataaatgtaagataatattacttaatacaaaataaatatgcaaggctgtctgtacatggataactattttgatgctttttgaattttggactttgtaacatacagaaattatcactaaataactaattttatagcttattcagattttgtatatacatagaaaatagtctgtttaataaatttgtacctagagcatatcagcaggtactatgctttaagcttttctttttattagtatagttttaaagctgttcactttttttttatgacacgagtgttaattaagtgaggtgttgatggatatgtatcttttctaggayacttttgttcttcacatatgctgttcctcattgttagcttttcctgagtagaatttattaattaatcagtccgaattatcaaaatgttcacttaatacagatgattacatttattttatttaagttctcaactagaataatcagcaatattggttgggtacttgtttcctttatactagccacctaatattctattctaggaatgataatgagtaattacaattattttatctagtacaatgytggcacatggtagaagtgtgttcaatagatgtaatggctattattataacatttctgtttgtctctctctttttaagagaaattacacttagaggtagttgccagatgatactggttactggcattcatgatggaatagcataggagtgatgctgttgataaaattacatctaggaaaaattccctataaagtagagtgaacttaggtataatgaactagtgctgttaacccctaaagtctttgaaatacttgatgttcattagtaatttttttgtttttaggaacatcacccttttatattatgtattgatttattttagagacagggttgtattataattgtttttaggaacattactctttttattttatgtattgctttattttagagacagggttttgttagtctgttctcgcattgctataaagaactacctaagactgagtaatttatagagaaaagaggtttgattggctcacagttccgcaggctacaaggaggcatgcaggggaggcctcaggaaacttgcaatcatggtaaaaggcaaaggagaagccgaccccgtcctgcatggctggagtgggaggaagagagagaagggggagatgctacacgcttttaaacaaccagwtcttgtgagaactcactcactatcacaacacaaaggggaagtctgcccccaygatccagtcacctcccgccaggtccctcctccaacactgggattacagtttgacatgagatttgggtgacggcacaaatccaaaccatgtcaagggtcttactgtgttacctaggctggtcttgaactcctgggctcaagagatcctcccacctcagcctcttaaagagctgggattacaggcatgcaccaccacacccagcttttttaaaaaaggaatgtattgcttcatgagtgaaaacaggatgtcaggattaacactttaggaattttagacatatatttattttatatggaaatgtaaggcataccttagtatagcagtatataaaaacaaatagtgcagtatgttggaaattttatgaaatgtcccataattcctaggacttgaatactattacacagtaagctcaggctattttaggataaaataatttagctcaaataaatattttattgtaccactcttttatggcagtcaaaaatttattctctgacctttttctcatttggtacatttattgacagtatgttacgtatgtagctcattgtttttctcctgctggttgtgataggttttaaaaccaattactaagtctaaccagcatttaaaaaaaattaaagactagaatagaaaatataaagtacatcaaatatagaaggaataagtattgttgtgcaaaacattgtgttttcctgtagtccttattcccatatttcttactataggttgagataaaaatagtttgaaatacttcagtgtaggtgcagctatgctatgttgactgttaaacagtgaaaatatagacagttcattttttcaaaaaggacacacgatagattagggacttactcaagaacctagtgaagggaaagagtgtarggtaygggcaagatacagacttggaaatagatgggaagaggagacatgggggagggagaaaaagagaatgagtagggagagggagacagagaatgagaatgaatactgtgttcctgagttgctacttcagtctgacttgttgaatgatagggtattttttttttttatgattgggtatttttaawttaaaagaacttaatgggcaggggagttaatttcactcttgtatttcyttcaatggtttattgtctcttcctttgtttttttccktttctgagtttgggctaatgggcattgactttgattgattgtcagaggtatatacgtttttgagtttgagtgataaccatatgacctataaacaaaggtagtagtttcttggttttagcttctcatcacttcagctgaactctagggtagatgtaggtgaggatttgctagttctatcagattttttctcatcatttgttgctcaggaaactgccagttttaggtatcgaggaccaagaattgcttagctccttttgccctrtcttgatgagtcaagaagtctttgcataataattgttatgagagaccatcatggctcactacagcctcaacctcctgggctcaggatcctcctgtctcagcttaccaagtagctggagctacaagcatgtgccaccatgcccagctaattaaaaaatttttgtgtgtgtggagatggggggtctcattatgttgtcctgactggtctcaaactcctgccctcaagtgatccgcctgccttgggcttccaaagtgttggaattgcaagtgtgatcatctgcacttcgtgtgatttttgtttttgaattacccacactgtaagtatggattatcccagacacaagttttttgttgtatataaaaactccttggccgggtgcggtggtttacgcctgtaatcccagcactttgggaggccgaggtgggcggatcacgaggtcaggagattgagaccatcctggytaacatggtgaaaccscgtctctactaaaaattcaaaaaaaaaaattagccgggcgcggtgacgggtgcctgtagtcccagctactcaggaggctgaggtgggagaatggcgtgaacccaggagtcagagcttgcagtgagccgagatcgcgccactgcactccagtctgggcgacagagcaagactctgtctcaaaaaaaaamacaaaaaamaaaaaaaaaaactcctttccaaatctgggggacttccttttcttctccattaatggtgagtagaactccaggattattctttctagctagcttctacacacttccttcctatgactgccatctctttttctaatcagtacgtagggaatggctaatcttctattggctagtgtttctttatctatcactgtatgagagcagcactttagctttcatgttaacggggcacaaagacctggctccccctttccaatcccactgtttgcctttactcttcctcatggaactgtttgcttctcttttgggattagggcctcttcactctaacctccctccctagtttcaaagtgtgttctggaaatccatgggatatttaatagatgcttgagcaaggggaaaggtttatatgaataaatcagtttgggaaaagattttagacaacatttaatgttaaaaatacagcagattatcctagaatttatgaagtttatctgactatggaataggctttttttcagagcgtctggaggatggctggcaaccagtgtttcacagaatacgctttgggaaatgttcttccagtataaggtcatggttttccttgtaacttcctgagtagcagggttagaaagaaattttsagagaaatttgggatatcgtgtggattggagagagaatccaaatctgaataggttatattttacttagtggctgtgaacttcattttctgtgtgaaagtcatgtgcactgaaagataaatttaatcatggtgaaataacatgagtgatgctgttggtaaaattacatctaagaaaagcaccctaaaaagtagagtgaaatttgacatcataatgaaccactgctgtcaacccctaaagtccttgaaattactgagagatctcttaattatgaccttttcctgctctaattaagcttacttttctttatgtgtaggcatttacattaaatacagaaattgtcactttattttttacagctttcattactgtagatgttgcaaaactattgtctatctgaagagattacattcattactttgtgatttttaagaggaaaatatcatggactcatagttttaaaatcctgttacagtgttaagtattgttttttgcagtgtaacacattttggctaggccattggtttcagacttttggactagtgtgggaactttactactatttattacatccatgaagcgctgtgtttctagtgccagcaactatttatatatactgttaaggaaactagaaaatatatacttttattaaggagaaaacataattggtgctattttggcattgtgtgaacaattaaagctgtggttactattaacttttgttcagagtttttgggaggccagataataatcatagaggacaatctagtttcattgtttaaagacagacagcatataggggaataaaattagttttctygcttatttttttttttttttttttggtagagatagggtctcactatgttgtccacgctggtcttgaactcctagcctcaagcaattctcygaccttggcctccccaaagtgctgggattacagatgtgagcagccgcacctggccttttttcttttttctgatttagatttatttttctctttaactcttcctcaccagtgccattcttcccactcctgatctaattatactgcaaagtactacttatatggatgaaaacaatcttttgaaaagattgtgaattatttcagtcatgtgcaatcatgtgttaactttcagttttatttcagattgcttaaacgtcactgtaggcttaatcaaagacaaaaacaccttctgtttaatttggtctattcatagtgataacacttaatccagtttccttagagtttccatggtgaatatctacaagtagaacacctaacctgaaatgtttctgttctaaaccaayatactggaaaagagcaaggggttttggattaagactgactgctttgattattaactgggtgatttagttatttaacctccctatgtctctttatgaaaaatggacataagactaatagtttatttttctaaaaagttaaaagttggtttaggattcttccttttctggtgatttatggttgtattttgtcagcttgcttcccattctgtttttttttttttttttttgagatacagtctcactgtgttgcccaggctggagtgcagtggcgtgatcttagctcactgcagcctctacctcccgaggtcaggcaattcttctgcctcagcctcccaaggagctgggactacaggtgcacgctgccatgcctggctaatttttttcttgtattttagtagacacaaggtttcaccatgttgcccaggttcatcttgaactcctgaactcaggcaatccaccgggctaggtctcccaaagtgctgggattttaggcatgagccaccatgcccgtcctcccattttgctttttaaaattttgataaaggaataattaaaatgccatttattggtaaataataactgaartgcatagctatactaatataaggatgtaaataactattttactattaacatacatttgtatcttactgatagtattttattatattgggattgaagatgccaatatttctgtgtgactatgcaaaaaaatcttacaggataagctttttgcattggaacattttgttgttatataattattcttcagtaagtatcaagttaatgctcattcrtccaccaacaacaacaaatatgagatgactaattacattttatttttatatttatatatctccaatctgcacatcagtggtagagttctggacctcaacgcagagggttaaaatcatcatgaaaaattattgatgtgttgttcatttaggactttttatgtattgaagattatgcagcacccgtaaatgtatttgtgacctgacagtacgacacaaaygtgtggtgtggtatgtagaaacttaatgtacrctagtgtttcctaaattatatttctagagatataaatgaatattctgaaaattaagagttcagtggctgtgtaagattggaaaatagtgctttttgtatgcctctttggatattacaaagcacattatcatagaaaaagtttcaaaaagtttgstgtagaaaccatttaaactttgttttacctagaatttgcctgagtaatttaacattggaactccttatgaagaacagctgacagagtttgggaaatgctggtatatacttaaccgtaggtagtgtgagagcctttaaactggttgtgtgacagaaagtggttaataaagtcttctaacacataaattgtcacaatttatatcaatttccaaacaaaggcaaaggtttgaaggtttgcctttatcctttccatattttttarcgtatctgtttatgtcatctaagcaatattaagttggtgtggagttttgcatggggtgtatatatctttacaaagaaaggacagtgagacttgatacatgacttcgaggagtttatatgtgcamttcttggtttgcaaagatgcacctgctaagctagtgattttgtttttttccagtaaagctttattatgttctaatccagttacctctctaaccattggtacagaatttgggatcgatattgtcayggctgtgaaatagaacaatgctaattagattttatgaaagttttgtaaaagcagtatagttatcttgctacagcaagaatcccatcyttaagtatcatcgtttacttagagtggctaatgcaatgccccaagttgactcagatactattaaaagcactcaagcatctacttagaagtggtatgccctgagatttaaaaaatrcttgtttgaaaagattaggaaaagcccccgcaatgaaacagtgactaaagcccctttttgagattgtattgctagctacctgtgatctkgccctgagctaaaagcataactaacaaacatttaacaacagactaagttcgggtatgtagtgaagctgacatatgatatcataaagcttttccatactctctacttatagagattctcctagagtttatggttaaaactacaataatattttcaggtctactgtagtatctgtttctgcctttttgttgcatgcgttcgtaatgtgttacccatttctgactaatacatgctaagttgacagtttcttctaagagtcctttgctgtgttatgttgcttgaggctgtgattaagtgtgatcatcatatttgtctcttttgcctatgtacctctggtaatcccagttaagtgtagtagctcatgagttctggttttattcaacctctgtgtgcatctggctcagttgayttctctgtattaaacatgtacaaatgggttacgttcctggatcttactgatcttattaatcatgtttgtttttccattaaatactaagcaataacaacttccttattacatgtacctytaacttgaaaatactgtgaattctacacatccaagacctttgtagaaggaagcaaaaaaaaaaaaaaaaccacttagaacatgatcctttgatcatgtcaacatcctgcttaatatacttcagtgactactgaaagctttcagaatgacatttgaactcctctttagcatgccatacagaatttttaatatgatcctgtttacttctctttttcttcactttatttatttatttagttttttgagatggagtctcgctctgtcacccaggctggagtgcaatggcacgatcttggctcactgcagcctccgccttctgggttcaagtgattctcccgcctcagcctcccgagtagctgggattataggcatccaccaccatgcctggccaatttttgtatttttagtagagatggggtttcactatgttggccaggctggtctcaaactcctgacctcgggttatccacccaccttggcctcccaaagtgctgagattacaggcgtgagccaccactcccggcagatgctatgatattttaatggctgaaaaagtggtgtcaaatttgatgatggtgatgaagaaaataattttcataatccttgaagtatatgaacttcgttgaaagagaataaagtcagcttaataagaatgacatctaaaggtatgagaggacctagtaatctttgaaagaccaaccttaagagacttctctgacagcaagaaaaatgaaagagtaaacaacaagaaatgaagacgaggtttcttgagacaacaaaccacaatgcagacattatacaaatgtgagttacttttatcctatccattttgggattaatgtaaagaataagagtaatctatamagagtaatggatttaagataaaaaaatgtttgcctcagcttcccaaagtgctgggattacaggcatgagccaccatgcctggctttttcttcacttaaaaaaattttgaaataatctcgagtttacagaaacattgcaagtatagtataatttttttcctctggaaccatttgagagtaagtagcctacctaatgctctgtcatccccatatattttctgcattcttctacctaaccacaatacaactattaaaatgaagaaattaacattggtgtatattgtcatctaatctttagggctgaattgtttaggaaggagaagggaatggccacttattatgtatgtatgtgtgtgtgtgcaattttatatttattttccactgtcatcttaaaaattatttaaagttctttaagaaatttacctatagtaaaattcacttattttggtgtgtatattgtgagttttaacaaatgtaaagtcatgtgaccactaccatagtcaaggtacagagcagttccatcatccctaaaattctcttgtgctattcttttgtcccacactcatcttttactccagctataaatgaatttgactcttttactaattaaaccataactttgattattcatgacttttcacatattggttaaattgtttggaaactcctctttcactgcaccccataggagacatttggtaatgtaggttgaatgaattatgccgttatacttgttatatgcagggctagaagcagtagctctaatcttgaaacattgtatgaaactsatatttttaatgccagggacttgtttcttctttgatttaccctattttatttcaaagtaattttttccttttaaaattatttaataattagaaatagtgataataaaaattcaaaagtggtttttgtgtttttctttttttgttttttttttgagatagaatcttgctttgttgcccaggctggagtgcagtggtgtgatctgggctcactgcaacctctacctcctgggtttaagcaattcttctgcctcagcctcctgagtagctgggactgcagacatgtgctactatgcctggctgatttttgtatttttttgtagagggggtatcgccatgttgaccaggctggcctggaactcctggcctcaagtgatgcgcccacctyggcttcccaaagtgccaggattaccggcgtgattacaggcgccaccacatgtggtcaaaagygatttcttatatgagtagtcatttattatcccctagcagttggcaatttgtaaacaagtacttcatggtggtgaggtaaggagaagagggtgctgctatttaaaagaatgaggtaaaatgcagataatctcaaatttttcaaggtaaaagttcttagattaactctgcatttaactttatttgcacaatgtccatcataaactttagagtctggtgatgatggattgagcatacaaatataacttcatttccttctscaattcactaacactataataaaataatttttttaaagagtcataaacctttaaggatgataagagtggtagaagagactatagaaacaaaattttggaagctgaaaagcaggtagatgagtggtaatgacttaggaggtctgagaaagtcagattccaaattagcagtggtgaaagctgaggacctgttcagtttacttggcagaatcttcagaagttttagaaattgctatctttaggaacctctggaagttgaggtatgggtagggctaaagtacagaggattgattgaggctggtttagaagcagtagaaactctagagcaattcccctgttgagtgccattgggttactttatccctctcctcaaacaaatgttggatgttcttagtacaacagaggttttctggattgggcaacataggcatagtttatggtggacatttcatattgaaaataaggagattaagtaaatttgtatttacttctgctcccagaatgctggcaactgggattaggacaggagattagaagattagaagagtcttgtctggagaatytgactctccccaagaagaaagaacttagagatgcagatatcagaggcttctcagtaaagggctcaggcagtcacactacagtgagatttgttatcagggggtttcacccaaggatttggagcttcacatcatgttttagttctcgtaattaaatatgaatggaaaatagaattgccagacatytgaggatcctcaaagcctctatagggtacagtcccaaacaaagaaagcaacccacatgaaacatacttttcagggaaagcataacttcgaaaaaaaaaaaaaacccaaaaaaaccaaatcacataaaactatcagtattttccagagatgagagaaaatcctgcaatcatgaagtcaggatgccataaaaaggagcaaaagagaatgaaaaaagttctttgaaattattatgatagctaaaatggaaacctcagtacaagattggaaagtagaaaagtggagcaaaaagccacagagagatagaaaagaggagatagaggagaaaattagaggaccaattgaggaggcctgaataataatctgatgaatgataggaattctraaagagcactttgaaagaacagagggggaaaaaaatcatcaatacaagaaaatgttgtagaaccaaaggacacgagttcctagatagaaggggcctaccaagtacctaggtcagtggatgaaaatagattcgcatcaaggttcagaatcaatatattttgcaattcctaaaactctggggacaaacaagagaccccaaaaggttccaaagagtgtgaatacaaaggataagaatcagaaactctttggccttttcagcagcaactctagaagctagaagacagtgttcatattttgaaggaaaacagtttctaaactgaaattctatatccagacaaattcttaagtatgagggcgggataaggacatttttaggcatgaaggtgttaaaaattctgtaacctgtgggctacaaatggtttacttaggataaggagcttcccaggatgtgggacttctactaaaaccagcacagtcttaggcaaactggaatgagttgattgccttagctgcaactaggtaaaggagtgaatgaagatgaggaagtaacaggatataggaagcaggagatacaatgcaggagagagtagaaaggatttcctaagactgtaatgaagggagaatacaaaatgacaactttgcaccaagcatagaggtgaaccataacagacaggatgcagttcagaaggtttcaggacagacttaagtatctgatatggatgaacatcttgagaggagattwgraaatctggggagggtttaaggttgcttaggaaatgaagcaaatgagaaaacaataagaaaaatagaaattaggaaaggaaaagtaataacttatatggttatagtaatggaaacacttaatatttatctaactaaaattatgctgtaaccatattgggaggatggtatggaaagggaattttttttttggtggaagtgatagtaggtacggggcgtaatgtttttcctaaatcttaagtgatgattgaatgtgtatttatgaataactgataaaaatraaaattttaaaaacagctgtagtttttacagaattaaaaagtctaaatccggctgggcacagtggctcatgcctgtaatcccagcattttgggaggccgaggtgggcagatcacgaggtcaagagattgagaccatcctagccaayatagtgaaaccctgtctgtactaaaaatacaaaaattagcygggcatggtggcacatgcctgtagtcccagctaccctggaggctgaggcaggagaatygcttgaacccaggaggcagaggttgcagtaagccgagatsgcgccaccgcactctagcttggcgacagagtgagacttcgtctcaaaaaaaaaaaaaaaatgtctacatcctttactcctacttcactgatcttattttcaaacttgtgtttttctttttgaggtatttctaagtcctgtaatcgaggagctcaaaactggatagagggaatgggaaatttgtgttagaatttatgagtatattctttgagcagatcagtctttttcttcttcagttatttctctgttcttatgatggcaatttatagtctttgtcttaggagtttagttgattcctaaaaaacctatgtaggttaaattcrttagtgatacacagatacttctgtgaacacacagcaaaagaacactaacagagcagtgaagacaaatcacacaaatgatgtaaatgacgcaaaggatggatatgattattatttcttaaaactaaggagctgccaggtgctatgaggaggcatcagaatacgtgtcaactatacaactgcaaaggtagctttggtttagcagcgcttacccgctcttctgatgttcaagttgatacttgtaaatgcaaagaaatgccgtgtgtgcgtgtgtgtaaattctcatagcttttggagtacaagaggtttttggttacatggatgaattgtatagtggtgaagtccaagattttagtacactcgtcacctgagtactgtacattttacccaatatatagttttttatcccttaccccctttcttccttctcccttctgagtctccacctccattatactactctgtctgcctttgtgtacccatagcttagctcccacttataagtgagaacatacggtatttggttttccattcctgagttacttcacttagaataatggcctccagctccatccaagttgttgcaaaagacattattttgttctttttatggctgagtagtattccatggtatgtgtgtatatatataccatatattctttatccmtacattggttgatgggcacttaggttggttccatatctttacaattgtkaattgtgttgcaataaacatatgtgtgcaggtgtgtttttgatgtaatgacttattttcctttgagtagatacccagcagtgggattgctggatcaaatggtagatatacttttagttctttaaaaaatctccatacagttttccatagaggttgtactaacttacgttcccagtagcagtctataagtgttcgcttttcaccacatccacagcaacatctgttgtttttgactttttaataatgagaggtgccttatattaaatgaaattcctcttgtaatgaatttcaacttctcctagagaaaatcccttgaaaatctaaagaactgaccagctcttccctacatgtctgttttagggcaaggttaagagaagtttgtttcaggggattgctgaactgtaggactctgagaaaactggtccgctttctaactactcctgagtcaggttttcagaggacgagaatgacgtctttatttactttaacattatgactctttacattcagatgcatattgaaaaacacaccccaaaagaaattattattgaattatgtaatactttgcttccttgtatgagaaatcattctgtttagtttgttgactacttctgttgctcaaggtcgtttttattttccagactgtgggtcatttattttgttcatgattgcatacctaaaaatttatcttgcatyttatctaaagggaaaaacatcaaaatagtagcaaagccataaaaaatttacataataaatctgtaatcattttagtttctaaatttaatgtctttgctgagaatcaatagaatttaaagcagatattaatcagtgtatctagataacattatatatttacagcttaaaatagggttaggatgaaatatttatgacagtttagtatattttgttttcaattaggtgtattactaaaaaacatgtaaaccattccatttaaaaaaagaagtaaaaggagatgatgtaatataactagtatttggaaatgacaaaggaattttccctccagctgtagaagtatttcctttgcaacagtgtttctcatttatgtttcagttctcagatatacaaagatgattgctgtgagagggcattagttttttracagacaattaaattcagtttttgaaaaccctaattgtttagtgttcgtcaaccctaagaatttttacataaagctgcttaaatattagttaaaaagtcaagtttcattttctttccaaaattctctgcacatggctcaaactgtatttgagtctgaatttcttttgaaaatccagtaagctttatgaagaaatgccaagaaaatgtttagttcaaatttactcttctttcatagaatgactttcactttaactgtttcacttgatttctatttatgctactctacagctgtccatttgtgaaagttaccagcctctagaatgtaaagagctatatatgattctattctagcatattgaggtgaagttatagatgagcagtgtgttttgttcagcttagttttgattaattttccttttttatggatattgaattatctttataattcagtgaaaaggcagtgtttgagatatttcatgtgcttkcttctctgtaaagttctcagtttttgtcactgaaacctataagccactgagckgctgctgtctgtatctgcttatgccagatagtccttggctttcatttgccagaatgcagcaagctttttgttatatagcttcaaatggcttttttccttaaaagaagcatgtttttgctggagaagtatgaatctatattaacagttgattataaaggacaaaactctgggacagccaaatggaagtgatgcgtagggcaaggtttagggtaagggagtagagggggaggatttccatgccctccttaattttcttctgagtttttaggttatagcaccaacatactaatgacactagcttgtttatatacatgtttagccaaattatgaaaagtaaaagaaactatttacctgaggatattattacaaaaaaaatgcctcaagttgagtaagggcaattataatagtggttgaatttctggtactattttgtcataatttcacttgttattttttatgtgtttgtgtatatttcttggatgtgctttaactgttgcttgtcttcagtaccttggcaatatatatgaatttggaattgtggcacgactctggggagggaggtattctggaaaatgccatatgtgtgaaatttttacctactacactgagaaagagagattttttttgagacagataaaaaaaaacattgtatatagtcacactgctttttctcagtctgctttcttttggtgtatgtatatatttatgtatgtatatattatgtatatatatgtatatatatgtatatatatgtgtgtgtgtgtatatgtatatatayacacacacacacataaaacaaaatttgccattttagcccctttaaagtgtattatttggtggtgtcaattacatttcaaaatgtataacatcaccactatttcaaaaaccttttcatcacctcaagcagaagctctgtatccattaaccaacaactctacattctctcctttccccagtttgtggtaacttctgatctactttctgtctctctgaatttctacatattgtagatattttgtataagtggaatcatttaatattattttgtgtctggcatatttcatttagcatgctattcgtaaggttcattcatgtggcattatgtgtcagaacttcattcctgtttatggctgaataatattccattgtatggctataccacattctgtttatctgttcatttgttgatggatacttgcgttgtttccaccttttggttattatgaataatgctgcartgaacattggcatacaagtatctgtttgagtccctatttttaactcttttgcatatatgcttaggagtgatatttctgggtcatatagtaattctatgtttaactttttgaggaactgccaaactgtttttcaaagcagtggtaccrtcatacattcccaccagcaatgtatgaaggttgagttttgctacatgcttgctaacatttggtactttctgttttttgattagtcattttagtaggtatgaagtggtaggtggttcattgtggctttgatytacttccttaataattactgataacgagcagcttttcatgtgcttattggcaatttgtatatcttcttyggagaaatgtctgattaaccctttgcccactttaaaagatagactatttttagaaaagttttaggttcacagtgaaattgagcagaaggtatagaaatttcttagatttccagcctccccatatgcatagtctcgcctattctttgtctatttaaaaattgcatttatcttttgttgttagagttcttcatacattctggatattctttgtcatgtatattatttacacatattttctcccattctgtaggttgctttttcactttcttgataatgtgcattaatgatatacaagtttttcattttgatgaaatccaatttgtccctttttttttttcttgtgcttttggtgtgatatttaagaayccattgccaaatccartgtcatattggtttaccctttgcttttttccaaaagtttttttttttttttttttgatgtggggagagtctctcwctgtttcccaggctggagtgcagtggcacaatgtcggctctctgcatcctccgcctcctgagttcaagcgattttcctgcttcagcctcccaagtagctgggattacaggcatgtgacaccatgcccagctaatttttgtatttttagtagatgcggggtttcaccattatggccaggctggtctcgaactcctgacctcaagtgatctgcccacctcggcctcccaaagtgctgggattacaagtgtgagccactatgcccggcctatttttttcccaaaagttttgtgtttcacttcttatatttgttatgaatccattttgagttaatttttatatatgatttgaagtargtatccaacttcattcttttccatgtggaaattccaattgttccagatttgccatatagaaaagagattattctttctgtattgaatggactcagcatcgttgtggaagatcaactggccttagatgtttggatttttttctagactctcagttctattccattgatctatatgtttatccttctgccagtaccatacagcctggattgctatagttttgtagtaagttttgaaattgaaaagggtaagtcctctaaactgtttttccaggttattttggcttttctgggctccttgcagttccatattgtgatgattggcttttccatttctgcagaaaaggctgttggaattttgttagggctcttctttattaacaaaacccgattgactgtgttttctagctttatttccagttaggtgtggtcacgtcagtagttctggctgattgatgtacaaagtgatgtgtgatgcttaccagaagcttcattaaaaggaaggctttccccactttattcccgtctgctgcacagaacacatgtgatgttttcagagcttggactgtgatgatgagggcatgagggccatactccaaggatggcccagcagtgagctggaagcatcctggattcctgacagctttgtgaaactgccataccagcattggaccttcaaatgtcttttacttgaaaggaaaatatattttcattttgtttaaattggggttgagttttttgttagagctaaacttaatttatacacttttcctactacattaacttggttatctcttcattgtgtgtactgtgtgagggagtgagataatatattaccagaattgctggaactatacttaatttaaattttttttaatttcatgctgggcatggtgtttcatgcctgtaatcccagcactttgagaggctgaggtgggtggatcacttgaacctaggagtttgagaccagccgggcaacatggtgaaaccccatctctacaaaaatacaaaaattagccagatgtggtggtgtgcgtctatagtcccagttgctctggaggctaaggtgggaggatcgcttgagcctgggcagtgtaggttgtaatragctgagatcacaccactgtaccctagcctgggtgagaacctgtatcaaaaagaaaaaattatatttmatatatatgtattgtgaatttgactttaaaattatttttccttagtatgtaatactaaaacgttctttaacttaaatgtagcctcaacatttttttaaaaagcagaaaaaaattttcactgctgtaacatagcagatttgtcatttttgtgctaacccgttgaatattttttatatacatacttagttttctacataggaacatttctggtatttttataccttgcttttttttttcacttaatgtgataaagtgatctagtgcaagttaattaacctctttttttttttttttttttttttttttttgagacggagtctcgctctgtcgcccaggctggagtgcagtggcgcgatctcggctcactgcaagctccgcctcccgggttcacgccattctcctgcctcagcctcccgagtagctgggactacaggcgcccgctaccacgcccggctaattttttgtatttttagtagagacggggtttcaccttgttagccaggatggtctcgatctcctgacctcgtgatccgcccgcctcggcctcccaaagtgctgggattacaggcgtgagccaccgcgcccggccaattaacctctttttgcttcagtttctttctctctgaaaatgggaatagttattacacatgcttcgtggggttgttttgagcattaaataaaatattggagtaaaatgctagaccagtgcccaacatgtagtgaattcctggccctcaatgaatgttagttatcattaccattattaatatcgtgtgatcttaagctcttcttctatattattgtaaaatcttgataattacgctcttcaaagtctgcttattatttcattaaataaatacacagttatttattagatactaaatttttttttttttgagatgaagtctagctcagtcgcccaggctggagtgcagtggcgcgatctcagctcactgcaagctctgcctcccgggttcatgccattctcccgcctcagcctcccgagtagctgggactrcaggtgcctgccaccacgcccagctaatttttttgtatttttagtagagacggggtttcactgtgttagccaggatggtcttgatcttctgaccttgtgatccacccgcctcagcctcccaaagtgctgggattacaggtgtgagccaccgtgcctggcctaaaatttttttaaacatttaatttacttccatttatttggtgttacaaataatgctattataaactgatctatgattaaatgtcattttattacaagctagagacacttttaaaagcagcatttatcccttattttataaggtagtgaagaaaatgtgaaatagattttgtttttctaaggcggagttttgttcttgttgcccaggctggagtgcaatggcgccatctcggctcactgcaacctccacctcccaggttcaggcgattcttctgcctcaggccaacctcccgagtagccaccaygccyggctgattttgtatttttagtagagatggggtttctccatattggttaggctggtctcaaactcccgacctcaggtgatccgtccacctaggcctccccaaagtgctgggattacaggcgtgagccactgcacccarcaatagatctttttttttttttttaatgactttaccatagtagctttgtatatgaatctgatggcaattgggatgtagatatyttttgcaataaataataatagtcacagattgtataaccagttctcataacacattataagttctgtaagcttraggatttagtttggtttaattctctttttgtggtaatttttagaaactgtaaacatttaagtgttaaaaggtgattaagaatatgccatagtcactattttctggcatttatcactgtttttaattatatatatttgcaattatttgattattattgatcttccttactagagcagggactgtgtctgttttgcttaccagctcttccccaatacctaacataagtgcttggtgtattgtaggcactcaataaatatttatttgattaatgaaagaattggtgagtgaacaacggagttaagcaaataaatagggaataaaatgttttgatacagttaaatctcaacattgagtcagtagctatgatgaagaaataacatctaaaactccaactttagatacaattttgcagagatttggggggaatatagtaaaatataacaaggagggcaatttagagatgaagtatttaactctagggttttggttttgtttgaatgatagtggaaacatccaggtagaatgttcaggagagagaaatatgggccaaaggtcaaagggtagtcattcaaataatgacagtaattaagttcaataaattattgaatgtctaccttgtgctagctattgtatagttgtggaaggtaggtgagtaagacrtattcctcataataataattcaattaaaatacctcttaccctgataattctcttcacaagtaaagttttaacaaagttagaattttgattttagaatttagtggaaagcaatgattatgaccaaattatcttaataccttgttgaattttcactgtatcttctaagtgataaagatgattttaattcagtgaactttgtagttgagacttttgttaataaaatatttttaaaaagttttactgccattctgtgtagaaataattggarcaagatttttaaaaataatcattatgatacctatcttttatctttctgtggaaaaaatatggaaacgcttaygtctctagaggtaaatatttagtgaaatgtggttttcatttgaaattaaaattaatcatttttgatttcatattttttctttaacactatgatactttaaaaattattggctgggcttggtggctcaygcctgtaatcccagcactttgggaggccaagacaggcggatcactaggtcaggagtttgagaccagcccggccaatatggtgacaccccatctctactaagaatacaaaaataagccgggcakggtggcgtgtgcctgtagtcccagctactcgggaggctgaggcagaagaatcacttgaacctgggaggcagaagttgaaatgagccgagatcgcaccactgcactccagcctgggcaacagagcgagactccgtctgaaaaaaaaaaaaattatctgttatagacctcagggctatttgttatttttaaattgtctttaaaatgaacttgaattttgtgaacattgtactttatttattgaatttatgattctgtagaagaaacaggtcaatttctggtggtacatgtcttaacttcagtattggaataaaaaaagtttaaatgatagtacagtaataagaggtagctgattacacaatacaaatgttgagggttaatagtgtgcttttggttggaacagaaaacctgatgcaaactggtttgaagaatatggaaagttttactagttaacctatcaagagcaaaagtggggtagacttcttggtttagtggctytatagtattatcaaatatccaaagtctttcagtctcactgttgttgtagtrtagatttgggtgttttttttgtttgtttttgtttttaatttttgagacagagtctcactctgtcacccaggctggaatgcagtggtgtgactttggctcactacaacctccgcctcctggattcaagcgattctcctgcctcagcctcctgagtagctgggatgacaggcgcgtgccaccatgcctgggtaatttttgtatttttagtaragacggggtttcaccatgttagacaggctggttttgaactcctgacctcaagtgatccgcctgcttcggcctcccaaactgctgggattacaggcatgagccaccgcgcccagcctagacttcttttttaacactgttttccctcagggttatcagatggcaccggagcaacatgattttttgttcaggtggggaggagggaggaaggctacctgtagccctcttatttcatggaagcacctagaaagtcttccctccattctcaatgrccaaaattaggtctcctctctattcctgaaccaatataattggtattggtgccaataagattattgaggtatatgggctgtgtatgggaagtgcagtgatcttaacaaagttaggattctgtttaggaagacggaatggattctgtctagacaacaaacagtctcccctatagttggcattgtggcctacmgtttatttgtatcattttmgaaaggaatttttagtgctatagtaaagctttatgctatactttgtgtttccccttcccaccccaccacctgtaactaacaccttccctaataatgtgtttttgatttagggattctgggccagtgttactgtgtgtaagagaggaaaggatgcattatagatatgtataattaaattttaattttaaaattataaatagtcattaaaatgatacctttctcagccatgccatcctttgttggcatatccctcctctgaatgcctataaaatttgtttatagtgctcatttggaaaccaatatgaatcttggattatttattgtctttttatgtatgtcataccaggatcatttcttgtatatctaggacaaataaattctattatatctgtgttactggtatctgcagaaggtgtcattaagagaagatttaaagtcaattcaataaattttttaaatgtacagtaaagtattatgtctataatggagtgtagcagcaatgaagatgaacaacatgtggttccttccctaaaggaattaaacagaattaaatgtaataaagggggcagtagagaragattactttggtgtggggagtagaaaggctcaatcatggaagtgacattttgagcttactcttaaggaattaatgttttgtgaaacagagaaaagggggcattttagatggaaaggaagctcaaaggcatgtgcttggagcatagtacttgggtgcagttgaggcatagtgggaaataaagttgaaatggtggattggggccatttcagaaggcttactacttaatttgaatttgactctatggacagtgggaagccattgaatatatatatttgtttttatttttagaggtagagtcttgctgtcactcacccaagctagagtgtagtgttgcagtcatagctcactgcagctttaaacttctgggctcaagtgagcctcccagtagctgggactataggtgcacaccaccatgcctagcttttttttttttttttttgtagagacagggtctcaccatgttgcccaggctggtctggaactcctagcccyagtagtcttcccactttggcatcccatgtatttctttttaaagcaagaagacttggaaattattttccgccgaaacataagtacccttaagattygttgttttttgccatgatacagtgtttgtggagtacacacattaattcatttattttaacagatatttattgcatacctcctatgtgacagacataaaaatctggagatacaacagtgaacgagacaggcagggtttctgctctcatggagcttacattataatttggggggaggtcaggaaatagacatgtaaataagattatttcagataatggtaagagctataaagaaaataagaggatgctgtgacagagtgttttgggtggtaatttagatgagttggttagtgaagacctctgaggatttgatgtttgaactgatgttaaatgagaaggtgccagccatgtgactatcttgggtaagagcaccctaggtagagggaacagtaagtgctgggtccttaagatggaaaaaggaacagaaggaagaccagtgtggctggattagagtgagtgaaggggagagtggtagggtatgaggtttctcctggaaaggagtttatattttcctctaagggttaaagccagtgcagagttttgagcagaagggtgatatctagatttatgctttaaaagggtaactgtggttgtcatgtgaataaaatcatgccagttaggacctttgtagcagtacacgtgagagagagagtagtgccttgaagttgggctgtagtaggggagatggagrtttgtgatatcattttatttaattttttwattttgaattattattattattatttttgaaacaagagttttgctctttttgcccaggctggagtacaatgacatgatctctccccactgcagcctccacctctggggttcaagtgattctcctgcctcagcctcccaaatagctgggattacaggcacctgccaccacacctggccaattttgtatttttagtagagacggggtttcaccacgttggccaggctggtctcgaactcctgacctcaggtgatctgccygcctcagccttccaaagtgttgggattgcaggcatgagccaccacacctggccttaaaaattttttttttgagaccgagtcttggtctgtcacccaggctggagtgaaatggtgcagtcttggctcactgcaacccccgcctcccgggttcaagcaattctcctgcctcagcctccccaatagctgggaccacaggtgtgcaccacgcccggctaatttttgtatttttagtagagatggggttttgccatgttggctaggctggtcttgaactcccggccttaaggaatccacttgccttggcctcccaaagttctaggtttacaggcatgagccactgcacctggccgatatcattttaattttaagatttttcatttttttattttttgaggcaggatctccctctgttgcccaggctggagtatagtggcacgatcacagctcactgcagcttagacctcctgggctcaagtgatcctcccacctctgcctcccattcacttctgattgcttttattatttcatgaagttgataaaatgtaatcagctgaggatattgggaaataatgggtgattagacatttagtgagagaagagaagatttgtgtatgtttgggatcccacagaccatccccatgttaggtgctttactaggaggactgatgggacaagcatgtaatgatactcatagattaatgtttattacagtgaaaagctacaaagcaaaatcaacaaagggaaaaggctaatggagcaaagccggaggaaaccaagcacatacttccaaggatcctctcccattggaatcatacaggatgtgtttaatcccctcagtaatgaattttaatgtatagtgtgaagtattgtctgccagagaaactcattgccctacagttttgaatagctagaaggacgatgttgaacattaccaacacaaataaatgataaacgtttgagatgatggatattgtaattaccctgatctgatcaccatacgtcttatgtattgaaacatcactgtgtactccatgaatatgtataattatttgtcaattaaaaaccctgggcactgagtttatttttttattggtggctagtcacgtaggaaccctctgcctagcctctgcctagcacatactgaaattcaacaaggttgaagattcaacaaggtattaagtaatttggtcataatcatattgctttccattgaattctaaaatcaaaattctaactttgttaaaactttacttgtgaagagaattatcagggtaagaggtattttaattgaattattaatattaattgarttattatcattccttctggacttccagaaggatagtagattttcagcataaattatattatttgcagaaatagttcaggtacagtgagccattcttaccagttaggattgtgagaacactcccaaaatctaagttcccagatgccagccatagaccaaccttgcaaataggccttgctaagaaatagcagtctcaggtctgtgatgtaactcttttccgcacaatacgaaacagtacttttggagcattggagagagaccatcctaggagagagtattgagattgtcaggaatgtgtgttcatgtaaaatgtgtgatgatgacttttatcagcaagcattgatgtagtttggaagtttttccccaccaaatctcatgttgaaatgtgacccccaatgttgaaggtggggtctagtgggagatatttgggttatggagacagattttcatgaatggcttggtgtccttcctgtggttaatgtgtgagttctcrctgtgtttgttctcccaatatctgattgttaaaaagagcctgatacctccccactccccattgctcccgctcttgccaygtgacatgccagcttcttttctccatctaaaaccgcaattacttttgcatcaacctaatactatgaatgaaagcttcttgaagccctcaccataaacagatgctggtgccatgcttttttgtacagcttgcagaactgtgagccaaaataaatctctttgtaaattacccagccattcagatattcctttatagcagttcaaaatggactaatacactaatacagaaaattggtaccgggagtggaatgttgctataaagataactgaaaatgtggaagtggctttggaactggataacgtacggaggttggaagagtttggagggctaagaagatgataggaagacagggcaagtttggaacttactaaagactgattaagtggctctgataaaaatgctgatagaagaatggacaacaaagcccaagctgacgaggaatttactgggaactctggagcaaagttcacccttgttacaccttagcaaagaacttgactgcattgtgtccatgttctaggactttgtgaaaggctgatcttaagagtgatgacctagactaactggcagaagaaatttctaagcaccaaagcattcgagaatgatatgactgcttctaacagcctgtgatcaaatatgggagcaaatgaatgacttaaagttggagcttataataaaaagggaaacagcataaaattttggaaaaatctcagtctggtgcagtagtaaagaaggaagaagtgttttcaggagaggaatccaagggggctgtggagcaaccacttgctagagagagtagcatgatgaaaaggtaggtaagtgccgatattaagacagtgggaaaaaggccctgaaggcatttcagaaatcttccaggctgtccttcccattataggctcagaggcttaggaggacagaatggtttcaaggggccaggcctagggcttcaactgccttgtgccgactcaggatgctgttcttctctctgactccagctggattaataaaagcatgattgtgattttttttttctttacctatatccaagtactcaggagtaggcagagttacagttttaactagggtttgctgacataatttgaattgttcagaaatgaggtggctcctttttttacactagcrtgagacagagaaacaggtggagattttgtggattttattctcattcgataatcccatggtaaaccctaaatgatcctctttctagtgacaggaccatctaggactcacagaggatacaatttgtatggaataacctgtcaagataagcagagtatcagatactgacagtccttcattgtgacctcttatgggacgccattacctggcttggttttggcctagtaatttcctggctagatggatggaatttgggtctgttatttcaggggcatatggatagaaccaataatgtaaatttttgtttgcttttcataggcaatttgtggttattaaataattacgtaagatgtaaagtcctcagaagaagtggtgcttaacttgatatatgcatccaaataacttagtggctttttcaaaaaatatatgattgctactcacttctagagattatgactcagttaactcaggatggaagtcagtgtatgtgagtttttaaaatgcttccctgktaattccaatgtgttcttctgattaagaatcatagttccagaccatttaatgttagcttagtccttttataagttttggactctccattaatgaaactgtgtagatagtttgtattgctacctgttttgcacaagaaacaagaattttgtcaggtggggtgtgtgtctggctgggtagactggagaacgttggaccatgtttctctatccagaggtatgtaccagagaatgctttgatccagaacaaaggggatttttttttttttttttttgagatggggtctcactctstcacccagtgacagattgcagtggcacaaccttgggtaactgcagccttctcctcctggaatcaagcgatcttcccacctcagcctcctgagtagctgtgatgacagacgtgtaccatcatgcccggctaattttttctattttgggtagagacagggttttgccatgttgcccaggctggtctcgaagtcctgagctcaagtgatccacccaccttggcctcccaacatgctgggattacagatgtaattaatcctggcctagaacaaagtggatttctaacagttaggggaacttgggtttccagcaagagaaaaatgcaatcaaatgttgctctgaagtttgggcttagggaccaacttagtatttctttaggaatcatagattaagaaaatgtgtacattctctccagtgctattagtattaaggttrggccctctcctggggatggtggtgggtagaatacttgataatcacctgctgggcctcagatttaaagcttacggacttacatgtggttcactggaaaacyaaccagtatttataacataatctttgagataatgtattccaaattccaaagtagttatttgtaactaaatttctagattatgactagttcataagttgtgaattgctttaagttcagcttttcatttcaaggagaataaaatataaaaaattaaatcattactttttaggaaatgcaaattcttatatttttagttayaaaatatcaaaatatcctatttartactcatcaaaccataccatcatgacatttgatgtgtcaagacaaagcattaatagaagatagtttatggwttattcattagttatttaaaacaatctagtaaagcacttaattaaaawrtatatatattttttgagatatagtctgtgttgcccagactggagtgcagtggtgtgatcttgtctcactgcagcccactccacctcttgggttcaagcagttcttgtgccccagcctcccsagtgctgggattacagtcatgcgccaccatgcccagctaatttgggcaaaatcccggccaacatggcaaaatcccatctcaaactcctggcctcargtgaactgcctgccctggcctcccaaagtgctgagattacaggcgtgagccaccatgcctggcctaataaagcattaacaaaaaatttagatgcaagggtacatrtgcttatttattacatggatattacatgcataatggtggggggttgggcttccgtactcatcacccaaatactgggcattgtatccattggtaatttttccaccctcygtacttctgtcctctttcctttggagtctcgagtttttttcctccatttttatctccatatgtaccctttgtttagctcccacttataaagcattttgaaaataaatataattatagcataaacattttcattacaaatagaatcttcctacctggttttcatttgctttttctatttttaggtggagagagtagtaaatgattatgataaaattttataaactattagtaaatattatcatagtattttcataggatatgaagagtaagcctgccatttttttggtgggtcaatacttttcactcatttatatttctctcgtttatgtgtatatagaaagcttatataaaactttctgtagcatttaatagcaacagatttataaatgtttgcttacaaaaatatgtacaaaaagtacaaatgagactatatgtacttttccaggaacatactgttgtatcaatatgtgtattttaagtcatggtccttagagtagtgatgttctgccactaaaatagaataatagaaatctttaatttttaggaaagattaagtcaatgggtagaattttctcaatttaaagtttttcatcccatgaattataaaaagttatttaaaaaattgtgttaaaatatatataacataaaatttactattttaaatcttttttaagtgtatagttcagtgacatcaagtacatacacattgttgtgcaaccatcctgatcatccatctcagaacattttgtgttttgctaaactgaaactgtactcattaaaaatgactttactcccactttccataccttgccctctggctactgtcattctacttcttgtctatgaatttgactactcttaagtacctcatgagtagaatcataacagtatttgtccttttttgactagcttatttcactggttctgcacttgaataaatgtaagaaccactagcaaagagtaaggtagagctgtgcttctttgctgtttgtgttttacctgctcctaagcaaacagtattactgttttaaatacttgaaaaattatttatctgcatttaaaaaataacatattaatcaagatcttagataactgccggtaataccagagagcctgttgctgctgcagtgtgtgctagaggaattctgctgtctttttgacttagctgctatcacagtcctcacatcccacatgtgtaacagtaaacactggaagttattttattttctatgcagacattttagagtattatataaacaaccgcttaattaattttggtttaaactcctaggaagtgatgaaatcacattttaacaggactgaataggamccataaaataatttttaggtaatctctgttctcaccctaagaatattaattctgccattctaggtaatgtttactctaattcacttaaaatttttcttttccctttttttttttttttttgagacggagttttgcttttgttgcccaggctggagtgcaatggcgcaatctcgactcaccacaacctctgcctcccgggttcaagtgattctcctgcctcagctcccaagtagctgggattacaggcatgtgtcaccacgcccggctaattttgtatttttagtagagacggggtttctccatgttggtcaggctggtcgcgaactcccgacctcaagtgatccacccgcctcagcctcccaaagtgctgggattacaggcgtgagccaacatgcctggcttctcttccttttaattattagaactcttttttcctgattgactgctctggttttacccagagccaggtaggttttccccttcccattttgttattaagggacatgtgcagaggttcaggactcctgagtctytgggcagtgctgatctcactcctctgctcagcctcatgctttgtcttaaaacttaattgtctgagttggagcacttgcaaaagctctaactcaggctagtggttgggagggttctcagagacttaattgctgcctggtgctcagggcctccaggtcccactacctctggctcagtacaggcatggggaaccagccacaggagactgaccagctggagactggcaagcgtgggggctctgagctgcttccaggggccctgggacaactgcttttgagggcctcatgtctactggaccatgggatccaagagaagagcccttgcctgaaatcacaggacctggaatggggctggcagttgtacaggttggagaactgggcctggtaatccctttaggagctgtgctctgaggagctttggagtttccctggcatgtctggggtgagagtgggggaaaaaagtgactctgagggttagggcaatgacctactcacaccccacctggttttgtgtaaaaccagagcagccaatcamgagaaagcgttctaatgattgattaaaaggactgcctttttctttctttaaaccacagcaataaagggttttgctaggctaactttctcagtttggcttggcctagattttcacatggctcagtattctccacattcacatgggccatggtgtttgtggaagtgaaggattggaatttgggagaatgtggtgaggagagagacagctgacttggtgcagtatctgggctatggaacaggcactgcataactgctgatggagtcttggctaccagtagcagccggtctatcccagagaggcagaggccctgagaggcagttctgaccccctgagctgttgtgctgggatccctggcttggcatgcttaccttagaagagaagcaggctaagaaactgatctctgtctcagctaaaacaatccttcttgcatactgcagacgatccctattaggaaacagaacttccagaatgcagtccatttktaagtttttatcattcatttataccggagagtcaattaagatcagattttttttgttaaaatataaattggcaattttagtttttaaaagatctactaaagctcaggagataatttagtgtaatagtcttcaaactgtggtatctgtatccttggtgcgtgaagactttccaagggatatgcggatgcatatagttttaagggaatcaattttcaggtctttagctttcctaattagtcttctaaaatccatctrtttgagaacagtctgaactctgtggattttctttccactcccatttcacaatgaaccatctcccatttttataaaataaaggcatatttctcacccatctcatatgttcccatggtactgtcttgtgttgtgaagatctcttaggtgtaaaacaaaagggactgtttgagaatgtgttgctcttgaaagagggcaaaagaaaaagagcttctataaaaagtattgaagcaggtattttatttcactagcttacaaaccagtggcaaaattcttatccgtcttctttcrgagaactctgaagcaaaatggttgataccaggctatgtaataacacattcatttgaattaaaaattaaagtcagacttattctaatagaaaataagtctttttttatacaaggttttaattccatttagtacagtactttgtatctttttttcttttttttgagatggagtcttgctctgtggcccaggctggattacagtggcacaatctcggttcactgcaacctccacctcccaggttcaagttattctcctgcctcagccttccaggtagctgggattacaggcacacaccaccacatccggctaattttttgtatttttattagagatggggtttcaccatgttggccaggctgatcttgaactcctaacctcaagtgatctkcccaccttggcttcccaaagtgctgggattacaagtgtgagccaccgttcccggccttagtacagtatgttaaattttgtgtgtgtgtgaatcaaattattttcaagtctgcaaaaaactgtatctccacaaagaggcttaaattgctgacaaatttctggggtgataaggcagcatatttaattaaataaaagtaatgtctccaaatataaagccttcagttaaatatatcttttggaattacaaagaattaaaccacttaatttataatataaattatattaytttaatatgtgargtaagaaaatgatagttaaatatctcaactttaattttctggtatggtcagacctttacagatatttccatgctattttaactttaggatataaaacagtagcagtctactaagttttctattattaaaattagtatagaaattatcaaaatactgaaaaaactgttttatgaaagcagtacctccatcactgtaacttatttcctttcttttagaatacatcttcaaaagagaccagaatttatttaaagatagtagtttgaattttaaatttccagtcaatttttcattatctcaaaattgagctaatgaagagttgatggagttaggagaacacaggtttccaactaatgccatcaaggcagcaggatcctcacatccatgaagaccaaaagaaagatgtaatggaagagagaactacggatctgtcttccatcctaatttaaccttcargaaataccttctgcacaaaacacttcattaaataaaaaaaattacaagacagtaagcttaaaaaaaaaaaaggctaggaccacaacttgcccagttaagtctgaatggtgatgttattggttttaagcctgaagaaaagaatgtaacttctgcttctctaaaatcacatcttcatattgggctaatttaaatttaaatcacttaatgccttaacagtgctaaaaattccaagaatgtcagacatactgatattcaaaatamagtacaaaaataagtcaaatataaatatgtttgcctgtcatgctcctctttaatttaccctgatgagctaaagttgattataattataataatatatgttatttcaagtactactattctttttaagaactcatgacctaggaccccaaaaygcaattagggatatacaatttggagtatggtttacttctcagtaaagtttaatactaattgaagtactaaattgaacaaggtcaatattttgtagtactaatcccaataacttgatcccatgcaagaaacaaaagggaattttaaaggctgttttggaatcccagaacattggggttctaccttaacttcctagtattcccttcaagtctcagttgagtgttagagaacaagtcttacttttgtcattttgacagtgaggactggctttgccaattagattatgttgtggacattttccataaattttcataaattccaggttttgatagaattctatttaaagcacatacgcaatctgaaataggttagaaattacaccatctgcatccatttaaacctataattaaacatttgagttataatttaaaagtgttcaaggcagtacattgcttttcaaaagctttgtagagacagtgtaacaacaacagaaaaatttcacaaccactgctgtagtgtagtggagaaagcctgggctctaaagtcagtcttagtggcctagtttgaatcttttctctggcaatattggcttagaagttaagttaaaaactactaagggtggctgggtgcggtggctcacgcctgtaatcccagcacttaggaaggccgaggtggctggatcacgaggtcaggagattgagaccatcctggctaatatggtgaaaccccgtctctactaaaaatacaaaaaattagccgggcgtcgtggcgggtgcctgtagtcctagctactcgggaggctgaggcaggagaatgatgtgaaccatggaggtggagcttgcagtgagccgagattgcgccactgcactccagcctgggcgacagagtgagactgtctgaaaagaaacaaacaaacaaaagttttatccagtatatctattcctagttttctaagagattttaaatttttagtaaaarctgttacagaattttatcaattgtttgcatgcattgagaggatcttaatgatttttcagtttttaaattccattatgtggtgattaacattgaagtttgaatattaaatcagttttaaattcctggattaaactcatcttgattgygatggataacgtatttctggatttgatttactaatgctttgattaggatatttttyggattatgtttgccagagagattagtctgtagtcttgtaatactgtccttgtaagttttaagtattaacattatgctgtcctcataaaaaaggatgagatgtagtccctcaaataatggtgccatttctacatttaatattgagacgtttggaaaaatttagtgataaatccatctcattctggagttttcttgaaagattttaaattatggattcaatttctttattagagataggattgtttaagttctctgttggtcatttggcaagttgagtttttctaggaatttgcccacttttaattttaaagtttattggcgtacattttttcacaatgattgtttttctgtttactctcttaatgtccataattgtacacattttttctttttcttttyttttttttttttagtatttattgatcattcttgggtgtttctcrgagagggggatttggcagggtcataggacaatagtggagggaaggttagcagataaacatgtgaacaagggtctctggttttcctaggcagaggaccctgcggccttccgcagtgtttgtgtccctgggtacttgagattagggagtggtgatgactcttaacgagcatgctgccttcaagcatctgtttaacaaagcacatcttgcaccacccttaatccgtttaaccctgagtggacacagcacatgtttcagagagcacagggttgggggtaaggttatagattaacagcatcccaaggcagaagaatttttcttagtatagaacaaaatggagtctcctatgtccacttcttyctacacagacacagcaacaatctgatctctctttcctttycccacatttcycccctttctattagacaaaaccgccatcgtcatcatggcccgctctcaaggagctgttgggcacacctcccagacggggcggcggctgggcagaggcgccccgcacctccggacggggtgactgccgggagggctgccccccacctcccgaacggggcggctggccgagcgggggctgcccccygacctccctcccggacggggcagctgccaggcggagacgctcctcacttcccagacggggcggctgctgggcggaggggctcctcacttctcagacggggcggccgggcagagacgctcctcacctcccagacacgctcctcacctcccagacgggttggcagtcgggcagagacgctcctcagatcccagacggggtcgcggccgggcagaggcgctcctcacatcccagacggggcggcggggcagaggcrctccccacatctcagacgatgggcggcagggcagagacgctcctcacttcctagacgtgatggcggccgggaagaggcgctcctcacttcccagactgggcggccgggcagaggggctcctcacatcccagacgatgggcagccaggcagagacgctcctcacttcccagagggggtggcggctgggcagaggctgccatctcrgcactttgggaggccaaggcaggtggctgggaggtggaggttgtagcgagccgagatcaggccactgcactccagcctgggcaacattgagcactgagtgagcgagactccgtctgcaatcccggcacctcgggaggccsaggckggcagaycactcrcggtyaggagctggagaccmgcccggcgaacatggcgaaaccccttctccaccaaaaaatacaaaaaccagtcaggcgtggcggcgcgtgcctgcaatcccaggcactcggcaggctgaggcaggagaatcaggcagggaggttgcagtgagccgagatggcggcagtacagtccagcctccgcttggcatcagagggagaccatggaaagtgggagaccgtggggarggggagagggggagggggagggggaacattttttcatttctaatattgtttatttgtgtcatctgtcttttttccagcactccttttagaggtttatcaatcttgtgaatttttggtaatgttgattttctctatttaatagttgttttaattttattaacatctactctcatctgtattgtctttcttttacttttctcttttccatcttttaaagttctatgattagcttgttaatttttagcattattgttttctaatgtaagtattaagactttagatttctaaataccaccttagttgcatctcatatgttttgatatgttgtctttttattattattccattctaaatgccctctgctttctwwtttttatttttgaccwgtgaattgtttagagttatgtcttaatttccaatgcttttttaaaagagccattagtttaaaatattttttatttgtatcatactccagtatttaagatttaaaaatgttctgtatggttttcaaaatagtatttcttcttgtagttgtattgcatttgtgtctactagattcaggttgttacttagattgttcaaacttttgtatgcttcacttatcaattactgagacaggtgttaaaattacctagcttaatggcaagtttgccaatttttctgtgtaactcttgtcagtttttgcccattttatacattgaggctaggtcagttaggtatataaagtgtagaatttctgtgttttcctgatgaattgcacctttttctaatgacagtcattatctgtagtgaagctttttgccttaaagtttcccctttctcttcatattaatataaataatatacctttatttggatattatttacctggtttatctttgtccatacttttattttcattctttctgtattcttgtgtttggatagtttttggaaacagcatataactggatttttctcctgtggtgtgaaatctttgtattttaatggagcagggaggccatttagatttattataaatacagatttatttggatatatttctaccatttaaaaagctttttctatatttatttttccgtatgttctcactgtcttttagattaattcagtatatttgccagatttaattttcccctctagttgtttggaagacataacacttcatttctcttcggtttgagactgcccagttgaaatttccacatttaagttatgaaagtaatcactttcttttatgctcttcctaaggatcctctcctgtgacttctagtctctgtttcttttaatttagaaaaagataatctgattggaatagtttgggtcaggtgcctacttttggatcatagctattataaggtgtggaaggtggagaatttttgtggagatgtggccactggggggttcctttccttcactccttgcatctctactaccctattcatgaactgtatattgttaacttttatcagccattttaggagatatatactacggaattgctgyaaacccaaatatatgtaattccatagtctttctgtaagactatttctctcaaatttacagggtgggggaaatactcttccttttttttttttttttttttttttttggkgtatacgaatatttgaaaactatcaaaccaggaaacacctccccccaccaccacctcccaatcccaaacctgtcatctctcattggctaagctgttccaagagctttgggttatttgkgttttttttttttttttccttgtttcttccattcttttcctttggkgcttatctgaraattcctasggaactttgaggaagtgtcatcagtatttcacagttagaaygaactattgtcctaacatttcatggaggttcaggaccatggacagatcacatgtgctacctgtctcagtcccacccacatattttagcaggttaaaatattcttctgaagtctccactggcatcattcttttccttataagttgaactcctccctatttttatcagtcatcttacagccaggtcttgcctctttaaagttgttttgttgttgttgttggtttttttttttttgagacagagtttcgctcttgtcgcccaggctggagtgcagtggtgccatctcggctcaccgcagcctcagcctcctgagtgtctgggattacaggcatgcgccaccacgcccggctaattttgtatttttttagtagagatggggtttctccatgttgtcaggctggtctcgaattcscaatcctcaggtgatctgcccgccttggaggcgtgagccaccatgcccggccttttttttgagacagagtctcattctgtcacccaggctggagtgcagtggtgcaatctcgactcactgcaacctctgcctcccgggttcaagcagttctcctgcctcarcctcccgagtagctgagattacaggcatgcgccaccatgcctggctaatttttgtatttttggtagagatggggtttcaccatgtttgccaggctggtctcaaactcctgatctcaccttaggtgatccacccaccttggcctcccaaagtgctgggattrcaggcgtgagccaccgtgcccaacccctctttgaagtttttatctcacttatgtataaaatacttatcttgccaatacgtttgagttagtaaatagtttagtctctgcaaagaaatggagaattagataggttaagtaacttayttaatgatggagccaggttttgcagtcaactttttctgactctgaaaccatatctctcaattacttgatatacttcattaaaaaaataattattctgttcattatactcttggtttatgactttaaaaatatgttttaaaatcaacttataatttatttttgaaattacagggccaggagcagtagctcacatctgtaatactagctattagggaggctgaggcagagggtcacttgagaccaggagtttgacaccagcctgggcaacatagtgagatcccaaatctaaaatcaaaaacaccttacacatttgcccaattttctattatagtgttcttttttttcttactatattgtaagagctccttgaattttagggatagcaaccctctgaccatcatagattacatatatttcccccatttgtattttttctttttaacttagagtatttttaaaaataaaacttcagtacataataaaactatcttttatttagttaaatcttttcctttagggtttttcttttggcattctgtttagaaaacttcttccccatccaaagaacataaaaatatccaattctgatatatctgtggtatatgtaggttacttttagattgtctatattggaactgataattttagaacacactttaagagcagtagggtaaggaccttaatatttctttttaaatgttttcttggcttttctcctacatttattcttataggtgaccttaaaattatctttacattctctttctttttccaaaatctaatttggaagaacttttaaaaagataaacaaagtggccaaactttgcttttcacttttgtcatattttaarcatatgaaagagttaaacattaatttataatagtgttcttaccagctggatagaaatacatttacttagtacctatatttattttttctttctttgtaatttatcttctaggaagctattwtgtaaaatttatggtgaaccagttgttgatttatacattattagtggtgtgataactgaggatgctcgaaagaaggcatgtaatgagattgttgcyatgggaagattgagtaggtaactacccagaatgtttcccatttctagtacaatatctggtattgaataggtgctcagtaaagagttaaatacatgaagagttaaatgaatamtgaagacttttkttgggtgaatttactaagctcktaatttcagccttattgatcagaatcagagatacaagtatattcagtagtcttatttataggaggcaaagtagatgaactagaatgccagttaggaatttccaataaagaatatatctatcagccatcagagtcatttgtatcgttctccccactgcttttttttttcctacaggaaaaattttatcagatgtttacttgaagaatgaaactggaataaggatagctactttagtgaatttaagttctgatagcatgataggaatgatgtgccaagtrgattaatatttttgcccagtgtttaacatatccctctrctgtgcacaaaagactgctacctaaatttctcactcacrgattttctctactgataatatctgcctcctggccacgtactttctttagctgtgtsattagctcaccattagatcttgctctgatttagtcataattatttaaaagaaaatacacaagttgtacatgaatatatgtttatttaaaaaacagtataattaacatttattgagccattttatgcaccagatatcacattaagtattatatattcttatttaattaaaaacccatttttaacccattgagggactcaaacaggtacttacatgccagtgttcatagcactggcatgtaatagccactcacaatagccaaaaaatgtaaacaccccaagtcttcattaacttgtagttggataaaatgactgtagcataagcatacagtggagtattatttagccataagaagagtgaatttctgacacatgctgtgcaacatcactgaaccttgaaaacatgcctagtgacataagccagacatacatgattctggttatactcagtatatagaataggcaaattccgtagagacagaatgtagattagtggttaccaggcatgggatgtggtggtgggtcggggaggggatggggaattattgcttaatgtttacagagttctgtgtggggtgatgaarttgtagaaatagtgatcctaatgtttgtacaacattatgaatgtaactaaagctactgatgtacacttaacaatagttaaaatggcatattttatgttatgtattttttccacaaaataaaattcaaacaactcatgacctaggttctactattatcaccattttacaagtgaggtttagaagaaataagtaactagtatgagttcatgtagttaagtgacaggcatctagacttgaactcaggtttgtctgaccccagatgccatatttttaatcaggtggttctctgctttcagaaataaaagtggaggtgccgtctttcctattccttatttccattcttttgcacagaaattacttctgattctttgcttaattgtttgacatgtatccttttagaccctcttcctatgcatttacttaagtatttatgtgcataaatgtgtacaactttttcattaatttacatacacagcataattaacattgtttatgtgactgcttttttcatttaacagtatgcattagagatgtttctattaattcatgtgggtctacttcattttatttgctgcatatgtttcattgtatggatatatgtgggyatagtgttttgtggcatggatatcccgtaatttatataccatttcggtatttcctargtagtttccagtttttcattctaacatacagtatttcagggcttatacatatactcagaagtggagtttttgggcaaaaggaatgtacatttaaaatatttagttactgcaatataatatttcttccacytcaaaggataccagtttaaacttctaacattgggatatgagagtccttgtttcctaggaacagagtattatcagtcttttttgcctatcccatggtcagtaattgatacttgttacattagtataaaaatctctgatttacttccagatgttagacattttccatatggttttcttttgttttgaattgccagtgcctatttttctaatattaatatttctcttagtgatttgtaaaatctgtatgttctatgtgttaattttttgttacgtaaatatttgttacaaatatatttttccaatgttgttttatttttcttaaactttgttcgtgttatcttttaccttacaggagacttaagttttcatatagataaatcttctttttattattaatacttctggctataaggctctgtgttgctaaaacagctttttccatttcaatgttatgtgaatatgctccattatattttcctagtattactgtagattttaaaaaattgtttctctaattatggcattattttttgagtcgtgtgagctatggattaaagtttttttccaaatagttcatctttctcccactcatttaaaatacctatatctgagcccatttctgcttcattgttctattggttcaggggtcagcagactgacacacaagacaaatctggcctactgccttgtttttgtaaatacagatttattggaacatagccccacctatttgtttacatactgttyttgttttgattatgcaagggctgagttgaatagttggcacagagactaaagagctcacaaagcctgcaatatttactgtggcctttacagaaaaggtttgccaacccctgaattagtctcttttctaataccagacttttttttaaataaaaatatgaatatgggctgagcccagtggctcgtgcctgtaatcccagcactttgggaggccaaggtagatggattgcttgagcccaggagtttgagaccagcctgggcaacatggcaaaccctgtctctacaaaaaatacaaaaattasccaggcgtagtagcatgtgcctgtagtcgcagctacttgggaggctgaggtggraggattgtttcagcccrggaggttgaggctgcagtgaaccgggatcacgccagtacactccagcctgaatgacagagcaagaccctgtctttaaaaaaaaaaagtgtgtgtgtgtatatatatatatgtatatatatatatacacacacactatatatatayacatactatatatatacacacactatacacacactatatatacacayatatatatacactatatatatacagaaaaaagtatacatatatacatacacatacaaaatacacatataaatgtgtattaatgggtatgtctgtctcctccccatatcacaatattttattttatttatatacaccctggtgggggcgtgtgtcttttcctaccagatatcaaaactaataaattatagtaaaaatagagtctggtattggaaaagaaaccgactaaaacagaattggcaaactttttctgtaaaggctacaataaatactttggctttgtgagctgcaccgtctgtgtgccagctattcaactcagcccttatgtcgtgaaagcaaacgaaaacaatacataaacaaatggatggggctktattccaataaaaacacctgtgttttaaacatttttcatgattattctgcatttccttttgcacctgaacttcagaaatagttaacttcaatcarataccacattaggctttcttttaaggtgaacttaaaaaaatgttacttttcagagattacattttatctacaattttgccattttaaaatacttgattaagtaatggtactagctccagtgcctgggacatggtaggtgtacaataaatacgtgctactagtatgaattgtccaagattctttstcccatgtcttttgtctggtgatatggtttagctctgtgtccccacccgaatctcatttcgaattgttaccccctcgtattgagggagggacctggtgggaggtgattggatcatggggccaatttcccccatgctgttttgtgatagtgagggagttctcacaagatttgatggttttaaaagtggcattgcccttgcttgctctcctgctgccttgtgaagaaggtgcttgcttcccttttcaccttctgccatgattgtaagttttctgaagcctccccagccatgtggaactgtaagtcaattaaacctcttttgtttataaattacccagtctcaggtagtatctttatagaagtgtgaaaacagactaatacactggaaaatcgcctgtctgatgggtatagatattcattagcaggcatctatcaccttttatctgataacatctatgtgagttacatacatgacatgatatagattgggttgtacattttttaaatgcttaagggccagcaaacattcctaaaacattaaaatatartaatactattccttcccctctcacaggtcttctagtagatgatcttatctaagctttaagagatcactggattcctaaagtgattttattttgtagaattatgtattctgttatgtattttagtaacagattagaactaaattggatatagtagggatttcattcataaattatcattcaacactaaatgcaaattcttggctgaaggagcttatagaaacaaaatctattktgttataaaaatgcataaattaagcattttcttagtaggmccaaactttttgtgatatgttagagtgactaacttttctttcctaatcttrtaatatccttctatagacatttaaagctttacttctttatgycttccccaacaactttaaaccaatgttttcctgctctttctgatctcatgctaaagactgtatgctagatgatctggttgtaaatcccagttccttcatttatttgagtatttaagggccaacaaaattgtcagaaattagtttaaaaacgtaaataaatggactatttaggtcacataacttaaattattttgtttcctcatttaaaatgaagctagtaatgcyacctatcttcatagtttgttgtgtgtcttggacaagttggtatgcaaaacataaaatgtcaagcttgttaaatggagttaatctgaagattatgagtcctattctgatagcctaattgagaaaaagtgccacaaacgtgtagtttcaatttacagatgcagagataagttataractagtgataaacttggcaaaatttccaggtaagattatctttcactggatagaattatattttgacttcatgcttaatattttttaagagcatttgcttggccataayaatacaactaacagtgatcgaaaacacaagaacatttattactaaataagtcttgaggcaggcaatcccagggttggctctctggctyagcagtgtcagtgttagattgccaggtctctgaagctcttctgtttttcctttcatggtwgcaagacagctcctaaaagagcgtatcatcatagtaatatatagagtagagagagagcattcgagaaagggctttctccttgttcttcttactcattaaggaaagaccctagaagctctcaggccctttctattactggtcaaaataatataaagcaagtttcacacagatgcctgaccaaacaatggaaaargggaaagggcttataccaattatactggcatataccaattataattcatcatctggggtaaaacaaattgccactacccagaaatagggtctgtcaatgaggaagaagggaagattagttgttaggtaactaggcagtytgccacatacgatattcatttgtttaagtaacttacaaagtaacaaggtttaaaatagtgaacaaagcggacttaatccccggaattcttgagtttttttctttctctgtttaagagatgccatttttgttgggatattattatgcattttcttgtctcctgaatgcttataagtgttagagttcaaacgaggaccttctttggaccatcagtttttaaaaatacattccttagaagaaaaacattcacttaaaaatgttttatttttacaattatgtattagtatttctagtttcagagagaaggagaaactagggtctagaggataatatacccaagttcaaatagatgggargttctaattgtaatatcagttaataatttttgaatcttttttttttttttttaagacggagtctcgctctgtcgtcaccaggctggagtgcagtggcgtgatcttgggtcactgcaacctccacctcccggattcaagcgatactcctgcctcagcctcctgaggagctaggattacaggtgcatgccacaattccgcccgccttggcctccctcccaaagtgctgggattacaggcatgagctactgtgcccggcctaatttttgaaacttttttttatgccccacgtactgtacttaactacttttcataaattgttttattaaatcctcatgaccctgtgagggttatgaggtataggtacctgtacaggtagggaaacgaagccttttgtgtctaaataacttctcaaggtctcacrgctactaagcrgcaatcaaactaacacctcagggttgttagatgccaaagtgtgcacttttagcacgctttggtgtttgtgctgctggtcttcctaccactgtggaagtggttgctggratcttagtacacagcatgttaaagtttctgttaaaatttggtactgttagttttaccttggatacaatgcaatgcaggatttttttcctgctrcgtccatgaagccaaatcctcagtgtgatgacagaaattgcagaaagaatrtaagaaaaaggtagcagcactgcccaaatgaggttatacaagaagaggaagagataatccatgaatataccgagtggggtattgagctggtatctgaggtttcagaagaggaattgaaaaattcttcaggtccagttccagacttacctgaaggaattacagtggcatacacaattccaaaaaagcaagaagattctgtcactgaggtaacagtggaagattctttaaagcttggaagacctcatggccaagattaagaatatgtacataatggactggcatatattttatttctcatgttaaagcctcttaccttgaaattaaaaaatttttaaaactgrtaaaacttagggcaacattaattaatgtatactcttaactgaattgttatactttttgaaaatcccgtgacttgcttgtttctctccactccaactaaatcattaactctcctaaaatgtatgtttcattctagkaagaaaacctcaaaggatattgtaggatataaatcttatttgaaaatatagccattgaaatgttttggccttttggagttggggaatgacaaatctgatcctggaatctttttcttttcagtaatcccttgtgtctgttgcctgagggacatggacaataaagcagtacatgatcctcagatayagggagaaggacaaggcatatagcttatttattagagccagcaagcatctgctcattatgtttggaattgctttctataagaaaattttgccctctactactaacttgaccaaaaatgaatttaaaattgcctgtgaaataacatcctctcaaatgtttgctgatgaaattcaagttgaaatgtattcattgcaaaagtctataaacctgtggattatatattcmaaataagacaaaggcaaataaaaagcagctgtcttcatgaatagacaaaagttgctttcaggaagtataaattatattctgcactgaccaaagaatagaagttattgcatctgtggaacatatatctggagttactatactaaagagcagggcatgaatttagactaaaatccatccagattacactcattctttaggccactgctggatacttcatttacatttgattcttggctgggcacggtggctcatgcctgtagtcccagcactttgggaggctgaggtgggtggatcacctgaggtcaggagttcgagaccagcctggccaacatggtgaaaccccgtctctactaaaaatacaaaaattagccgggcatggtggtgggctcctgtaatcccagctacttgggagcctgaggcagragaatcacctgaacctgggaggcrgagactgcagtgagccaagatcatgccattacactgcagcctgggtgcagagcgagactccgtttcaaaaaaaaaaaaaaaaaattgattctcaaggtaatgagatatcagcaaggtttgtcttgtatagtrggcataaaagaaaagttctaaattgcctctgcaatgacttgtagtcagtggaagagtatcattttccctgatcatgaccactaygctgtaaattgatataaattaactttctctggagttacacacaaataacgaagatttaagagaaccttggctgaaataaatttccagttgtttggaggctaataaataccatgcaggtgtaaccattaaaaaaattattatataaactactatattatgtaaactacaatattttagcttttctgtgtgagaaagtgatttttgtttgtttgtttgtttgagacakagtcttgctctgtcayccaggctggagtgcagtggcacgatcttggctttctgcagcctcagctcccgggttccagtgattctcttgcctcagyctcccaagtagctgggattacaggcgtgtgccaccatgcctggctaatttttgtatttttagtagagacgagatttcaccatgttagccaggctggtcttgaactmctgacctcaagtgatctgcccacctctacctcacagggtgctaggattacaggcatgagccactgcacccagccaaaartgatttcataaaaattgttaaaaatctgtagctgctttgttaccttcattaactctttgtgattaaagttgcaagtttattgcagtaatgggaatgtgttagattaatgtttaggtgagttatattttaaaatctgtgtagtatatttatagttcacccagtaattagaacaccgtatcttaattccttattgttcctctagtgtgtcacaggaggtagagtttattgatgctgggattgcggatgtgaaaataacattctcagggtatcttatgacttaaaaggccgattttttaaccagtgatattttctgtgattgtctataatttggtttaaatttatacttaataagggccagaatacatggctatattcttagyatcctttagaacattatttcttagtcaaagtttatgaggcatctagcaacattttacatgatatataaaattggaggtaaatgtgctttttcttgggaggaattcatagccttaaactattcktggaggagtgtatgattctctctctgtactttcccctgtttttcaattattgcttcagagtattttttttttaagtttgagtactttaaacagcatagagaagtaaatcagtgacttaaaaattcattattttgtcctatatgcacatgttaatatatcattacatttcagtggcagtatttttcatttcttgttttacttggttaattttcaaatctctgttctttcattatttgtatttcttctatctcttgaatcattgttacccacttcatggtatttttcagattgtattattctcttgagttcttgagggtactaatcttcccatttgttttgattgccaactttccccattttggtgttctatttcctcatttagtttaattttttttcaattgtgagctcacttttgactgaggtagatttttctgggatgagttcctttccctctgaatgcttttgcttctgtgggataggaactagatttaatattaatttcttggcagaggatttctttaccacatgggcagtatggattcagactccaaaccctcatgttttcctcttatgctgccccccaccaacaccctaggttgcttcactggacaagaatcagaatttttattattccctgacatggggaaagggtcctggttttaatgagaggtaatcattccagtcctctacctctgttaagccaccagcaataccttcattcgttgtggatcgaatgatccctaacaggcacctgttagggcctgtgtccaggacttttgcttttgcagcatctattcctgtgtttaaagttttgattatttttctttatttctaattcttggggatttctcttcctttcttctccttcattagtttgattgtatatttaaaatctctcatggttgtttgttttattyagcatttctatgtgtatttgtgtatgtgtgggtctgtgttactgcttactgtgttgtcaagcccatatatgcacaaggactattttgaaactttgtttaataataactcaggctaggtgcagtggctcaggcctgtaaccccagcattttgggaggccaaggcaggcagatcacctgaagtcaggagttcaagaccagcctggccaacatggtgaaaccccgtctctactaaaaatacaaaaattagctgggcatggtggcacgcacctgtaattacagctacttaagaggctgaggcatgagaattgcttgaatcctggaggtggaggttgcagtgaggtgagatcacaccactgcactccagcctgggcaacagagcgagactctgtctcaaaaaraaaaaraaaaactcaattattctgttaaaaaattttaatatgaaagatactggtgcttaaaggtgaataatactgtttttaaccttcatgtgtctgtgattgtaaaaagtctcaaatataccacctgtaactttgttctttgtatattttaactcattaatgtatagtcacagtattacagaatttagacacagagcctggcataattgataacagttttaacatggctttattaactactcttttctcattcttccctattctcttctagtctcccttttgcatggattattctcttttcctgccctactgttggttccagattcttatgttattccattgcagayaagggagaagaagaatggtagaatggaaacccactggagaaattcgagacgaaagagaagaaggaaaataatgggtgaagggaaggttaaaatttcttgctccagcactctctgttctcttccaggccttatcttactccttcagactctgtcttyatttctcatcttttcttctcacttatgcctctgcctttccactctctctttctattggacactttctttctgacaccatggtagctatcactagtggcttgcaatctatgttcctaccacctggccagtagttgtagggaggaaggaggttggatgggagaattgaaggagactctgttgttggatcttgggctacacagagtagggagaaagatgtaccttgcaaggtwtaccaggcattttgtattggaactttgagttctttttcttctagaattattcatttatctgttcattaaacagtaaacaatgaaccccaggcagtgttttaggaactcacatagaaacatactttgttcttttcagtttcagagatcttttttatttaacttagaattatttcacttttgaatctcttaatttcagcatctgtatttatttcaaaccttttgggaatraagaggcaacttgttatrttggaaaggcttttggagcctgatagatctgagttttaatcctgtctttgccacttactaggtatttaatattcaggaatttatattatctttctaaaccttttttttttttttctgtaaaatrggaagttcttagtatggtacttggcttaratggctcccaataaaataatgcctgctaagattattattatcacacagaaagtttgtccttagtaccaaatcaattttttttgtttttgtttttgttttgccaagaagtacttttaaaactagagtacattaagacaatgattaaaggattctgttttgtttatttttatatcacattcttgaagtttggacaagttgtcataatttacataaaactattacttctaagctattacttctaagttggtgtgtccttctctgagctagcagtgtcatagtagtactgtgacttactagtcaagtttaggccagcaagtcacatamtatgtttaggccttataatattaatgagggttaataatatgtaccttatggattttatgataactaaattaygtattagtttggaagctaaccgtgtctagttgtgagctaaaaaccaagtatttagtgtaagattcaggcttgttcgggaaatacaaggcrgggatgcaatcaaatgtcaggaatcgccagaacaccgggaataaggaagctatcggaacacttccttttctcattgtctttgcctttctctatgcatctgctttgtttttctctttcattatgtggaactgattttctcttttgcttttagmgtcatagtaggatgtttgcctcaacacttgctgagtttgtatgttaattcttgtaatcatctgcagagactgactctgagttaggtttgaaattacttgtcccccagcttaggtcagatttccwtattggttsagttaacactggccagttaaatggggcctcacaatatgcacttggcccacccctgagaactgagggggagattttcagaaaaagggagggaggcggcgtggcagatacctcagaaagtgtgtgccacaagtgaagtcatttaagtatacagcactgaagaaagtcaaggtattgttatcattagatgatgtagtactttgtgaaatatcactaatagcatctattcagaatagcatgtcatttatctaccagcgcaacagatctgattagtcccttatatgcccttgatttttgtcaagggcagtagcgtagtgattattrtatctttttcaattgttgtaatgaatataaagtcttttgcaatttgtcttttatattcaaaattattttaatcatagagtgtgcttgaaatgaactttttggtggatataatttttaagaacatatctttgtataaaagcacttttgttaaatattgctaatgaacttttttcaggaataagttgaacgtataatcagttttttttcaaatgcagcatagaaataagaaatattcaagtaattgatacatgattcttttggttctatcattgaatttctgaactctcagctataacttgttaaggcatcttttaaattatcccagacattatgaatggagtgctcagtaatgatttgtataacccttagctttgttttgattcattttctttatactacttagggtatcatcatatgacaagataactgtatacccctgtatagacacttaatattgttaatatttattgttctgtgttcatatttaccccaaattagaatagtcaataggtataatttacctgaagtgtcagctctgcagcacactttttytgaatttctgatttagtctgggtgggggagctaggtttcggtttaaggatgcctttgttttgtgattttgtgatatagtagaaatcaaaactgcttttaagtatagaagactggtgttacaattatttggggggatagtcaggctcccattttcagttcttttttttttttttttttcccggacagggtttcaccctgttgcccaggctggagtgtagtggcgccctctaagcttactgcagccttcatctcctgggctaaagtggccctcccacttcagtctcctgagtagctgggactgcaggcacaagccaccgtgtcyggccgatttttatatttgtatttttgtagagacrgagttttgccacgttgcccaygctggtcttgaactcttaractcaagcaatccgtctgctttggcctcccaaagtattgggatacaggcgtgaaccaccacacccggccccatttttagttctartaggtctgtatgtatctcccaccttgtcaaacttgtgtgtaattttttttaaaaaaggtttcacccaccttgtcaaacttgygtgtgatttttaaaaaagttttcttccttttttttttgagacagagtctcactcaatcgcccaggctggagtgcagtggcataatcttggctcactgcaacctcygcctcctgggttctagtgattctcctgcctcagcctcccaagtagctgggattacaggcgcccatttactaccatgcccatttaatttttgtatttttggtagagacagggtttcaccatgttgaccaggctsgtcttgaactcctgacctcaggtgattcacccgccttggcttcctacagtgctgggattacaggcgtgagccactgtgcccagcatcttcctattttgttttaaaacagctttactgacatgattgacataccaaacaattcacctgtttgaagtatacaattcagtggttttgatatcttactaatttttaaaaattgtggtaaaatacatataacaaaatttgccattttgaccacttttacatgtacaattcagtggcattaaattatatttataatattatgtaacaaccatcacatagctgtctctaaaactttttcattatccaaagagaaattctgtaaccattaagccataagttttcattctcctgtcccccagcccttagtaacctttaatctactttctgtctctatgaatttgcctattctagatatttcatttaagtgacataatatatttgccttttaatgcctgtcttactttacttagcatgttttcaagatttatccacattatagcacgtatcagaccttaacttcattttaaagctrcttaacatactggtgtgtgtgtgtgtgtgtgtgtgtgtgtgtgtgtgtgtgtgtgtgtgtctgtatatatatatcacattttgtttatctgttcatctcttgatggacatttggataatttccaccttttggctactgcgaataatgctgtcatgaacatcattgtacagatatctgtttgaatctcttcttttgattctcttgggtacataggaatggaattgctgggatatgttggtaaatctatgtttarctttttgaggaactacccaactgttttacaaagcagcagtaacattttatatcccctctagcaatgaatgagggttccagtttctccacatcctcttcatcacttgttattttctgttttatttaattaatttaaaaaattcagctattgtagaggttgtgaagtggtatctcattgtggttttggttttcatttccttaatgattagtgatgttgagtatcttttcatatgtgttttggccatttttatatatcttcatatatatattattttacttttaagttctgggatacatgtgcagaacatgcaggtttgttacataggtatacatgtgccatggtggtttgctacacctatcaacctgtcatctgtgttttaagccccgcgtgcattagttatttatctaatgctttccctcctcttggcccccaccccaacaggccccagtgtgtgatgtgcccctccctgtgtccatgtatgttctcattgttcatctcccacttatgagtgagaacatgkggtatttggttttctgttcctgtgttagtttgttgagaatgatggtttccagcttcatccatgtccctgcaaaggacatgaactcattcttttttcatttttatttatcttctttggagaaatgtttattaaaacttttgcccatttttgaattggggttttttgttgttgacttgtaggagttctttgtatattctggtattaattccttagyagatacatgatttgcaaatacttttcccattctatgggttgtcttttctctctctccatatgaattttaggatgagtttttctatttctgtaatgccattgtaattttgrtagggattgctttgaatctgtggattgctttgggtaacattgtcatattaacartattaagtcttcttccaatctagaatactggatgtcttttcatttatttaagtcktctttaatttttatcagcaatattctgtagtttccaatgtacaagtctttcacctcattggttaaatttatctttaagtactttattcttttggatgctgttgcaaatggaattttattattattaattcttttattactgctttttaagagacaggatcttgctgttttgcccaggcaggagtgcagtggtatgatcatgactcattgcagcctcgaatacctgggctcaagttatcctcctgccttagcctcctgtstagctaaggactrcaggcatatgccaccacgttcagctaatttttttctctttctcttctctgttgtgtcaattccagatagaaatcctctctctctttcctttccttacaaaacacaaatacagaaatccctagtggacttgactaagcagtgtggaatacccgttttcgaagctagttagagctaaatgcatacttttagatcagagcaaactgtatgacctatctgtttcactcccctaatgctcaaatatgtatctttgatcttatcacactctggctccatggaaggaagagagaagacagctacacccatgtattatgatcctttaatcatatcagttcctttttgtgttagaataaagagggacctgaggagaggaaaggagacacgtttaaacttctcttagaggcagcagaatatgtaattgctctaatcattaaacatttttaatttaccagttaaaattattaataagattacatctaaattcctttaatgaaattcaaagccttttccattttctagctcttatttctttgcatttcttctcacaattctttaccatggattatttaccattaacaccccaaattcacttcctcgcctctcttcatttgcttatattgttccctcttgcctggartatctacattgtcaaacccaggcaaagcagcaagattctatttagtcctcaaggttcaatttatctgttatctcctttgtgtgaagcattagtatccacataattagtgttctattctcactaattctgaagcacttaaaactttatcacattattaaattttgtgtctgcatatatgcatacttgtctttcttgaatgaagactaagagtttcttgaaggaaagtatcatatcataatcaaatttttaaaaactccagtcattgccaccatgctttgtatactgtagacgtttgctaaygcattttaaaggaacaaatgaatgagygtgaaagaaacatgagtttacttggtgggaattgctgaagagctctctggtgccatgaaatctgcttttattttttatatctttgtgttaaaatatatatttaatgctgatagaatgttaaaactggtctcatttttacatcccccttgctttgcattcttttatatgttatttggagtttaaacatacatttctcaccaaaaatgtaattcatatgtaagaaataaaagaaaatatattgttttcytagggaaattaaatctgtttattctcatatagtttgggatttttaaatattttgacaattcttraatcataatttgaatttttgtgtaactaagaaacaccattatttatatctaatttgcatcacattttattaagaawataattgatattgctctttcatttcagctaaaccatttacttctaaagtgaaacaaatgcgattacatagagaagactttgaaatattaaaggtgattggtcgaggagcttttggggaggtaagagattaagatttgatagaaggtctgctaattattttggaagctgttgaacacaattgtgagagaatttaacaagtattgttacttgttacttgttaaacaatatttgttaagttgtgattgatgtgattgattgtgctgttgtgattgatataayagctcagaaaataaagtgttgaatgaaatatttctactgggaattttttctaagatcatgttttcacatgtacttcatatgtcaatgtaaatatgagtgtgtttctagactcttcttttgttctgttggtctgtcttattctagtttataaggaatcttgatacctggtagtgtatatactctgacttcctttttctccccctctcccatctctcctcccctgatattttcatagtattttattttatgtatgaatgtatgtatgtatgtatgtatgtatgtatgtatdkatktatttatttatttttgagatggagtttccctctgttgcccaggctggagcgcagtggcatgatcttggctcactacaacctccacctcccggattcaagtgattctcctgcttcagcctcccgagtagctgggattacaggcgtccgccatcaggcccagctaatttttgtatttttagtcaagttgggtttttgccgtgttggtcaggcgggtctcaaattcctgacctcaagtgatctgcccaccttgtcctcctaaaggatattttcatagtattttagaatcagtttttcaatttcgactcacttgtaaagatacacatgcrcgcgcacgcgcgcgcgckctctctcgctctctctctcgctctctctctcgctctctttctctctctccctcctctctctctcctctctcttctcttgtctcctctctctctctcttttttccaggaatttgggtaaagtttgtattgaaactggagatcagtttgcagacaattggcattttaacaatactactgagtcacctaatccatagacgtggtatattcttccatttatttagggctttataaatttatctcaatacygttttgtagtgttcattcagtatagaagacctccacatctttcagcagatttattcctggatatgtgataktcttgatattattttaattagaattgtttgtgaaatttcatttcttaattgttttcttggtagtagttagaagtagaatttaattttattgatcttataccttgttatacttttcaaataggaattttgttgaattttattaatactttatctgcatcttttgggacactcatggtttttctcctttactttgttaatgtgttgaattatgctgttatattttcagatgttaaacaatctttgcattcctaaaataagcccaactgacttgtgatatgttaccccctttatatgtaccaacggacttcatgtgctttttgtgtgttgataggatctttgcacctgtgttcttcagataaattggcctgtaattttcctacttygaatgttctgatyagattttggtatcttggttatactggtcttacaagaagagggaaatgttccctcctttagtattctccagaagagttagtgaagattgttattatttttttcctgatatgcttacaagatttaactggtgaagcctctgagaccagaggttgctagtgaaaaagttttaaataatgtttaatttctttaatgkaaataaaatgacttgttctgtgtatgtattagttttgctaggtttatccatttcatctaatttttaaaacttgttactgtattgatcatttctctctctttttatttttcttgctaggggtttatcagtttattatcttttccatgaattaacttttggccttttgaattttgttattgtagatttgttttctggttctttaatttctgcactttatartattttctttggttttatcttgctattctttttytgatttttcaaaatagcattgatatctagcccttcttttcaaacctgtgtttaaggctatatgttttcctctaagcatttttagctatagcagacatattttggtatgtcatatatatgtatatattttttgcttaaaatacagtgtgattttaaatttttgtttttgatctatgaatttaaagttcattaaaaaaatttctaaacatttagaaaattttctagtttttcttattgagttataatgtaatttaaaagtggttagaacgcatactctatgtgattagaatcctttgaaatttgctctgcagtgttctgtaaatatcagttaggtcaagttcaaaatcttgtttaaatcttccatatccttactgtcatttcctgagggaggatttctttatttctttcagtttttgctgataacaaatgtacagttattatatcttcctggtgattaactcattcgctattatggagtgttcccatgatctctatagtgttttttgatttaaattttccttaatctgatattagtggaactactccagctcttttttattagtattttcattaaatatcttattctgtccttttcgttttagctttctataagcatatggtatgtttactgttcagtagaatataattagattttgttttttaatcagttaacatgtaatgatgttactacttgttttatatttgttttgctcattttgtgttgtttttctctcatttcttgcttcttcttcgattaatggaatattttaaatcatacctcccaattttatcttcttttatgtgttcccctggcaattaccacatgtatccttggtaaatttatattttgccaattcccatttacccaatttctaccttttttttttcattgctgtcatatattttagttccatttatatttgaaaccccaacatatatattgtacctatttatttaggtttacccacatatttgtattttctctgctcttcacattcatgtacttccctttgggatcattttccttttgacttaaaaattccctttaatagttctttttaatatttagagacaaagttttgctttgtctctctggctgcagtgcagtggtgtgatcatagctcactgcagccttgaattcctgggcccaagtgatcctcctgcctcagcatcctgggtagctaagactatagctgtgcaccagcatgcttggctaatttgtaaattttcttgtagtgacggggttttcctacgttgcctaggctggtctcaaactccaaggctcaaggagtcctcctgcctcagcctcccaaagtgctgggattacagttgtgaggcactgtgcctggccctctttagtatttcttcagtgtaagtctgctgataacaaattatctgattttatttgtctgaaaatatattttttgaggtcctaaaattaaaaaaaattgaagtatattatggtatacacacacacacatacacacacacacacacttcagtttcaaaaaatatacacacatataactcgatggatttttacatttttttagggtacaaaacaagcaatagcattttattgttatgccatttgaccatagcattctttttttattttttatttttttatttgagatggagttttgctcttgtcgcccaggctggagtgcagtggtgcaatcttggctcactgcaaccactgccacccgggttcaagtgattctcctgcctcagcttcccgagtagctgggattacaagtgcccactaccatgcctggctagtttttgtatttttagtagacatgtggtttcaccatgttggtcaggctggtctcgaactcctgacctcaggtgatgcacccatcttggcctcccaaagtgctgggattaacaggtgtgagccaccatgcctggccttattattattattttttttaatttttgtgggtacatagtaggtttatatatttatggagtacgtgagatattttggtacaggcatgcaatgcttaataattgcatcatggaaaattggatatccacgttatttcaaaatggacattcaagcatttatcctttgtgttacagaaaatccagttgtactcttagttatttcaaaatggacaactaaattattattggtcctttgtgttacaaaaaatccagttgtactcttttagttatttcagaatggacaattaaattattattgactacagtccccctcttgtgctaccaaatactaggtcttcgtcattctgttttttttgtactcattaatcatccccatctcctttttctccacawcytcaccagcatttgttattgcctgccttatggataaaagtcattttaactggggtgagatgatacctcattgtagttttgatttgcatttctctgatgatcagtgatgttgaccacttttttcatatgcctgtttgccattcgtatgtcttttttatagaaaggtctattcamatctttagcccattttaaaaattggattatcagattgtttcctatagagttgtttgaattccttgtatattctggttattaatcccttgtcagatgagtagtttgcaaatatttcctcccattctgtgggttgtctcttcactgtggtttgattctgtctcttcactgtgggttgattgtttccttkgctgtgcagaagctttttaatttcgtgtcatcttatttgtccatttttgctttggttggctgtgttttaagaaatttttgtgcagaccagtgtcctggagattttcaccaatgttttcttttagtagttttatactttgaggtattagacttaaatctttaatccattttgatttgttttttatgtaaggtgagagatagggatcaaatttccttcttctgcatatggttatccagttttcccagcaccatttattgaagagactgtcttttcyctaacattcttggcaccgttgttgaaaattagttccctgtatgtatgtggatttccttctgggttctttattctgtttcattaatctatgtgtctgtttttatgtcagtaccatgctagtttggttactgtagctctgtagtatcatttgaagtcaggtaatatgattcttccagttttgttctttttgcttgggatagctttggctattctgggtcttttgtaattccatataaattttargattattttttctatttctgtgaaagaatgtcattaatactttgacagggattgcattgaatctgtagattgctttgggcaatatggatattttaacagtattgattcttctaacccatgtacattgaatattttttcagttttttgtgtcctcttcagtttctttcatcagtgtttcatcagtatattgatgtatgtgtgtgtgtgtgcatacctcacatgtatgtttatatacttcaattaaaaaatacacatagataacttgatgaatttttacatttttttgtaggggacaaataaataatagcattttattcttatgccatttgaccatagcatttgtgttctrtagttttcactgtagacatcttttacttctttggctgatttaaatcctaggtatttaattttatttgtggctattgtaaatgggattactttyttcatttctttttcagattgttcactgttggcatagagaaatgctactgatttttgtatgttgattttgtatcctgcaactttactgaatttgttcatcagtttgaataagtttttktgtgtgtgtgtgtggagtctttaggttttccaaaatataagaccatatcatctycaaacaaggataatttgacttttttctttccaatttggacacctttcattctttctcttgtttaattgctctagctaatacttaaagaactatgctgtacttgaatattgatatctttctctagatttggaaagttcttattatccctttaataaactttctactcttattttctctaccttctctttaaggtcaataactcttagatttaccctttgaggttgtttcctagatcttatacatgcttcattctttttcattcttttgtcacctctgtgtattttcaaatagaccattttcaagctcactaattcttgcttctgcttgatcagttctgctattaagagactctgatacattctttaacatgtcagttgagtttttcaactctagaatttctgcttgatttttaaaaattattgtttgtttatttatttattttgagatggagtcacactctgtcacccaggttggagtgcagtggtgtgatctcggctcactgcagcctccatctcacaggttcaagcgattctyctgcttcagcctcctgagtagctgggactacaggtgcataccacgcctggctaatttttgtatttttaatagagatggggttttacagtgttggccaggctggtctcgaactcctgacgtcagrtgatccgcctgccttggcctcccaaagtkttgggattacaggcatgagccactacgcctggccccgtttttaattattttaatctgtgaaatttatcttatagaatcccaaattccttctctgtgttatcttgaatttctttgagtttcctcaaagtagctattgttttttaagatggactgtcactctgtcacccaggctagagtgcagtggcrcgatctcagctcactgcaacctccgcctcctaagttcaagccattctcttgcctcaaccttctgaktagctgggattacaggcgtgcaccatcatgcctggctaatttttgtatttttttaaaaatagagatagggtttcaccatgttggccaggctggtctttgacctcaagtgatctgcctgcttggcctcccaaagtgctgggattacaggcatgagccactgcacctggccaaaatagcttttttttgagacaaagtctcgctctgttgcccaggctagagtgcagtgacacgatcttggctcactgcaacctctgcctyccaggttctgtgattcttccatgtcagcctgctgagtagctgggattacaggcacccaccaccacccctggctaatttttatatttttagtagagatggggtttcaccatgttggccaggctggtctcgagctcctgacctcaagtratccacccacctcggcctcccatggtgctgggattacaggtgtgagccaccgtgcttggcccaaaatagctattttgaattctgtgtctgaaatgtcatgtgtctctgtttctcyaggattgatccccagtgccttatttagttcatttggtgaggtcaggttttttggatagtgttgatgcttttagatgttttcggtgtctggacattgaagagttaggtatttattgtagactttgcagtctgggcttgtttgtacctgtctttcttgggaaagcattccaggtatttgaagggacttgggytcaaaggccaataacacagtggtttttgcagtcttatataggtattgtcttggtggtcttggataagatccaaaagttttctctggattaccaggcaaaaactcttattcttttactttactttcttccaaacatattgggtctttctttctgtatcgagccacctggaactctggggatttggtgatacaagcacccctgtggccaccatcactgggactgtgctgggtcagacctgaagccagcacagcactgggccttgcccaaggcccttcccttcagggtggtgagtttccccaggccccgggtgtgtccagagatsctgtctggtagcctgcgattctagttaaaaaccttagcaatctacctgatgttttatttttactacgtctgtgctggcattcaaaccacaatacaaaaagttcttcccgctcttctctcccctttccacatgcagaggaggagcgtctctctgtggccagcaccatgactgttccatgagcagttctgccaggccacaccaccagtgttcacttaaagcccaagagctctttcatcagcttgtggtgagtgctgccaggcctcggactcacccttcaggcagtgggcccccctctggcccagagccggtccagaaatggtgtccaagaggctggacttggggatctgaaaagcctgccttttgytctgtcccactgtgatacctgaaagcaagacaaagttccctttacttttccctctgcttttctcagacagaaggagtctttcacagtggccaccacaactgggaatgtgctgggtctcctttgaagcaagtagtctcagacctcaaggcccacagcatactccctgggtattgctggtgcccagtggcaattcattgcccaagaactctttagtcagcaggtgatgagtcctgccaggactggatccttctcttcaaggcagccggttcccttttggcccagagtgtgtctagaaatatcattggggagctagggcctggaatgggggcctcatggctctgcctggtgctctrttctagtgtggctgagctagtatccaagatgcaagacaatgtcggggctgggcatggtggcttacgcctgtaatytcagcrctttgggaggccaaggtgggcagatcacctgaggtcaggagtttgagaccagcctggccaacatggtgaaaccctgtctctactacaaatacaaaaattagctgggtgaggtggcacgtgcctgtggtcccagctactcgggaggctgagacaggagaattgcttgaacttgggaggcagaggttggcagtgagctgagatggcaccactgtactccagcccaggygacaragtgagactccgtctcaaaaaaaaaaaaaaaaaaaaaaagatgcaagacaaagtcctctttactctttgctcttctgttcttaagcagaaggaaggagtcastctggttcctgtgagctgcactgcctgggttgggggatggacagctgatgcctccctaggtcatgwgcaaccctagttcactggctctaagcactaggagttgcctaggaattggagtccttgttagaacccaacttgactgccattcaggtttacctaggaccccagagcacttcagcctgcagtggtgatgcttgctgggaaactcgttctgacttgctgggatgggtgactcccctttggctagagctagtcaaatgcccctccaagcatggccactggctgagcccagcagggcttcattctctgctgtgacagggcagcactgagtctctgcgctttccctccctgaagtatattctctctctctacctcatggccattgccagggaataggaaataggggtggcatccatgattcaagactgtctctcctgtcttcctcaatgcctttttttcaagatatgaagttaaaaccaggtactgtgattgcttacctgagttttggttcttgtgagagtgcttttctctttgcagatagtttttaaaatttgctgttccagcatggtgtgggagagcttgaatggtgtaggcttctattctgctaccttgcttcacccctggccatagccagatttttacatttgtatgagtttgtataaaccatcaagcagatcaagatatagtacatttctagcattctgataggctcccattgccccccccsaccatgtgaataatcacttccttgttaactattctgacttctatcaccatagattttttttgcttgtttttgagttttatgttaatggaattatgtaatatatactctggtttctggcttcttgtgctcaacagtacacttttgtaattcattcttgtttttcactggttcacagtatttttcttaatatgaatatgtcacaagttatttattaatggtgttcaagttgtttatggtttttggccattatgaataatgctgttagaaacatttttgtgcatatcttttgggagctatgagcacttatttgtgtttgatacaaatttagaattgctgggtcacagggtaggcttatttagctttagcagataatgccaaataacttcccaagtggttaatgatttatattcccgtcaacagtgtataaaggtcccagttgctttataacctcgctaacatgggtctttttttttttttactttagtttttttttggtgagtgagtggccgtattgtgttatttcatttcgcatttcttgatagcgcctacatttgaacacattttcatatcacctcacatcacttagatatcctttccatgaagtacacattttggggttgggtaagtaggagttgcatgggtgagttgtctgacttatcgtcatattctagattcaaatctgttgttggagatgtgcacacgtgtgtgtgtgtgtgtgtgtgtgtgtgtgtgtgwwgacaaatcttttccgtggcttggcatttccctctctccaaagatcttgtattraacagaaattcttaatgttaatggagtgcaattaattaaacttttacttataattagtgatttttgtgtttttaagaagtttttttctaacctcaaggtcatgaacatattttccaataattaaaataaattctttctttgatctttcaagacaaacctttcacatttagatgtctcatctctctggtattgactgttttgtgttttctgaggtataggtcaaagttcactttattctttgtggtttctgattattgtttgttttaaagactacctttttcacatttaattgcaaagaaacttthaagttgggcccctatgtgtgccacttattaattttttaaaaacagttttcaatgtagaagtcttttttaaaaacagttcttaaggtcaggggtacacttgcaggtttgtkaaataagtaaacttgtgtcatgggcatttgttgtacagattatttcatcgccctattaagctcagtacccatyagttattttttcctgatcctctccctcctcccaccctctgtcctctgacaggtcccagtgtgtgttgttcccttctrtgtgtccatgtgtactcatcatttagctcccacttacaagtgagaacatggggtatttggttttctgttcctgtgttagtttgcagagcataatggccyccggctccatccatgtccctgcaaaggacatgatctcattttttttctgtggctgcatagcattccatggtgtatatgtaccacatttaaaaatctagtctaccattctgggcatttaggttgattccatgtctttgctattgtgaatagtgctgcagtgaatgtatgtgtgcttgtgtctttataagagaacaatttatattcctttgggtatatacccaagtaatgggattgttgggtcaaatggtgtttctgtttttgttctttgaggaatatttttcaatgtagatgtcttgttcatgtttcactaaatttatgggtctgatttcttttttttatctgccccaatccaattctttttttatttaatttttttgagtctgatgttttttagtaagctagtaaaggatagttttagaattctattttttattttcttgctgtggtagaaatacaattggctttaaaaatattaatcttttatttaaggaacttgattatattaacttcttctagtttgtacataaattttttgaattctctatatgttyatcttgatcttcaattaatgatagcatttgttcttcccaatatttattccttttatttctttttcctctattattgtaatagagaagatctttaataaaatgttgaatttaagtgctgaaagtgggcatcatccttgtctggtttgtgaatcaggagaaagtgttcagcattttactaatgattaagaagtttgctactactacttttcaaaaaaatgattactctttttccttcttgccctagtctgtagatagcttttatcattaataggagctaacttttatcaaaagctccatctatatctgttttgatatgattttactatgatatttggctaatattgatattataattttcaaatataccaatattacagtactatagaaattcagttggccttttaatatatagttgggtttgatttgctgatattttgtttataatttttttgtttatgtgcatgagacagattggcctttgtctattttataatcttacattttggaacgatattatttaagctcataagacaatttggaaagtgttttttctcaattctctgaaagcatttgtgtaagattggtgttatttctttttaataatgccaagaagacctcactggtgaagccatatgaacaaggagcacaaaatctttttgttgtttgtttagatcttctgaggaaaattttacatacattgaaataccctaattgtatatatacagttccttgaggttttggaaaatggatcacccttatcaagatacagaatatttctgtcaccctgggaagttttcttcctcgttggttccccacagcttccatcaaatggcaaccgctgttctgagttttaactgtagattaattttgactgtttgaaaatttcatataaatggaattatacagtatgtactcttttgtgtccacctttcactcaggataatgtccaagactcatccttgcaattgcatgtattaatcgtttttattactgagcagtataccattttatcaatgttccacagtttattcattttcctattgatgaacatttgtttccaattttttggctattagaaataaagctgatatgaatattctcctacaggtttttatggaaatatgtttttgttttctttgggtaaawaaccagaagtggaactgctatgctaggcagtagttgcatgtttaaatttaaaagaaactggcatactacttccagttggattgtaccatttttatattcctacttatgccctgttcttgcctaatattttttgttgttaatmttaattttagccattctagtgggtatgtagtggtattctgtggtcttaattttcattgttgtttgcatttgtgttatatatcagcataatcatggggtttttgtgtgcctattaaccatttttatatcttcctttgtgaggtatatgttcaaattttttgctcagtctttagaaattgaaatgtttgtatttttattgttgagctgtaggagttctttgtcagatgttttagcaatattttctcagactgtgtggtttgttcattttttaaaaaaattatcrtttagagcagaagttttcaattttgaaggtataattttatcaattgttttctattacagttagtattttctgtgttctaagaaatccttgtttatactcagatcacaaagatatctatgttttttttttctaaaagccttctatttttagctactatatttagattggtgatccatctcaaattcatgtctgatgtgatatcggcattgagattmatttttttttttgtatttgtagccagttgtttcagcaccatttgttgaaaaggctgttttccctttattaagtcattttagcaccttagtaaaaagaccatgtgctctattgctgtcctctctattctctttatctcattgtctgcctttatgctaataccacagtcttgattcctatagctttatactaatgttgagattgtgtaatgaactctgagtgtatggagtcctactttgttctttttcaagatygttttaattattcgaagacttttgcattttagaatcaatatatcaatttttataaaagcctactgatgtaattgrgtatgcactgagtacatagataaattttgggaggaccaatatcttaataatgttgagtctgttagtctctgaagcagatatttctctttgttttttgaaggtctaacttaattttctcaaggatgttttatagttttaatgtataggtcttcttcatattttcttaaatttattcctaagtatttaagttttttgactctgataaatgatatctttaaaatttttacattcaaacactatgctgctaatatgtagataatatagttgatttttgtatcagactttatttcctacctactaaagtcatttattttttagtagttttgttgttattttggtccctggtttcttagtttttctgtgtaagcagtcctgctgtctgataataggattttcagaatagggacrcatcctttttactttgyagaytttctrtttctttgtcttgacttactgcactagctcggacctctaatacagtgttgaaatggtgtcacaagggtggacatccttaccttattcctgaaytgagggaggaagaattcagtgttttactgttaagtatggtgaaattattgttaggcartattttggtaggtgccttttatctgattgaagatattgtcttctgttactataatagtttgctgagcatttaaaaaatawagttattgataggtgctgaattctgtcatatgctttttctgtatctattgaaatcattatatggattttttctttcagttagttgacatagtggattactttgattaattttttaatagactttatattttagagcagttttaagttcacagcaaaattgagcagaaaatacagagttcccgtatacctcctgttcccacacttacccaatcttcatctcccaaaacactgaaccagaatggtacatttgttacaatccaggaaactacattgacatattattattacccaaagtctgtagtttaccttagggttcactcctgatgttgtacgttcagtgggttttgacaaatgtatgttatgtatctgccattgtagtatcaaacagagtagtttccactgccctagaaatcttctgtgctctgtctgtttattcatttctccctcaccactgacccctggccaccactggtctttttttataatctccatacttttgccttttccagaatagttagaatgatacagtatgtagcctgttcagattggcttttctcagtaatatgaatttatgrttcctctacatctttaaatggcttgatagctcttttctttttagtgctgaataatattacattgtctagatacactgtgtgcattgaacattccatgtacacttgaaaagaatgttttttctacatttattgtttgttgtgttttatacatcagttagctctagacggttgatgsagtcattaagctcttccataatttcctaatttttgtttagttctgtcagtgctgagaagagggttttaaagttttcaaatataattgtgggtatgtctgtatttccctgtagtttcctctctttttattttatgcattttgaaacttaattggtgcatacatgttccaattgttcatctttcttatacactgagcctttaatcatgcaatgtttcccttcaaggtagtactcgttgtcatagtctgatttgcctcagtatagccagctttcttatgatattaacctttttcatatagttaggttttatattttttacatattctgataatctgtattttaagtggactgtttagactgtgggtcaacaaactttttctgtaaagtgacagtaaatattttagatttcacagttcatatgttctctgtggcaactactcttctctgtcattgtggtgtraaaactagccatagacagtttgcaaatgaatgatggatgtggttgtattcaaataaaattttatttttaaaaacaggtaatggaccagatttgaccttcaggccatggtttgctgaaacctggtttagatgtygtgtttgtttgtttgtttgtttttttaatgagacagggtctcgccagtktagtggtgccatcatagctcactgtagcctcaaactcctgggctcaagctatcttcccactcagcctyataagtagctgggactacaggtgtgccccaccatgtccggctaattaaaaattaaaaaaaaaaatagagatgggggtctcactttgttgcccaggctggtcttgaactcctggcctcaagtgatcctcctgcctatgcctcccaaagtgttgggattacagacatgagccactgtattccgctagaaataaaactttttttttttttttttttttgagacagagttttgctcttctttcccaggctagagtgcaatggcacgatctcagcccactgcaacctccacccctgggttcaagcaattctcctgtcttagcctcccgagtagttgggattacaggcatgcaccaccacgcctggctaattttgtattcttagtagagacagggtttctccatgttggtcaggctggtctctaactccgacctcaggtgatccgcccgcctcggcctcccaaagtgctgggattacaggcatgagcccccgcgcctggccaataaaacttttaataaatggtcctgagacaactggataaccatttggaaaagtccatttgtggaacaagttaaaactcttacatattmcaggacaaaccacagatggatcaaaattcaagtgtaaaaaataagagaaacacaacccaaatatctgacattaggcaaccggttgaataaactattggtatagtgatagaatagaataccgtgtagctgcagtcaagaaagttcactgtacctatgtagcgcgatctccagaatgtattgtaaagtgaataaaataagatgcagaatagtatttaagtgtgtcttttttttgttaaacagaggtaggtagaaatattgtttacacttgtatttttatacagtaacaataataggtagtcgagggaatggggtagacaggagtgggagtgacacttataagtgggagcctttttatttttgttctgattttttaaagcatgtaaatgtattactcattttaagataccatgtaataacttttccagattgagctgaattcatgcaagttccatgaatcatttaaggaagaagtaattytaaacttaaacttccccagataatagaagaagaaggaccattgcccaagtcattttatgagactagaatgaccttgattctaaaacctgacatgaagcaacataggaaagaatacatatgagacgctttttttttttttttttttttgkggagaccgggtctcattctgtcatcgaggctggagtgcagtggcacaattacrgctcactgtagcctcgacctcttgagctcagttgatcctcatacctcagcttcctgagtagctggtaccacaggcatgtgtcaccacaactggctaacttttgtattttttgtagaggtggagttttgccatgttgcccaggctcgtctcacacctcggtctcccaaagtgctgggattacaggcatgagccactgtgcccggccttatatgatatgcctctgtcacaaaagtcgggatcatggttaactccattggaaaggtgggggttgtgatcgggtagggctgtaggggcagggttctgtgttattgcatgttctatttcttgatctgagttttagttatatrttgttcactttatcattgtataaacataatttgttttgtagttgtatgtaggtatgttatratcaattataaatggtataagataatttaaaaagaaggtttaataattatggaacatatgtcttacaaattatttttaaaatatatacactaacacttgatagatggaacttgyatgaggaaatacaaaaactttgaatagtttaagattagcacttttaatattcctatatcataaattgataagcagataaaaaatcaagacatagaggtatttgttttttttgaagggagaaacttttaatggcacagttattccaattccacgttaagatgattggtaaagtagtgatttttaaaaacagcaaaagctggtttctcccaaattagtttccccaagggattagaggtcagtctgtcattcagtcaaatctatatccagtagggaccacccagttttgttttaggctagtctgttgggatatatagtctgcaactagcagagttgcagctctaacaagtgttagaaatgttcattcacagaatcacctgaggtacatagaaaataaagcttctattaaaagaattatgctacagaaaagaacagagaggrtatatatacaacacaggaagactcagctgattcagggaccccaggagaaagtggctttcttcatttaaaaagctacttaccatctctcctgttaacttattccaaatctagaaagaaagtacttgccaagagatactgattatatatgggaatttaaatcctccttgttaggaattccactagcaattcttttggaaaacctgaaatcaaaccatttaggttctcacagagttttactctctggrgatgctctggttgggaggttggttggagtaggagttggagcagcaagcattgcgtagaatgctagtctgtgtgaaagtccttattaggaaattaaaagggttcactttgccttgtcagcggtgaaaatcagccctcaaggaggctgagaggtagccaggtttggagttatttcctttgttagggaactctatctaacccccaaaacataattsaaatagtatacacaaaagtttggtttagtccagttcttcaggccctgaagcacattagccattgtctaaactcttgaattatatctgaactaaaagaataaaaggacttctcacccatccccacttgctatattcaacttgccatatttaaaaaaatactcaactcgccatatttaagaaaaaacttttgcaggactggctggacagactacatactaaaactttttctagtactgatcagtgtgtgagatttctaaccaggatttctgatttgattccatagtggcctttttctgagagaattcgaagaaggcattgtcaccctagtcagttttctaggaattgacagtcagccagtagggggtggcagtcttcattctcccagaccaggctgcagatggtgtaggttctcctyatttctttggtgtcatgttggacccttcagactttgattgctggaaatcagcatacacagagaaggctccatctgctggaccattcttgtaaatatcagccatgatctctacacttgaaggtttactgtaaaacagaggtgtccaatcttttggcttccttgggccacattggaaaaagaattgtcttgggccacagataaaatacactaacactaacgatagctaatgagctaaaaaaaaaaaaaaatcacaaaatctcatactgttttaagaaagtttacgtatttgtgttgggtcatattcaaagccgttctgggccacatgcggcctgtgggccacgggttgggcaagcctgctgtgataaccattgctgtagtgcttgtcatctttgtaggaaggcgtgtagtgaggcttacaaattttgaacttgggaatgtctgtctgcctccgtcacatgggagctgagagccatattgaaatggtgctcacrtggtggatagaatagggtcttcaggctacgtgggagtcatagaggctacctgagagagaacaggcttttcttggttcagaaattctaggtttgagaaggaaagcctacatacagccatctccacactgcacaatagrtgagcagttttcagcagacatctccacattggtgttcttattggtctaaatgtacacctggtcagaaatggttttcatggccccagatgttcaggaagagctacatgaactctgttgatgatgtctttttaattgttagacattttggccactgttcctggatcagcattttttgggcagacccattttcttaacaaactgtactctctgaggcagcttggatctatccaggaaagtttccactarttaatttkcatagctcatgttgrcattatggagactcaacagtttatctgcagggtgtgaaattggggtattagtcagcaccgtaaggcagaaaaggtggccagacccactctttgggctctggatcctggatttactgaaaccgcagataccctgagcctgaagatgccatgtccagtcctaatacctggttcctggaacccacctccaccactgttgccacttgaacaacataaaaaaatattttaaggacatgttatcttgctgaacctaaaagataaatagagaattctacatgctgcagagactacacattcttttctagcttatttatgtatttatttatttaaaattgagacagagtctcgtcctstcacccaggcaggagtgcagcagtgtgatctcggctaactgcaacttccacctcctaggttcaagtgattctcctgcctcagcctcctgagtagctgggattacaggggtccgccaccacgcctggctaatttttgtatttttagtagagatggggtttcaccatgttgaccaggctgatctcaaactcctgacctcaggtgatctgcccacctcagcctccaaaattctgtgattacaggcgtgagccaccgtgcctggcccaaaatggctctttgaaagggttaataggatatttaaaaattgttggggtcttgggaggaaaatcacatgattatttcaataaaggaaaaacataactttgataggtrtatgttacaagaactcagaaaataggaataaaggggaatatccttaacttgataaaggatttatgccaataacctaaagcaaaccttttatggagaaactttagatgcattctgtctaagatcaggaacaggacaaagatggttaacactattacagctttatatgttactggaggtcctagatagtccattaagaaaagaaatagaggccgggcgtggtggctcatgcctgtaatcctakcactttgggaggccaaggkgggcggatcacaaggtcaggagattgagaccatcctggccaacgtggtgaaattctgtaacatctctactaaaataaaaataaaaataaaaaaatagcggttctaagatggccgaataggaacagctccagtctgcagctcccagcgtgagtgacgcagaagacaggtgatttctgcatttccaactgagcacatggcacaccaggacatcatatcccgcacctggctcggagggtcccacgcccatggagcctcgctcactgctagcacagcagtctgagatcgaactgcaaggtggcagagaggctcggggaggcgtgtccgccattgctgaggcttgagtagctttgaagggagtagtgcttctcccagcaaggagtttgagatctgagaatrgacagactgcctcctcaagtgggtccctgacacacgagtagcctaactgggagacacctcccagtaggggccgactgacacctcatacagccgggtttccctctgagacgaagcttccagaagaaggatcagacagcaatattagccgttctgcaatatttgctgttctgcagcctctgctggtgatacctaggcaaatggtctggagtggacctccagcaaactccarcagacctgcggctgagggtcctgactgttagaaggaagactaacaaacagaaaggacatccacaccaaaaccccatctgtacatcaccatcatcaaagaccaaaggtagataaaaccacaaagatggggagaaaccagagcagaagagctgaaaattctaaaaatcagagcacctcttctcctccaaaggaacgcagctccttgccagcaacggaacaaagctggacggacaaagctgcaggcatcacgctgcctgacttcaaactatacacaaggctacagtaaccaaaacagcatggtactggtaccaaaacagagatacagacyaatggaacagaatagagcccctagaaataataccacacatctacaatctgatctttgacaaaccggacaaaaacaagaaatggggraaggattccctatttaataaatggtgctgggaaaaccggctagccatatgtaaaaagctgaaactggawcccttccttacatcttatacaaaaattaattcaagatggattaaagacttaaattttagacctaaaaccataaaaaccctagaagaaaacctaggcaataccattgaggccatggcatgggcaaggacttcatgactaaaacacgaaaagcaatggcaacaaaagccaaaattgacaaatgggatctaattaaactaaagagcttctgtatggcaaaagaaactatcatcagagtgaaaggcagcctacagaatgggagaaaatttttgcaatctactcatctgacaaagggctaatatccagaatctacaaagaactcaaacaaatttacaagaaaaaatcaaacaaccccatcaaaaagtgggcaaaggatatgaacagacacttctcaaaagaagacatttatgcagccaacagacacatgaaaaaatgctcatcatcactggccatcagagaaatgcaaatcaaaaccacaatgggataccatctcacaccagttagaatggcaatcattaaaaaartcaggaaacaacaggtgctggagaggatgtggagaaataggaacgcttttacactgttggtgggactgtaaactagttcaatcattgtggaagacagtgtggcaattcctcaggtayctagaactagaaataccatttgacccagccatcccattactgggcatatactcaaaggattataaatcatgctgctataaagacacawgcacacatatgtttattgtggcactattcacaatagcaaagacttggagccaacccaaatgtccatgaatgatagattggattaagaaaatgtggcacrtatacaccatggaatactatgcagccataaaaaggatgagytcatgtcctttgtagggacgtggatgaagctggaaaccattattctgagcaaattattgcaaggacagaaaacaacaccgcatrttctcactcataggtgggaattaaacaacgagaacgcttggacacagggtggggaacatcacgcactggggcctgtcgtggggtggggggagggaggagggatagcattaggagatatacctaatgtaaatgacgagttaacgggtgcagcacatcaacatggcacatgtatacatatgtaacaaacctgcacgttgtgcacatgtaccatagaacttaaagcataataaaaaaaattattagctaggcttggtggtgcgtgcctgtagtcccagctactcaggaggctgaggcaggggaatcgcttgaacccgggtgtcggagattgcactgagccgagaccacgccactgcactccagcctggtaacagagcaagactctgtctcaaaaaaaaaaaaaaaaaaaraaagaaagaaaaaagaaatagaaatcagttagcaggattggacaggaagagataaatctttaagtattaatagaccacctacacataaaaatgtatagatgcaatagataaaaattttgttaataagataaytgagtattttcagttaagggatcatcttacaaaaatcagtagaattcctctgtattcaaaataattaactagaagagatgatgatacaagatgtcattcacaatagcaaaaacaatcatgtctctaggatctgggaattaacctaacaatgcataagatctacatggaataaattttaaactctgttacagtattattcaaaagacttgaaaaccagatacaccctattcaaagatagtacaacatatttgtaacgatrtcagttctccctaatctataaattctatgaaatgtcaatcaaaatccagtggaatattttgagaaatttgaactattaaataatttatgtggagcttctgattctgattatgacacttttgcttatattacaccagctgttctgctgaaaacaactagaaaaccttgactaaagtataaatttatctgtttgaaggtataagaactatgaaatcagagaggtaaactcccaacattcagccctacctttctctttcaggcagttgccattacctaggcagtagcagaacagctagaaatctcataggcaggaaaaacataacttggagttcaggtttcagtaaagagtagggctctgttaagtatcctaggtattcagtttcgatccttgaaggcctatcacctttaggtgtaaagacaaatggaaacgagtctgccattgtaagacagaaactcagttgcaatcaaatcagttcttaagactccatgacaggataaatatgaaaattacacccagacacataatcagtaaaacttctgaaaaccaaagataaaaaatttgttaatacctagcagaaaaaggacatgtaatttccagaaagcagtaagacagttcacttctaacagaaatgatagaagttgaagataatggaaaaatggcattttaaaactactgaaagaagaaaagccatcaatctaagactttatgcccggcagcagtatctttaaatgaaggcaaaaaccagaagatattgctaaaagaagacctaggcaaacgaaaagacattgcatattcatggatttgaagacaatatttttaagatggcagtattacccaaattgatctacagatacagtgcaatccctataaaaattcaaggtacctttctggtagaaatggacaagctgattttaaaatttatgtagaaatttgagarttccagaatagccaaaacaattttgaaaaagagcaaagttggaggactcacacttcctgatttcaaaacttactacaaagcaatggtaatcaaggttgtgtggtactggcataaggctcatatataaatcaagagaaaagaattgaaagtccataaataaatttttacatttatggactattggtttttgacaagggtgctgaaaccaaggaggtaaaacagttttttttccaacagtgtggggcaactggatatccacatgtgaaagaatgaagttggactctacttcataccatattcaaaaattaactcaatatagatcatagacataaatgtaacagataaaactatgaaactcttagaaggaaacatasgtgtaaatttttgtgaccttggcttaggcaatggttcttaaatatgacacgaaatctcaggcatcaaagaaaaaacaaaaaataagatttcatcagagtttaaaacttttgtgcctccaaaaaacaccatcagggaaggaaaaagacaactcacagggtgggagaaaatatttgcaaatcatrtatctgatgagggcccagtgtctgtgttaaaagaactctgcaactcagcaataaaagcacaacctaatttaaaaattgatgagtgatttggatagctgtttctccaaagaagttatacatatggacaatatgtacatgaaaagatgctcaacatcactggtcattagagaaatgcaagtcaaaactacagtgagataccccttctcacccactgagatggctgtaataggcaagacagtaacaagtattgatgaagatatagggaaattggaaagcttatgcattgctggtagaatgtaaaatagtgtaaccactttgtaaagaaattagagagttcctcaaaatgttaaacatagaattaccatatgatccagcaattctactccgasatgtgtacaaacgcaagagaattgaaaatgtaggtacacacaaaaacttgtatatgaatgttcatagcacccttaatcataatagctaggaagtggaaacacttcaaatgtccatcaactgatgaatgcataaacaaaatgtggtatatctgtatgatggaatattatctagccacacaggaatgaagaagtactgatacatgctacaatatgaatgagccttgaaaacatggtgagtgaaagaagtcagaacaaaaagccacatattgtatgattccatttatatgaaatatctgtaggtttgttacataggtaaacgtgctatgatggtttgctgctcctgtcaacccatcacctaggtgattaagctccacatgcattagctgtttatcctgctggtctccctctcccggcctgcccccacctccccaccccataggcctcactgtgtgttgttcccctccctgagtccatgtgttctcatttttcagctcccacttataagtgagaacatgcagtgtttggttttctgttcctgttagccaatagaacaagtagacaagaatcagtaatggataaaggatatgaacaacctcaacataattgacatagaacattatactgaatcactgatgactacttgtttcttgttcagtacacatggaacatttatcatttactagtgtatagacatgcagttgatttttttttaatatggaccttgtatcctgtaactattgtaaatccacttagttttaggacacagtttttgtatatggtcccgtgttagatttccrccttctatcttgtctaacctttatttcctgtctttaccagttttatggtcaccagagggaaaattcaaagtctccaaagtttggcagaaagcatcagagtgaaggccagctatgatgcctggatatccattagtattcttagatgcacttaattttgatgccatgccagtttctttcatctcactcagaaatgtatttaaatggttattttaacagtttctcacatttatgatatataggaaagtaattcaatgtatctgatcttccatactgacagaagttgaagtttttgttttttcatatgaatgttagtctcaacttgtctgcttaaaaaagtgttattttcattgggataatttgaaatttacagatgaaargagaattgaagtccagtcctctttggattacaatgtgatttataagttcagagaagagagatggccagttttataaactttttacttgtttcttacgttccttactagatttttttagtagctgttgacgggatattttctactatgtttttttctttctttttcttgaaaaatatgaaaggcatttgtttatatatcctacttcattaatattaattacctttgttaccagctaccttaacaaattaccttgtttctagtagtttcctttttgtttattttatacttttttagttatgcaattgtgtcttctaccaaaaataataaaattgggagtctgtacattgagtttccctattagctctcttgactccttgagtttttattttcagctttaactctctatgtaattgctcttacctgtgcattaattttattctgcagtgtagtttctccattttcttttctctccatctaaccctattctgttcrtccttagatttcaggaattctttaaaatatctaatcagctgatgttactcttactactttccagtttattatggtttatttttgacaacttatattgtctgtcatctcatgagcttgaaggtgggagggaagtaaatgagtctagtttgccatctcaaaacagactctatttagactatttaaatactaacttaaaaagaaaacatcaacaaaagtcaatgttcctggctcttattcttcagtaactgaatatttcttggctggtcttcgcagctgaggttctttatactgcttcagtgtttctgtcctttgagaacttcaaatctttcctgtttctgcctctacatgtcattgatgaaagtcttcattccttgtaccatagatcctggaagttttgatactttccatctatggactatgatataattgcatcctgtttgagctgtaaggaggtgaggttcaaacctcttctctttgcttctsggttttaactagtatactagagctagatcaggttcaaaattaccggattttctgttaaaagrgatcaagacttaaacctggagccaaactggagatttccaattattttctcctaaatgcaaagttgggttctgacttggaatctcggagtagactccaagtatatgtatccagctagctgacttaaggtttccagccagccttacaaaccaattggctagtggaacagagaacagtattgaaatatgggcatccaggccaattgcaagaggacagatcttgagtcctaatccatttgagtttattacaaggacagaagtgaagtgaaagggaattactcatttttrtttttcaacatttgcctcttgaatcaagagagagggtggagcctctcttgcttgtgaggcagggtgtttccacatactcgtaacttgaactctaggaagaaaaaggtagcaggataaattttacagaaaagggaagtagagcagcatgctttgcccaagcactcatctcctttgatacagttccttcagatactttgaaatgactaatgcattatatttaaggccactagtactagtcattgtgttttcaaggaaatcagaggtattccctgcttcactaaatgtatttgtcatgaccaattgcttctttaarattatcccatatttggaaatcagtgaaagaattgcggcagaaagaaatcagtgaaggaactgaatacaagaataaagtcaggagatgaatgagtttatgaaaatgggaataaagatataaaatacttttattgttctaatggggagatgagaacacctatacaacttcttcctrgtatttatacttaacaactattaaattccttatttatgtgtttaatgtttgtgttcaccaataaagtgcaatctctgtgaggccagggagtgaatttctcttayttgttttattccctacttagaacagtgcttttaaatgtaattttttaaatcaagggctaaaaacaggaaaatggagttctttttttctttcatgcttccctcttttgactaatgaaaataatacttattaatcatctactgtaatccagtaatttacatgcccttgagtagggttgcagtttaatcagcaagggggagaggtacacaggattgatacccacttctrtaatttgagggatatttttccaattttatttctattcacaggtaacaaaattgatgtagttttataaacattaatataatgaacttttcttaccaaatatttagtctttttcccatgtattgaaatatttctttgtaaatctgatttcttatggccccaaagaagtccattatgtggatatttgataatttacttaaccatttccttattgttaagctagaatgtgtgctccatgaatataaagattttttttccctctgttagctcattgcagtttcccagtacctacaacagtgtctagtgcgtagtaggtgctcaatatgtatttgtagcatgagtgaaagaatgtgctctattttttccatattataaatgccttataaaacgtttttgtacctaatgctttcactacacttcaaatgattttctaagaataaatttctagaagaggacttgccagttgaaaagacatagaaaaggttgtatgatttcaaattagttttmtaatccacaataatgttacctgtggctatttttctttacactttaattttataaattttctatarcatattaggattaaaagagttattttttttcttttaagtacatttctatttattcagagagcagtgagcagtcttctaactggaatataaggtttttgttggtggtggtgaaagatgaggcttgaaaggtcacagctgggtgtggtggctacacctctaatcccagcactttgggaggccgaagtgggcgcatcacctgaggtcaggagttcgagaccagcctagccaacatgatgaaaccccatctctactaaacatacaaaattagccggggtggtggcaygcacctgtaatcccagctacttgggaggctgaggcaggagaattgcttgaacctgagaggcagaggttgcagtgagctgagactgcaccattgcactccagcctgggcaacaagagcgaaactccatctcaaaaaaaaaaaaaaaggaagaaacatcacttgggcaaagcagtgaatggcttggtatgctatgctaaggacctttattctgcaggaatyggagtcctataaactattaataagcagaatacaaaaacttcataaaataaataaaaacaaaatacaaaaaagcagagtacagatgccacctgtcttttgaaagtgttatgtcccagtgaacccactgtaaattaaaaataagtcttgaagatgcatttaatatacctaaccatcatagcctacctaccgtagcctagcctaccttaaacgtgctcagaacacttatgttattagcctacagtggggcacaatcatctagcaatactgtacagtgtagagtgtcggttgtttgccctcatgactgcgtgagagctgtggctcgctgcaactgaccagcatcctgaaagagtctcatatggctttctattgaattcatgttgtttttkcaccatctgtaaagttgaaaaattgaaaaatcatcagttgaactattgtaagttggacatcatctgtagtggtatagttagaactcttctagaaaggtaatagtgatagtgctgagcaaggattggttagagaaggggacaaagggagrtgctagatttctcactctctagtctccatatctcaccagtcactgactcagtatttcttcagtttcttcctctttttcttagttagatcctctcacctcaattactgctataactttccaatgtctttccctgccttaaaaccattctccacagagctgctagagtgatctagctaaaactatctgcgcagaatggttcccctgttatctgtatttttaaggttctagtttattaacatgacatacagcttctctgctctttggacccttcagcaccatttcttgctactccctgttgtgctctttatgttcctaggaaaggaarctgcttattgtcctgtgtatcttctcccccacamatatttcctgcctgtgtgccttgcttatgctgtccctacttcccaaactatcccatcctcagtcacatccatttcagtccccttttttctggagttcactgtgtaagactcaggtgtcagccacttcatttaaaaaaacttttaacatacgtattcacatactatacactttcctcctctactcccactttggggtcaaggatctctcttctttactttttataggaccctgatttttatctctcctttccctgtagtactgttatggtactgtctgtgtactactgtttaggtgtgttttgcacaatggactgtgagaatttggggggcargaacttgtgggggccaagggtccagcccttgttattggtccaacctttggctctctgaaagtttgctgaaaaatgaacatgcacaaggcagattaataggagaaaaggcatacaaatttatttaacatgtatccgcgggaacctgtatgatgaccccaaaatacaggggaaattgcccattcttatacttaggttcaataaagtatagacagctgtgtagaaatgtgattggagaagaaaaagggtatgatctaatgctaacagactgagtggggaaacccagcaaggcctgtgtgtctaaagtcttcttggcctctctgtgcagcattccttccttccaggtatggggcaggaccctctctggaacggkggtgtgatgacctacaatgaaacaggtaaaatctgatagttttkttgttgttgttgtttctttgtttgagacagagtctckctgtgtcccccaggctggagtgcagtggcgtggtcttggctcactgcaacctcagcctcccgggttcaagccttcctcatgcctcagccacacgagtagctgggactacaggtgcctgcctaatttttttgtattttcagtagagatggggtttcatcaagttggccaggctggtctcraactcctaactttaagtgatccgccttccttggcctcccaragtgctgggattacaggcatgagccaccgtgcccagctatttttttaaagacaaggtctcattctgtcacccaggctggagtgcagtggtgcaatcacagctyactgcagtcttgaccaagctcccatctcagcctcccaagtagctgggatcacaggcatgcaccactatccctgactaattaatttttttttttttttttttttttttggtagagatagggtcttcctatgttgctctggctggtctcaaactcctgggctcaagtaatcttccctctgcagcctcccaaagtgctgagattataagcatgagccaccatggctggcaataatttctttgtagccagtttttataccaaaaggctgagggaaaactrgagtaatatttttaggttttatggctggctttgaggaaagggagttctagtttctgtgacctagagaagagggattctagtttctatggcttaccttgggggagaatgggactgagagacagagcaggagaaggtcaaagaaaaacttctgtgtctaatgcagctgagtccttcattttggagtattgttttctgagcccaacaaactttttattcagctttgtgttctcagcagttagcataatgtatagcatatagtaatgtggtaaaaaaaaaaaaaagcctattatttttctgttgaaataatgaggtcttgaactaggccaggggtagtgggaagggagggtgggtgggagaaacattcaaaaaagtcaactttggatgttagtgataagttaaaggtatgtaatttatagatgatgagatttgcaacttgagtgagtttggtatacagattgttgacttcttaaatttaagacatttgctgaacatgctagagagatgaccagtaggcaactasaaataagggtatagatagtaagagatagggatttaggagttgccagcatattggtattaactgaggctttggaatagataatataagtcaggaaggagaggagatgtaaaaaaggtggagtagagatccttggggaacaatatttaacaggttacagcaaaagaaagattagagaagtatattaattgtcagcagtgtccagtaatgaagaaagggtaaagcagatgagaattgagaacaatttatttggaaattagacagttgttattgaactttgagagaatagtttcagtctagtagagtgaaatagaaattagattgaaataggtgtttgaaagaggttgagaagcaaacaaatgatgagcaagtggaaaaagcaagcatgtactactctttcaaaatgtgctttttggagaaatgtgttgtggaaagggatgtggtatcagttccttgaggaaaaggtaaaatgggggtgacgtttttgttcatatttttgttcttggatggggaatggtcttggaaaagtttttcaattgatatccaggagaaagggggattgaaagcaggaaagaaatttttaatggaataaggacaggaagggaaggaaggagagggtttgggatcaagatgtcaaatgatactgttagccctgaaaagtggtagggttcaaaaggaaaagaggtatgaagcgcaaaaacatttagagttggcatgagggaatgtaaaaggtctgttatctataaagtaggcaaccaggtcattaattgctggtgaagagtagataggacaggaatgggatagtttgtggtggcagggtggcacaggacattttggaagattagtaaagttctgttgagagtgatagaattaatgttaggactgcaggtagatttgagggttcagctgagattgagctatggaaataaaaagcaataataaaaagacaaagtatatatatattcttatatatattattccttacataatatatatttccttatatataaccttattttatatatatccatatatgtatgtgtgtgtgtgtrtrtatatatatatatatatatatatatawaacatgactttttttcattaaagagactgaagaaaaaaagggatttgaaaaattacttgtagttgctcattaggatatgtaaggcagttacttaaggacagccaaatttgctctactgtcctgatacttggaagaattaaagaatggggtacagggctggggagttggtggcagcagagagcagtccagcagtctgtcaagtcctgcctggtcacaggtcagtgccatttaaacctccaggatcaagtcagagcacttgacgcatgactgataatatttgagatttagtgtgaggtgtctttttaaatttttttttggtgtgttcttgctgtatgtgtgtactgattaaaatatgtaaaataaaagcaacaggttgctggtaattaactctgttatttcaagacagaattgattttgtatagaaaggtagtattggctggattatgagctttactgcttattcattcctgatgaaaatatctctgctgggcttacataccctgtagtgtttatgaactagtaggtttagaaatgaagagaccctagagagataatcatttcctccaagatgttttgtcttctaccaggaatttgtcaatagatatataggcccagtgggtaggctcacctctgcatgaatatttgataggagcatttctatcagttatgctctttcttaaaaaaaaacatgaaaataaacgcaycatttatgtaactcttataagaaatgcataaatcatgggaaacagtgagcaagatataattgaaattcagcagctcagtgagttacgaaccttctctctacaactcaattgtgttagttactgcttaacttaacgctgggttttcctttttgctttcaggaaaacctttaacttacgccctgggtgttgcctgtcaacagtttcctggtggctcaccgcttctgcctgctccagccttgctccggcagcttcaaggcttctgggcttcagagcttgttgtgaaagcttgctgctttggcctgctacccctgcttcaggtgtcaaaagcttttaattagcttgcttcctctaattactataactaggcccttacgtgtctgcataatccagttctagggtctgaaaggagaattacctttagccattcattcttctttaaaagatcttttactttggccctcctggcattcaygggagagtaagaagttatattgcatgattcacctttgatggtgctagtcttcagtctgtaggggcaaactggtgtgggcatactgtattttatagccagtgtttgttctgattggttgatgcccatgctgtcccaattttaaagtattttgactattgctactgaatatataaattgtgtctccatagaaaggatatctctagctggtttaataaactctttgtagtgtttttagtttgcttattaaagataatatttagttccctcccccatttttaataaatattttgaacacaaattggtcgctcacagaacagtttttaaaaatgcagatacagtgatttctatacattttgtaatgatcaccattaacatgtgtcaataggtatcagaattataggtatgatgaatgggaagagctcttcagtacttatataactattcagtacttggagtagtaaagtatactagctctcttatcagacagccaggtacatattctggttctattacttattaattttgtcactatgagtaagttaattaacttctccaaacattagtttactaatttaagtggggattrtagaatctgctttagattggtgtaaggattaaatgaggggtaatatatgtaatatgcttagcccagtgstaggcacagaataagctttttataaataagagttattttttgttattattattaatcataaatgatagtagatgatatgtaggggaaattaaaaggtgaaaaagacaataagtaatgagcagcaacagacaaaagatattaaaggccaagttgtgaagtcaggacttcgatgcctgttaagagagcagagtgagctggaataagctgatagatgtttaataaatcacaaaatacacagttgtatctcttttgtcataataccttatttttgagttttagtgtcagtttagttgtatacttgcagctgagaatattgatgcygtaaactttgcatgtatatacacccacatagattaccagtcattcatcattaattcagctaatgtttattgagtagctatagattcccaattactaggtgtgtactagtgaacaaataggaaaaaaaaatccctgccctcattagcktatattgtagtgaatgaagcaaacaatgaacaaagtacttaaatagaatacatagttcatgaaataatgacaactaatggtaaagggaagcaaagaaatgggttagaaaatgtcaaggggtaaagtgacatttcattgaaggagtgagagagaaagytgtgtggcttcgtggggctagaatattccaggcctagggatcaacaagtgcaaaggctagttgggattgagtgtggtgatcattatagctggagcatagtgaaccagggggagagtagcacgaggtcagggaaggtggagggccagaacatgttggccctataaggcatagtaaggattttgacttttacttggagacagatgggaaaccattggaagctgtggagcagaggagtgtcatgatctgagctacatttcaagaggatcaactgtggcttyagtgttgaggatgggttgtgggatgagagggcagaagtagtagagaggtcaggtaggacaatccaggcaagattttcttttttttcttttctttttttttttgagacagagtctcactcacttcagcccgggctgaagtgcagtggcgtgatcttggctcaccacacctcygtctcccgggttcaagcaattctcctgcctcagcctccctagtagctgggactacaggcgcccgccaccacacccagccaatttttgtatttttagtagagatggggtttcattatgttggccagactggtctcgaactcctgacctcaggtgatccacccacctsggcttcccaaagtgctgggattacagacatgagccatgtaatagtagcttggaatgggttggaacagaggagatatggtgaatgaattcttgctatatgcaggaagactagatttatagaactccgtggcaactgtttctgtattctacaacctgtaacttaagaatgaacataaaatactgttacagcattctgtaactgcaatttgtaactagtttgtagcttcaaatgataatacattstgtttaagaactgatttgtatacatttgtcacttagtgattatttctgtagtgtttacagaaataattcttgaattattattacaggttttctaacatcatgtttttactatgaagtctttcaagacattgctagtgttwttaaaaatatatctttgttctgtgttaaactatagtcttgcagttcatactaaatgtacttttaattttgatcaagctaaacaagaaaggacattttaacagactacactgttatatgttaagctgtggttcttgaaaatacaggacctgaggttagagttctaagagaatcctcctcttcttgatttttagctactgaaatgaatatcagtatgacttgcagtgttaaaggagaaaagcaagatcagtttgattttattgtattactttgtaagcctcatattcttttctcatcatttatcaattcaataattcaagaatatttcctgaactgacttttatttcaccacactcaccttattccagaaaagattttaggtagctcatgaaactgttataagataggtttgaaaatgttttccaccctgcagcagcatggcattcctgatraccacatacatgtgtagtctcattttagccatgatcagttataccacaataccttgataattagcggtcatttcatgaccaggatgtgatgtgtggtatcccatactacctcattccatgcttcaaattttatgtgttttatatagaaaatgtagaraagcaagtagaaattgcatcacttagaaatacctgatcttttgataaagcatagaaatttatggtacatattttatgtgtgtgtgtgtgtrtrtatatatakagagagagaaaaagtcacagtgtacatactttaataaacttatttgtttaacattatactgtgaacttttccgtattaacattcctcagtaattttttcaagtgtatgagtaatttttctgtcatactgtgagataccatatttagtcaaattgatcatgtagaatatttaagttcatttcaatattttactattgaaaaccacactgtggtgaatattgtggcttagtttttatttgtatatagatatattcagttgagggtatttctatccatatttctatgtraatatatttgtcataagtctaaaattacagaaagttagaaattaaagagatgaaagatttttttattttggtagttaaactgaagaaattgagagttatattctttgccacatattagaggtagagttggcagtgaagagattgggctgtaatgtgcttagtgcaatgcctggcacataatcatagctaacacttattgaatgcttactaagcaccagacccttgaaaaacttgaaattatttttcaccctgtggcagcatggcatccctgatgactgcacaggtgtgtagaatgggtctcattttgtccctgatcagttacaccacaatacctcaatagttagtggtcaataatcccgagtacaaggattatacttgtattaatttttcaaatctttaccacaatgatataagtattgttattaaccccatgatcatgacaaggacactgaagtattgaaaggttaagttttttgcctagagttatacagctaaggacaaaactaggattcaaacccaagtagtctggcttcagaatccatgctatcaccactccccaaaacagccacaataaatgctagctaagtgtttgagtgttcaataaatattaggcgtcatcattattcstactgcacagttgcatattccagaggtggttttggttccaatatttttggattttagaaagataatttagtttgtatactctattttatgtaacattctcattggggtttggagcagcmcttcataaacagatacattcacgtttcttcagtgaagcatgtttgtttttatactaagtgagattaaaaagcaagaatattaatagcctgatgtcactacatgctgccaaatgagttatgaaaaccttttgtctttgagaattgcagataagggattatggacctgtataaaactcttaccatagtgcctggcatttagaacacactyctcctyctactagatttatactagtagtattgggtgggtactactactaccactactgttattagtagttatcatcagatacatacttacagaaaactggtgaattgtagagtactgttagtacttttctcacactgtgaccttgggaggggaagacacctaagttttggagtctttcagctattcttccctcaatcagaataagagggtgtaagtcatagtgttctgtgtgttttcccygccctaaattgagtcttgtatagcttagtgctcctgtccctctrtccatgtgcactcccagttgtgcagggtttgattttagagtctaagcaatagctcacgtggtgtgttcaccgcttcagagatcttagtgaaacaacgtttcaagtttttccttattctttattacagccctctttatgagcccattgggagaacaatttaattgtttgaaattgagatacttccttttytttctcatccattttaattgatgaaaaactataatcacagtcattataaycacttataacaattaccaagaaatatttagtatgtatacacttactgtaattatatggtcatgttacttttattgcagtctgatccaaatataaatttattaaataaccttgatatgcacatttgctattaagtttttttttttttgcacttgaatttaaacctatactctgtttttggaaatatcccgttgaacagcagtttgaagatctgctgtatatagtttgacctccctttctgcatattagagtagcatttctcttcctccccaccmacccccagtaactggaaacatcctcgttcaacctttgttttcctcttttgtgggctagcctgtgssctatggcaagtccaatggcctggaagtggtcttacagattatctggttaaactgaagcagagagatagaaatgwaatcaatttgttgagagtgagaaagggattttatttattgtatttgatagtttttgatctgcaattgaaatataaaatacagaaatagatgttcctttttttttctttttggaagggatgtgtaaagtttagtttttgtaaaatcgttagttttaattgctctctatgcgtatgtatatgtgtgtatgtggtttgggggttatggtatagtatgtaagagtatgtgatatgaaaaataggatcgttttcagtttatttcatattgtttgatcctcacaaaacatatttgttttggcagctggccttccttgtaacatggtgttggaattttgcatgcattatttaataagctctagttctttcctgttgagcattttgttcagtttcttagtgatagtagatattgagtttgaattccagggcagaaaagttggaaagggggattaatgtgtaattaccaactaatacagtgttcaraaataccaactaatacagcgttcacaaataccaactaatacagcattcacaaatacagttattagtttggcacatgttcactaactttttcatctggcaacattatttaatttaggatcttagaatttgaactgcattgacataattgataattggtatttatttttttacagaggaaaaaggaaaatggatggctgaaaaaattatttgtcattattttaaaatttatatttcctttatcttttctaggttgctgtagtaaaactaaaaaatgcagataaagtgtttgccatgaaaatattgaataaatgggaaatgctgaaaagagctgaggtaagagtcttatgtattggaatatataaatattttagaaatatwtttcaggaattataaaattccatagagctcattaaatattacttggtaacattttgtctgtggtgacattttttaaggcataaaagacaaattcaacacaattgtgatataattatgataaaggttacaatccataatgctaatttaatattagtggaatactaaatggaaacccttgtaatggggggcttatgcagctatatttaaaggatgtctgcaaactactttcttctatagaaagacrttttgtaatggttgatttctaacgtgacgtaacttgtttatattattctgtatttatctgtattctgctacaagcaaaagtcagcaggagttttgaacatgccctctagaaattctgtttaatgctgatyatgcagtcactttgtattttgttttatattacaggagttgtagtaaaatctagtaatggaagaactgcctgcatttttatgtagatttgagggaaggattgactggagtgatgttaaaaatatccagcagctggtatggcctggtcagaactgmtgtcacacatagatttggrgtggacttctggggggtccgctgctgtgctgtatcatggtgaagggttgaatgggataggcattctggggcttcagggaagcagaacttaactggtgtagaattctgtcagtattttaactggtaaaaggtgatactgacgagcaggctgagtaatagccctggaagttagtaagattagtaagaaaataaygacaaattcgcctttagaaatctttatctgtcagtacttgtagcaacccaaagatgaacaaacatacagggaaaagcaaaaagtgtttccatgatgacagatatggtggcagtgaaagtaaatacttcattatttatttatttggagaaatttgaaaacacaaagaagaaactaataatcacttttgttctgttacccagaactaataacattttggccaagtttttgcttttagtttttttttttaaactaaaamaaacaaacaaacaaaaaccctcagaagtgaagcacaaatatattctctgtaaaacaaataatagcatattacagataaagccaaagtgttctttcaccacccaagtccatcctttctctaactcccagaggtcattattacttttaaaatactatttcttcattaaacattttttttgtttttatatatttaggagatacaggtgcagattgctgacatgcatatattgcattgtggtgaaatacccatctagtgaacccatcacccaaatagtgaacattggacccaataggcaacttgtcarccctcacccccttcccaccctcccaccttttgtagtctgcaatgtattattccactctgtatgtccatgtgtactcatggtttagcttccacttataaatgagaacatgtggtatttggctttctgagtttttttcacttgggataatgatctccagttccattcatcttgctgcagaagataagatttcatatatttatttatgtgtatatgtacacacatatatacatacatacatacatatatgtatacacacatcacattttcttcagtcctgcrttaatggacagcaagattgagtctgygactttgctattgggaatagtgctgtgataaacatataagtacaggtatctttttgatataatgattttttttcctttgggtagatacctagtagtgggattgctggatggaatggtagttctgagaaatcgacgtactgttttccataaagattatactaatttacattcctactaatagtgtataattgttcctttttatctgcatccccccagaggtaattattgtatagtaatatcctgtttgacaaagtatctgggagctttaatgtcacatgtatcactgggatatgtgccagtgtccattatattcaacaccttagtttttacttttaatttccctaagactgaattgccttactgtcactggttggatttctcaaggagtaaataccgagattgagtttattgtgcagatatttgtttgggatttcttttgagaaatccctacctgtagaagggaagggagggagataggatttgtamagttgtcccatcagcctcagttgattccactgggagctctgtagcagaaatggctcttgagaagtgtcctacattggatcaaaatgtctagacctttatacaccwgcctctactagtcagtggacatgggctacccctgaaggacatggccttggactggtaggctttcttcagctgatgcaaaccctgaaggtgtgacagcatcagcagctagagcaacaaatcctgttattacaaaagagtaaataattatgttctgtttagcagaaataacaactgtagtcagtttactgtttcagagttagaacttttaaaaaattgaattaaagtttatacttttttcaatgaagctggatatgttggggaagaattgtgaaaaggatgaataactgggttagctttcattacagctgraagtggcaaaattcaaaataaaacagtataatttaaaatcaaatattttattcaattaacaagtatttatatattctgtttctgagacaagatggaatagactcacttytccctgttctcctgtgaagtatagctgaagattctggacatttatatataaagcaaacattagaagaacccaaaaggtagagagaataaggtagaccagctagggacctcaggaccttacggtataagacccattttggaggtcagtattatgctgatagaaaaacctgacaaggaccatacaaagaaagtttaagataaatagtcctcgaaataccatttgacccagtcatcccattactgggtatatacccaaaggattataaatcatgctgctataaagacacatgcacacgtatgtttattgcggcactattcacaatagcaaagacttggaaccaacccaaatgtccaacaacgatagactggattaagaaaatgtgtgacactctcccaagactaaaccaggaagaagttgaatctctgaatagaccaataacaggagctgaaattgtggcaataatcaatagtttaccaaccaaaaagagtccaggaccagatggattcacagccgaattctaccagaggtacaaggaggaactggtaccattccttctgaaactattccaatcaatagaaaaagagggaatcctccctaactcattttatgaggccagcatcattctgataccaaagccggccagagacacaaccaaaaaagagaattttagaccaatatccttgatgaacattgatgcaaaaatcctcaataaaatactggcaaaacaaatccagcagcacatcaaaaagcttatccaccatgatcaagtgggcttcatccctgggatgcaaggctggttcaatatacgcaaatcaataaatgtaatccagcatgtaaacagagccaaagacaaaaaccacatgattatctcaatagatgcagaaaaagcctttgacaaaattcaacaacccttcatgctaaaaactctcaataaattgggtattgatgggacgtatttcaaaataataagagctatctatgacaaacccacagccaatatcatactgaatgggcaaaagctggaagcattccctttgaaaactggcacaagacagggatgccctctctcaccactcctattcaacatagtgttggaagttctggccagggcaattaggcaggagaagaaaataaagggtattcaattaggaaaagaggaagtcaaattgtccctgtttgcagacgacatgattatatatctagaaaaccccattgtctcagctcaaaatctccttaagctgataagcaacttcagcaaagtctcaggatacaaaatcaatgtacaaaaatcacaagcattcttatacaccaacaacagacaaacagagagccaaatcatgagtgaactcccattcacaattgcttcaargagaataaaatacttaggaatccaacttacaagggaagtgaaggacctcttcaaggagaactacaaaccactgctcaaggaaataaaagagtatacaaacaaatggaagaacattccatgctcatgggtaggaagaatcaatatcgtgaaaatggccatactgcccatggtaatttacagattcaatgccatccccataaagctaccaatgactttcttcacagaattggaaaaaactactttaaagttcatatggaaccgaaaaagagcccgcatcgccgaggcaatcctaagccaaaagaacaaagctggaggcatcacactgcctgacttcaaactatactacaaggctacagtaaccaaaacagcatggtactggtaccaaaacagagatatagatcagtggaacagaacagagccctcagaaataatgccrcatatctacaactatctgatctttgacaaacctgagaaaaacaagcaatggggaaaggattccctatttaataaatggtgctgggaaaactggctagccatatgtagaaagttgaaactggatcccttccttacaccttatacaaaaatcaattcaagatggattaaagacttaaacgttagacctaaaaccataaaaaccctagaagaaaacctaggcattaccattcaggacataggcatgggcaaggacttcatgtccaaaacaccaaaagcaatggcaacaaaagacaaaattgacaaatgggatctaattaaactaaagagcttctgcacagcaaaagaaactaccatcagagtgaacaggcaacctacagaatgggagaaaatttttgcaacctactcaaagggctaatatccagaatctacaatgaactcaaacaaatttacaagaaaaaaacaaccccatcaaaaagtgggtgaaggacatgaacagacacttctcaaaagaagacatttatgcagccaaaaaacacatgaaaaaatgctcgtcatcactggccatcagagaaatgcaaatcaaaaccacaatgagataccatctcacaccagttagaatggcratcattaaaaagtcaggaaacaacaggtgctggagaggatgtggagaaataggaacacttttacactgttggtgggactgtaaactagttcaaccattgtggaagtcagtgtggcgattcctcagggatctagaactagaaataccatttgacccagccatcccattactgggtatatacccaaaggactataaatcatgctgctataaagacacatgcacacgtatgtttattgcggcattattcacaatarcaaagacttggaaccaacccagatgtccaacaatgatagactggattaagaaaatgtggcacatatacaccatggaatactatgcagccataaaaaatgatgagttcatgtcctttgtagggacatagatgaaattggaaatcatcattcttagtaaactatcgcaagaacaaaaaaccaaacaccgcatattcttactcattggtgggamttgaayagtgagatcacagggacacaggaaggggaatatcacattctggggactgtggtggggtggggggaggggggagggatagcattgggagatatacctaatgctagatgacgatttagtgggtgcagcgcaccagcatggcacatgtatacatatgtaactaacctgcacaatgtgcacatgtaccctaaaacttaaagtataataaaaaaaaaagaaaaagaaaaaaaaagatgaaaaaaagatatgccagtaaaaaaagaaaaaaaaaatgtgtgacatatacaccatggaattactatgcagccataaaaagtgaagagttcatgtcctttgtagggacatggatgaaactggaaaccatcattctcagcaaactatcgcaaggacaaaaaaccaaacmccgcatgttctcactcataggtgrgaattgaacaatgagaacacatggacacaggaaggggaacatcacactccggrggactgtkgtggggtggggggaggggggagggatagcattrggagatatacctaatgctaratgacgakttaatgggtgcagcrcaccarcatggcacatgtatacatrtgtaacwaacctgcacawtgtgcacatgtaccctaaaacttaaagtataataataataaaataaaatwataaaaaagataagtwgtccccatgcatatagatgcaaatatycttaacaaaatattagcaaatacaatttagcaatatkttaaaagaattatataccatgcccaagtgtgatttattgttgggatgcaagactgattccatatttgaaaggtactctcctcaaactatttgagaaaacttttatcttttagacagaaattctgcattgaaacttttaaggaagaattcactttaaaatagaaattgtatttctattcttgaataagcagatctttttaaaaacaaaaacatttctaaaaatccttctgaccatgacttatccaactttggaaaacaagacctaccagtgatgcttaataaattacaaatgagcagcaaaattccttattttttatttgtgtattgttgatgctttaaaacaattttttcagaggtttatgtmcaacttatttaccttattctgtttcaagccatatgtcaaatatataattaatgatatacgggttactcaaaggtgctaggaagcctcctctcttttctatacctgggcagaaaggtataataatataataattgtccaataatttcacagatttatcatttacaaactttgctagtttatcaccaataactctacaagttcatcatttacagactttgctagtttatcarcagcctcctaaattaacaaatgaactactgctctcaatctgttctgtaaattttacttctgtcttcacatttgttcagtgagtactgacttcgctcattaacagatgtccttactcatttcatgaggagatgcggtatagtttacagaaacactcactgtcttgagagttaaacctttttataaaaccttttaaaaacattttatttattgaggcagagtcttgctctgttgtccaggctggagtgcagtgttaggatcttggctcactgcarcctctgcctcctgggctcaagggatcctcccaccttagcctgggagtagctgggactacaggcacatgccaccacactcagctaatttttgtattttctttagagatggggtctcactatattgctcaggctagtctcaaactcctaggctcaagtgatctgcctgcctcagcctcccawagtgctgggattacaggtgtgagccactgcactgggctgagagttaaacctttctaaggctcaattttctcatgtataaactgaagataataaggtctcataagtagggtaacagtatatcttagtttatctgtgacagtgctgatttatgcctattgttttattagtttttctattgttgttatccttgtttggctatttttataattgttagtaaagtactacacaaagtaaaaaatgaacaaatgcaagttcccttttctccctcaaatacccctagtccttctgtcttaagtagatcattagtaagggtttcttatttatcctcaacagaaaattttattataatgaaatcatattacaaggctgatttttcatattgctttttcactaaaatatgtattkktttttcacttctatgtatttaatacatttataatatctcattctttgttaatagcttcattatactgaatggctctctgtgtgtgtgtgtgtrtatatatatatatatatatattttttttttttttttgagacagagtctcactctgttgcctaggctggagtgcagtggctagatcttggctcactgcagcctcctccttcagggttcaagtgattctcctgcctcaccctcccaagtagctggctgagtacctcccaagtacctcccaccaccacacccggctaatttttgtatttttagtagagacagagttttgccatgttggccaggctggtcttgaactcctaacctcaggtgatccatctgcctcagccccccacagtgctgggattacaggcgcgagccactgtgcccggcctgaatggctatattttttattaggttgattttttttttaagtttatgggaatttagattgtttccttatttttactattttgaaccatgttgtaaaaatctttatatatrctggataaacttttgtgagtttatcggtagtgtgaattcttacaaagatgaagtgtcaaactgtcaatacatttcattattttaccatttatctatctgcatgtgtttggccaagagaaatttcaaaacaggagagaaactagtgcttcaaaactagtcatgctacccaaaaagtatatgccatgtaaaatttaaaaaaattttactatgaaatgctgttagagatattggtgtgggctaccctgaggcacttcagcttgtgtatactgaagttgaaatgatttcaaggataatttttacatgaagggattatcattttatgcttgacctagaacttatccactccctaaattaaactccttgctagtcaaactctgggattttagttggggaggggagacattaaaactttgatagctattgttccaataaaattatcttctataaaagttggactattatctttgcactcatagtatgtaaacatgtctgttttctcacacacttggcagttgyggatgttaccaaattatttctatatttaaaattacatttaaaactttttactgaaaaataagttaaaaatgatacatctcatgtttgatttggccatgaaatatatattaaaaygaagacttaaaagtgaattgatgccatggtaatacttggaattcttacattttgcaatttaaamtttcactgatttagattttaaaaatgaaaaatgttgttctttccctcaaatattagagaaagattcagttattatttgaaagagtttctctgtgatagtattctatggaagagtgaagtctttattcctactaaatgataagccaaagtagatataatcatcagtggattttgtttctttttaactcatgctttccaagtatctgtgcarttttgatgagcagtataagcttgttagtctgatgagtgcatcttatcaatacgatgaagagaatcctgtgtcaactttccagaattaccatttatgtatgtagtccttactaacttgtgtttcaasataggcattcctgttcctgtttatcccaatagtccattaaggataaaatttaaataatatagactgaatattttttaaaaaggaaaactgtataacagttgaaaacatcactgtggcaagcygaatgtttggatgaacatttggttgagaaagtgagtgaatccgaggaagtgatatgatctacagtagcccttcctacatgtttgttattaatacattcttagatatcaaatattctgtttttaaaggggggagatattgtttagttttttttaaaaaaggtaatgaagtagatgttactaaagcctttaagcatgttgaatccacagagcacctttatgaatatatatatacccagggtatatgtgcatcatgatttggttaatattgatctagaacagggcttctcaacagggacttcattgacaactggggccagataatgctttgttggaggggttgtcgtgtgcattgtagaatatttagcagtatccctggcctctacccactaaatgccrgtagaacccatcctttcccaattgtgacaagcaactgagagcagtgtgatatgttgaagcaaaaacgtagcctgtgctttatatctagactcaggattcaaggcattgataggaatcatttaatagctagatatttatggataaaatcatatgmtgtctggggtttgcttaaaaatatgtatatgctcctgtgtgtgtggtgctaggggatggtagtaagtaggtgagggtctaaatgaaataagattgaccaagaaaataattgttgaagttgagttcattagtaggagggggtttttatactagtttctctacccttgtatacrtttgaaattttgtatcataaagagtttatattgtwtattttcttattttaattaatgtttttgaagagacagtcttgctctgtggcccaggttagagtgcgatggtgtgatcakagctcacttcagcctcaaactcctaggctcatgtgatctttctgcctcagccttccaagtagctaggactacagaggtgcatgccaccagcctggctgattttttttttttttttttttgcctgtagagacagggtcttgctatgtcaggcaggctggtttcaaacttcaggcctcaagcgatcctctcacctcacttcccaaagcrtgggactgcagatatgagccactactcctggcctattatttttatttttaaaaaataatttttttagttaaacagwttagcatagattagaactcaaagtttaatatgttctgttgactaaagtctttggagctttttttagttttgagttattagtcaaattaaataacgaatgtttattaaattctaactagaatgtttrtaaaatttcrgattgctattatagtgagatgaagccaggagaaagtagtcttctaggctctgacagtctttacaaactctctaawatgttagcagtaaaccataacctmaggttggttaaatcataaaacaggacttggtagtaagtatgtaaagtgctttctgttttccccttaaaaagaaccagagcggccgggtgtggtggctcacgcctgtaatcccagctctttggraggccraggtgggcrgatcacgaggtcaggagatcgagaccatcctggctaacrcagtgaaaccccatctctactaaaaatacaaaaaattagctgggcctggtggcactcacctgtagtcccagctackcaggaggctaaggcaggagaattgctcacacccggaggcagaggttgcagtgagctgagatcacgccactgcactccagcctgggcgacagagcgagaaaaaagaaccaaagcatagtgttgtatagattttagtaatttaattgttttgtggatcatggctgttgaattttccttgtgggaaataataatcactyattatatatagcatactgtgtgataatgtttttagtgtatctggaatatggtgtagccattaagaaaaaattaggtagatttctgtgtactgatacggaaggatgttcaaattcattgttacttgaaaaaaaaaaaaacttacagagcactataatctcatttgtataaagaccaaaaaatataggggaggtgggataccatgtgaatatataatctgtgtgtgtgtgtgtrtgtgtgcacgtgcacatgcatgcttatatagacacagattttctgagaggattttgaccaaagagttaataatggtaacctctgcacacaacaattgggcaatgaaactatgggaacatgactcagggagacttttactttcttagagttatctttgaagtttctgtcatagtgttatttttgtttctttttagttaatgtattacaaaattatgatacataaaattgatttttaggctgggtgtggtagctcatgcctgtagtcctagcactttgagggggctggaagattgcttgagcccagtagtatgagaccaacctgagcaagatagtgagacctcgtctctagaaagagataaaaaaaattagctgggcatagtggtgtgcacctgtagtcccagctactcgagaggctaaggtgggaggatcacttgagcccaggagcctgggctgcagtgagctgtgattgtaccactgtactccagcttgggcaatagagtgagatcctgtctcaaaaaaaaargttaaacaattatttttttatttttgttcatatatttctaaggttcttcgggatatacttttatagtagtggaagtgtattctcagaataaactacaactttaaaaaatcaatttgaaaaaacaatccattagagaaaatggacaagggaagtgaacaattaaaagacaaagttcaggtgtccagtaagtgtatataaagctatttatctgcacctgtaattaggaatatgttaattaaaggaataatgatattatttcacacccgtcatgttggcaaccacttaaaagtctaataatgtcacatatagttgaggatgtggggaaaagcagagctttcatattctgggtggagatagtaattggtatagcactcaggaaagacaattggctaaatggtggagttgaaatttkcatttagcatttctacttctaagtgtatacagtggagaaactcttgcacatttgtacaaatatgtttattccaacattgtataataataatacaaaactggaaataacctgtgtttccacsgttgggggttgcataaataaattatagtgcattcaaacaatggtaygccatagcagttaaaagaagaacagtcattcttgagaaaaaaaaaaaatcaaattgcaaaaggataaaatkataccattcacatagattttttttgtttttgttttctttctttctttcgttttttttttkttgttgttkttttttttaaggcaaggtctcactctgtcacccaggttggagtgcagtggtgcratcttggcccactgcaacctgtgcctcctgggttcaagcaattctcccgtcttagcctcctgagtggctgggattacaggtgtatgccaccacaccctgttaatttttgtatttttgttagagacaggktttcaccatgttgcccaggctggtcttgaactcctgtgytcaagcaatctgcccacctcggcatcacagagtactgggattataggcgtgagccactgcgccyggcccatgaaaattttcaaaacacaamtctgttgtttgtagacatatacatgtgtgatcaagtcatataattggactrtccactgacttcagattattacagcaggggagaaagggaagagaatsggttcacagtttggagtaggaaggatacaatttacatcttatttctttaaaaagatcagaagtaaatatggcaaaatgtagacatttatattatctggatggtgggttggtccatggttcttaaattattctgtgcatttttctcattgttttgaactataaaagtattatttaatataaaatatatttttaaaaggtactattccagtagcccagtttctgagggtggtttgaaacttgtgttattgaaatgtcttataatatcaggtgtattccttttccmgaacagaaataatataataaacatagtaattctttgtatatttcctagttttacataaagtatgctctaaaaattttctttttgygtttcagacagcatgttttcgtgaagaaagggatgtattagtgaatggagacaataaatggattacaaccttgcactatgctttccaggatgacaataacttagtaagaatcatttttgtatttctatatactgtttttttgttggaagaattagcattatttttatttaagcattgtttaaatgtaggtttcatatagaaaattaagtgcatttcayacagggtaagttgttcacttgatatgtggtgtttttttttctccctggaaatttgataccttttcattggaattctttatgctttttaataagcaagtcaaaactaaatccaaacatttaatttccattggttaagttctatagacggtcttcaggagttyttcatgatacytttaacaccagtaccattcctcttcccttgttcctgttgaagtccagctagtactttaaaattgtgctcaaattcatcttaaaataatcatttccagaattttccactgaaattaatctttctcatctcattctaactttacatttttaaattatttttattacataactaacacatgtwtctctgattttttttgatacaactttaagaaacatttaaataggccggatgcggtggctcacgcctgtaatcccagcactttgggaggccaaggcgggaggatcatgaggttaggagattgagaccatcctagctaacacggtgaaaccccgtctctactaaaaatacaaaaaaattagccgggcrtggtggtgggcacctgtagtcccagctactcgggaggctgaggcaggagaatrgcctgaacctgggaggcagagcttgcagtgataatgccactgcactccagcctgggtgacagagcaagactcggtctcaaaaaaaaaaamacacatttaaatatgttacatggactgtaccatctttacctaaaataaaattaaaggtttttccaaccccactggaamcaaggaaaaaaaataaaggtttatgcaactctataatgctcatggggttyatctgatttcaggccagatctaggtgttcaaacagtgtcattactagtcttttatatcccttacatgcttatagagtataataatgtttttttaaactacagattgtgacccattagtgggtaataaaatcaagttagttacaagcaacattttytttctttctttctttctttcttttywtttttttttttttgtttgctggatcttgctctgttgcccaattagagcwaactgctgtatctgattcctgggctcaagcagccctcccacctcagcctcttgagtaactgggactacaggtgtgtgccactgtgccccactaacttaatttttttgttgttgttgttaagatggggtctcagtttgttgctcaggctcgtcttgaactcttggcttcaagtgatcctctcagcttgaccccctaaggtgtgtggattacaggcatgagccaccatgcccagccataaggaacatttttaaagattaaatagaatagaaaatgacagagttcatgacaagtaagtagtaagagtgaatatggtctcatgacacatttcttttataatatactgaattatcatataagccatatatattattgtgggttatagtgagaattgtgtaaaaaccatagcatagagttttttgtatgtgctagatgcatagttgttaaattgaatagaatgatgttttaactggatttattatacttaatatacaaaattttagggatgaatgtatcatgcaaagataatctgcatgggtttgttaayaacatttgtaagarcaaattaaaacacatcccacatctttgcctagaaaaattatagcaatgtatcatgataattttcaaaatgttttcaaataatgaataaaatccactatgacrgtgtattctgtaatagataaatttaacactgcagatttgtgcattgcttaaaartctacattttggtataaatatagaaataattatataattttgtaggtatattaatagaaataaagtacccaaataccaaattttatatagcaaaaaaagcctgaactgtgatttatctctctcctcttgtttagttttatttgcattcttcgtatttgacattaggattaacatttctttttcaaagacatttttcagggaaaaatagtctgtatatacccctcaataattactaaaatagaattaaagacgtaactggaggaggaatgaaacactctagtagtcaaatctcctgtaacttgccagtgtttctttaggggagccttcatcatatattcattcatctcaagagtcagaggtcttggttatcatcaaaggttgccttttgaacatttatacaatattagmaaaaatcattaaaaaatrtcgacaaagctaattttagataccaaaaaaggaaattttattatatataattgtttttcaaagtaacttttaaccctgatagcttttaaattgccaagtaaagaacataatttataatgctatayggttctagaaagctgtggcaaataactttcatttctaacctacttactacaatagtttatgaaaaaatttgcaattatagcaagtagactttttgtgtgtttcagaaaaaggcacataatttaatgaatggtagatattattatgtgattagatctttttttctttaagaaaagctcattaaatacaaagctgcttagttatatcaacattgacacataaaatttttatcacttacataacactagaatataatgaaccagtgaaatttgttcgttctgtactttcttattaattgtttcctgattagttactttatggttgaggaaaaaaaggaaaatatcttgcactgacatatgtaacttgtttaaaaggtgaaagwtacttgaattttaaattaattgtagtaactcatatgaactctaaattctttataggaatccaatttgtgaagacagaaattattagaaaagtaatttttttaagaaaagtattgtttagggccgggcacggtggctcatgcctgtaatcccagcactttgggaggccaaggcrggcggatcatgaggtcaggagatcgagaccatcctggctaacacggtgaaacccggtctctactaaaaatacaaaaaaytagccgggtgtggtggtgggcgcctgtagtcccaggtactggggaggctgaggcaggaggatggcctgaaccctggaggcggagcttgcagtgagctgaggtcacgccactgcactccagcctgggcaacagagggagactctgtctcaaaaaaaaaaaaaaaaaaaaaaaagtattgtttaatagtaaaaagaaagcaaggaggattaactataaggtgaggctctaaagattgactgttaatctctttgttatggcagcatgagaattaaaagagtttcctgatattcctacgaagacttctagaattatatctgttcctygaaatgctcattttgggacacataactcatttattgcatgttttcagatgttttagcattgtttcmttggactggagctctttwaaaaaaaaaatccccaaagctgccatggtctttttagtaatttaaccagtgattcctcaaatcaatgattgttgctttggctttcatttccctagtgactattgaggttcagcatgtattaattggctgattgtgttccckcttatgtgaattatctgttaatattcttagcctagttttgttggattgtttgtccctctcttaacaatyggaaggggctctttattttaggattatatccttgacctattatgaatattacctctcagtctatgttttttaaaaacttgtataaatataccttagctacattgggtaatattttaaaagtagtttgtgattaggagtaccaaatattcaattttactataaaattaaccaatcagaacaatatgatattataataatataggaataggtaaccatagcagaatagattaggaacagatataagtatatttgggatcttaaaatatgacgaagggacatttcatttgaattgaggagaaagaatggattatttaactgttactttagacttttagtcttatagactctgtctataagaaaatagtcttcacactttaatcaaaagtaaattgtcaggatagggtcagttcaacgttagggtaccccgacgtggtggctcacgcctgtaatcccagcactttgggacgyccaggtcaggrgatcaagaccatcctgggcaacgtggtgaaaccccgtctctactaaaaatacaaaaattagctgggtgtggtggtgcgtgcctgtaatcccagctacttgggargctgaggcatgagaatcacttgaacccaggaggcaggggttgcagtgaaccaagattgcgccactgcactccagcctggcgacagagcaagactctgtctcaaaacaaacaaacaaacaaaaacgttgggcctagtaaatacagcaagtaggccaaagacacaggattttaaatatattctgcttccctaattttcaaggctttaaatatgcgaaattagtttctttggtttaacacacatttcctatgtttgtaattttaacatatagtaataaaaggaatttgaattttttcaagactctttaaatcttaatgtcaactcagtaatatccctgaaaacaatatcttcattctgtaataaaaccttaatttcaaggcattyatgtgtcttgtactcactagscttcatgctaagtgctacattatcattattgtagttaggtagatgagaaaatgaaatgtcacagagattaatttttcaacrtccacttacaacatggagtcagtatttgaatacaggtttctctgactacaaaacccatttttccactatgtctagttttctccctcacttaaaaataatatataatgtacacacaaatacacatgtatatgtaatacatgcttataaagcaatgtagaacataaagttataacatcagctgtaatctaacaacctacagaatctcagtgaacagtttgatgtactcttctcatcgtttctttacaccacatacatacccataaggatccatatctaaaattagttggcttctgtttattatatacacctgagaaaagcccattctgatatttttacagtattagaaatgggaagagacacatatggtgataattactatattctacgtagtagtggtttctaaatgctgatctatargctgatgctggttctaataaagttcttactgatccaaggtgaaataaggaaaacataatgataatatgaatttctttcaatgtagggactatcctgtattccaagttttttctttcattgtttttttgggggagggggtggattcaaatgttcattcttctraaatcttggaaagctgtgttccattgttgtaggtgaagatgataataatgatgatattagctctttgcaaaatacaacaatggtaaccctgtgttgttctctgccycagtctttaaaaattttgttttactgctgtatgaaatttagaagttttgtaatgactgctgatcatcatcttacacagtttcttgttaattagcagcatatgtaattaactgcataaatatttgacccagtcctgttgaccttgggatacagtatattgatttttcacccttattagtttactgagtacattttatttttttcattcacagtacctggttatggattattatgttggtggggatttgcttactctactcagcaaatttgaagatagattgcctgaagatatggctagattttacttggctgagatggtgatagcaattgactcagttcatcagctacattatgtacacaggtaaaacagtccttcattgtacytggctgtgagttaccatgtaayatctagcaacagaggcctatttcttgccagatttattaattatggtcttggatacatttatcgtcaacmaaaaaaaattattttgagatgattttggttgttttgctttgttgttrttattatttgtcagcattacagaaccgatgtgcctgcttatacatacatgtacatgtatagtatctaaaagttgtcactcctagaataatagacattggagactaggaaaggtgggaggaggtgagggatgagaaattacctatgggtacagggtacactattcaagtgatgggtacactatattgcataactcacaaccacacaatatgtccatgtaacaaagctgcacttgtaccccctaaatctatgaaaaaaaaagttctcggccggtcacggttgctcacgcttgtaatcccagcactttgggaggtcaaggcgggcagattacgaggtcaggagatcgagaccacggtgaaactccgtctctactaaaaatacaaaaaaaattagccgggcgtggtggcgggcacctgtagtcccagctactcggagaggctgaggcaggakaatggcgtgaacsygggaggyggagcttgcagtgagccgagatcccgccactgcactccagcctgggtgacagagcgagactctgtctmcaaaaaaaaaaaaaaaaaaaaaagttctcacttmcagtcagcatttctagaaatcacttcttaaaaaaccactcttgtttaaatgtacatatgaattccatctcaaaaggagtatgcattggtcagtttccttatagttgagtcttacatatttaaattagctggaattctagaccataagtcataggttcatttgctaaataagtcctgtattatatattttatgtttctcaagaaaatactttcaaggattgtatgtgycaaaagagatttttttttgtatgaaagtgataattttratgttcatggagtaattrtaaactattaatactttatatttaaaaattttaaaaataccagcatgaatttggaaggacacacaaaaaataagaaataaattaaggatatattggatgatttaaaaggtaccctcacattttaagaggaaagtaggaaacagcagaacgttgttggtgaattaatcattcaaatgagagtatctttggatggtgcaaaatgtgagaaagagaaagatgctgaggagaagtacgtaaagggatactgccaagttagaaataaactaaaccattttctaagagtgattttcaaactttggcatgcatctgaatcctatggaggaagggtggttgaaacccagattgttgagtcagctgcagaagtgctgattcagtgggttgggtcgggctggggaattgccatctctaacaagttgccaggtggtgatgctgctgctggtgtagtgaccacactctsagaactatgctctaagacagcagtgactgtttcttttaagttttgggtggtgagagtgatctctgagaagaacatgaatgtggcaaggagtagaatgtttctgtttcagtgtttgctttttaagatgtgggtgtcttaattgctgtttcatttaattagtattgaagttctaagacattattaaaggaagactactttaattaaacaatttgtattttatcagatctctgtttggcttttgcctattcgtgtgcttttctctgtgggtatctgattgtcacagtttttattgaaaataaagatatggaaatgctttgaaaattgtacaatgcagtttttttttttttaatttaaatttttgtagagatgggggtctcactgtgttgctcaggctggtcttgaactcctggactcaagtgatcctgccacctcagcctcccaaagtgttgggattacaggcatagctaccacttcttgccacagtgcagccttaaagatggtattgtggtctcaagagtcagttatagaatgagaaacgaaagtgctattttgtggcttaaacagtaatccaaaatcctagctgaggactatcatttaaaaatacttacagaaaatactattttcgttgaatatttgaagaatgttactaaacatagagtcttaggcttgtggaattgagagatttcacccagtttatatgtaattcttgagaaggaataactgcttctgaaaattrtatgcctagattggtgaaagtaaatatgaggtatttgtagtatctttcattctgccaggcttgttagagatactgttatgtggactgaaaaccatttcaaccttgagctctgcttaagtacatctaattttacaaggtacttttaaatgaatcgtatttattccattgttgggcagctctaatattataaaattttattttatattaagctgaatttcttctcttctcttttttttgagacagagttttgctcttgttgcccaagctggagtgccgtggtgcgatcttggctcactgcarcctccgcctcctgggttcaagcgattcttctgcctcagcctcctgrgtagctgggattacagkcatgcgccatgaagcctggctaattttttgtgcttttagtagaggtgggttttctccatgttggtcgggttggtctcraactccctacctcaggtgatcttcccgcctcagcctctgaaagtgctgggattacaggcatgagccaccgtgcccggccttgaatttctttttattttagtcattggttctagttttgcttttagagtcacatataatttatttctcttctagttatcatgctttctgaagtcttctttaggttraacatctraacatctctagtttctctgttataacaatttgtatacacttcctaccttccttgtcttaaccccccaccacacactctgcccattcctacacctcttctccctccctccttttctctacttttacctttctgtggatgctccattgtgttaatgtgctccttaaaatgttattctcattttctggatagactattttcagcaaatgctttactgaggaaatattttttgagtcctcttttataagtaacattgtgctaaactatgtggaattgtaagtaagtgggtatagcatatagttgtggcttttgaaaaggwttcagttrtttggaggcacaaaacctaagatagaaataaaacttaaaataccacaagttaaatcatttaaggccaaagtataagagatgatggagtgagtccagactgtggattgctaaatgagttatacaagcaaattacagtgagctcaagaaatgagtaataagtttatttctaatgatcagttctaatccttatttaactctttgtrctattcactgtattctaacacaaattctgtgattyagatgtcatctaaaatcgacgttgccccattttatagatgaggaaacccagcttcagagacattagttagtaagtagcatagcctagattraaatctaagtcaggcttgtctccagatttatgttctttgcacaacatcatgttttccatagaagactttaatggmggggctttgaaggatgagaagactctgtaggcagataggaagacattcaagataggtgaatggtaggagaaaagcacataagaaggtaaatagtagttttggaaaatacttaatagactagtttggctagagaaaagagttcatgttgagtttagtaggagattaatttgtaaagagattttggttcttatcatggaactcttgaatgtcacagacttwgtatcttggtagctaataaactacaatgaatttcaggcaatgaaatttgaaggtaaacttcatgtcttagagttttatgaaatttatcaaatttccaaatgtgttataattcatgaacttaaaatatagggatgtggagaatacaasaagggactagtgagactgttgtgtttaaggaaggagatactctcctttttcttgtgttctttttaaggaaatatatttctagacttgtaaaagtatgttgtttgtcttctatcagcacaaaaactcgcatatgaaaaaatttgcacaaaggtttaacaagagcaatggaaaatagcaaatggtacgaataattaaagtaaaatattttctaataacattgagtagccaaaaagcactggactaggaatcagaagatttaattccatcacctatcagattccccatgtgttaaaggaggataataaataatgtttactctgcttgttttgccagactattgggaaggtgagatgaaatgtgtatatgaaagtgttttgacagtatagacaatatgccattgcaattagggaaacatctttttgcattataaatttgaggcattaaaattattataaataagatagtttcatcctttggttctataattctaaatacatttttctgtctaggtctattgagaatatttcttactcttacttagttttcatttctgattttcccttcctttctttgggcagtatttttcataagcttttgtgtgtgctaaattttatttaagaaatgcaggggtataagcatatatttctaaatttgcttgcatttcctaaggaaagttttacaactgggatacaccggcagttgtaaaaatggttgcctaaagagagtagggtggagagaaagtgggatggacagggataggaatgaaagctcaatttctaagtgaatacccttttcatatatactttttaaatcagtaaacttccttatttagagcagttttaggatcttagaaaaattgagtggaaagtatagagttccccttatatctactcccgcccaccacacacacacacgcacagcctcccccactatcaacatgccttaccagagtgtggcacatttgttaacatcaatgacccttcattatcacctaagtccatagtttacatgtttacattcgtgttctctgttggtgttgtacgttctgtaggctttgacaaatgcagaacaacgtgtatccgccataatagtattatgcggaataatttcactgccctaaaaatgctctgtgttccacctctttattcctcccttcccgctaacccctggacatgactgatctttttactgtctcataggtttgccttttccagaatatcatatagttggaatcgtacagtttrtagacttttcagattggcttctctcgcttagcaatatttaaggtttgatagctcatttctttttagtgagtaacattctattgtcggcatgtaccatagttttccatttacctacttaaggacatcttggttgcttctaagttttgggaattgtgaatgaagctgcattttatatgattgctttttttttttccctctctctctttttagcatttcaattatacttctattttttaacttttcttaatggttaccctagagtttgcaatataaatttacaactaatctcagcccactttgaaatgacatggtactgcttcataggtagtgaagtaccttgtaataacagaataatcctaattccttgttcttgtcccttgtatcattgctgtcatttatttcatgcataagtaataattcatatttgagtacattgttggcattcttttgatcaaactgttatcttttagactaattaaaaataaaaggtaaaagtttttattttaccttcacttattcattctctgatgctgttcctctctttacatagttctgtttctgatttgtatcatttttcttctttttgaagaacttttcaatttttcctgaaatatagttttcctggcaacaaatcccctcagtttttgtttgtctgagaatgtatttctctttcacttttgaaggataattctgcagtatatgaartcataggttggtgaggctttttttttcttttaaatatttcacttcactctcttcttacttgcatgatttttaaggaatcagatataattcttatctttgttcctctatgcataaggtgtttttttcctctggcttctttcagggtttttttctttatttttttatattctgtagtttgaaaatggtgtgcctaggtatagttttttttttkkggggggggcgggtgggggggtgccatttatccttcttgatattttttgaatttcctggctctgtggtttgatgtaggaaaattttggggaattatcagacattattgcttcattccatttccttctggtattcccattacatgtaacttataccttttgtagtaatcccacagttcttggatattctgttctgttttttttttttccagtcttctctttgcttttttcattttgaagtttctattatattctcaagctcaragattcttttctaagtggtgtctagtctactaatgagctcatcaaaaatattatttatttctgttagtgtttttgatctctagcatttctgattctttcttagactttccatcttatttatctgttcttgagtgttgcctactttaaccataaaatctttaacatattaataatagttttwaaaattcctggtctgataattgcaacattgttgccatatctgactctcattctgatgtctgtccagtctctgtcccrtttttagtatgccttgtaattttttgttgaaagacagatatgatgttgttaaccttaaataacaagattagaaaataagtatagactttgagcccaaagcttgaggatggcyaccaragagcatagattctatttgccttgaatatacattctgattagcagtgttacaagtgggtttttaaggaaaaaagaaaaggcagttcctaagttgttaccaagaatttacattaaaatatcagaagctcttggttagctatacattcgttctttgtatcacaaactccaggaacgagaagacgatgggtgagacaggtagccagtaaaatgccttcaaacaattgcccctgggtttgaggggccagtgactgaagtcccataytcatgtctctctgggcctactaaattttgcatgcctcacatagctcagactgctttgagctctttttcttttctcaatgtattgggcaaaaggaattgcagtaagtgggccttgagtgatgtagtggcaaggggcrtgtgtgtgcatgtatgtgttggtaaggggccattctgtggtcctatgattaggtyccaatctttagtgaggctttgagactgcacagtgaacaccagggcttctcagcttctcagtacccctgccacctctgtacctcccttcctgccttcctgcttagttgggacaggatggctagaaggtgccagacttgggtattgcccctccttctggtaggttagtctctgataataccccagcaggttaggctctgaaaaattccaaacagattaggctctgttaaaatagtttctcctgagggcaggccttcttaagaagagaatactctggcatatttcagaatgcagcagatattctcttttctcctccctctgttggaagcatgagggtatgtttctctggtattcactatgaggacctggttgagctcttagtggtaaaactcaaaaataaatgtgcggcctccctatgactgggctgcctttggagtttttaatctttcaggcttgtccacactgaacctccagcaattcttcagtcacagtttaggttttcctaaccaggcactggttctctgcaaggtttctgctgtgggtttttaaactgccaagttgtgattctccatagccacctgtctgtccaatttggggacaacagtttgccctgtgaccttacttctcttacatatctaagaagagttgttgatttttcagtttgttcaggtttttactttttgttaggatgctgtggtgacttctggactccttacatactggaagtggaagtctccccataatcttttaaaacttagatttcaaaacaacatgttttatcattgtgatacggctcygatgagtggaggaacaccagattcttcctcttaagttgaattagaaaaaaaacgacayggacacacgtggagtagttttaaggagcagggagtttaataggcaagagagaagggggaggaaagaaagaaaaagctcscctctacagagacagagggaggggggctccaaagccaagagacagaaccccactttcaggtagtatcaaccagctatactggaaggctggaggaggcagtgtctgatttgcatagagctcagggcattggtttgaccaggcatgtcattcacgtagccggcgaaaaaactggccctcccaccctctctttttaatatgcaaatgcggggcaccatgatgttccaaacacgtggggatatgtaggggcagccatactgccaggcacatgtgggggcaagggcaagaggacaacggtgggaatcgccatgttaggtggacccagtttctaatggctaacatttgcatatcaaaggttgccagcccgggtctaagacccaaggctttcattctagataagagctgcgaaaaatcttccaaggacccctttttttcctatgtgcctaaaataatttcttaataactcctacctcaattgagggtacagcaaccaagaactttgtttttttaaaaaaaaaaatttcttgtaaagatgaaaagatttccaaagatgctaattaaagtgttaaatgactagctggaaaaataacagcttgttattttattgagaaacctaagaacggtatgatgttataaagataaacactcaaaggggctattactattattttctactgagaattaccccagtagccttctcccttttgaaggaggcagggaaatgatgcagtggtattgaggagtgaagaaaaatggtattagtagagcagctaataatactggtgcatattgtttggaggaagtagaaataatgagtggctagtagatttgaaatgctttaagcattaaagatgtcagttcttcccaaattgatctacagacttagtctttattctttatttytttttcatgttctttcatgaggtggcaaatctataggtttattgcagtctctcaaaatcctagcaagattcctttagatagagacaagcttattttaaattttatatggaaaggcaatagaactggagtagttaaacagattttgaaaaaggagaataaagtggaaagaatcactctaccagatattaagccatgctatattgccaccttaagcaggaccatgagataattgcgatgtaataaacacacagatcattggacgacattagcaagcccagatgtaggctaacagaggtattttcaactgattttgagaaaggtgcaaaagcaaaaataatcttgaacaaatggtgctcaaataagagaccaaaaaaaaaaccccaaataacttccccaaagctctcataaatacaaaaattaattcaaaatgggtcatggatttaaatgtacaacataaaactataaaactgttggaagaaaatattggagaacattttctggatctagggcttggtaaggagtttttagatatgacaaaaaaaatcaataaaaatgaataaatggkacttcattaaaattaaaattatgtgctcaatgaaagaccctggtaagactataaaaagacaagctacaaagtgggagaaaatagttgtcaacataccttacaaaggttttatatctagactatataaagaactctcaaaatacaattaaaaagcccaagcaatctaattacaaaatagggaaaagacaatagacatttcacccaagaggagatagagatggcaagtaagcacatgaaaagatgttcaatatactgatattgaattttaygaaaatgccagttaaaaccataatgagataytattacccacctgtttgaacagttaaaataaaaagtagctaatactaaatgctagcaaggatatggagaaagtggatctcttacatgttgctggtagaaatagaaaatggcacagctactttggaagacagttggacattttttaaaagaagttaagcatgtaacatgatctgacctgtcagttacattcttgagcatttatcccagacaagtcaagatttatattcacagaaaaatctgtacttgtgtgttcatagaggctttatttgtaatagcagaataccggaaacaacacaggtatccttcagtgggtgaatagttaacaaaactggtatatccatgcagtggartactactgaacaataaaaaggaatgaacttctgatatatacaataacccggaggggcctcaagggtgttatgctttgtgagaagaattaaatctcaaaatgttacatactgtatgtttccatttatataacatwcttgaatgacaaaattacagagatagagaacagatgaataatttccaggggacagggcctggggaaaatgaatgggggagtaagtagaaatacaaagaggcagtcagtgtgagggagttcttttgtgataatggaacagttatatattgtgattgtggtggtagttacatgaatctatacacaagataaaattgcacagaactatacatgtacacacatgtacatttttaaaatggcatgtactaggcttctccagagagacagaaccagtaggatatatgtatatataaaagggagtsagttagggagaattaactgacacgattacaaggtgaagtcctatgataggatatctgcaagctggggaargagagaagccagtaatggctcagtccgagtttgaaagccggaaaaccagggaagccgacatggcagccttcagtctgtggctgaagtcctgagattccccgggaagctgctggtgcaagtccaaaggctggtgaacctggagtctgatgtcccagggcagggaaagcggaagcargcttcatgcactgraagaagaaagagccagaagactcagcaagcagaattatcccaccttctaacacctgcttgcccacattgagggtgggtcttcctctttcagtccgttgactcaaatgtcagtttcctctggtaacactgtcacaaacacacccagatacaatactttaccagccaattaggcatccttcaatccagtcacactgacacctaatattaattatcagagggtgaaaactgaaataaggtctagtctaacactaatgtaccattgtcaatttttttgttttatattgtgctacagttatcatatgttaccattgggggaagctggtggaagagtacaagggattcattgaactatttttcaatttcctgtgagcctattatttcaaaataaaaatttttaggaaaaggaagggcctctatgacttgcttttctaaagactggaaaccaagcccaagaaattctgtaccttatatttcacctgcagtgcatataaatttggtgagttcctcaagattgccaaatttggttaggctctttggcctacaaggaagtgatttttcttaccagctataaggctgggatctgtaattcaaacttttgggtgttattaacatgtagatgctatgcaaatcatgggataagatgaattcactttgcgaaacagagtaggtaataaagagagtgcaggaccgatgagccatgaggactccaggtgttagagactggatagattargagtagccaataaagaaaactaagaaggagcagtcagaggttaggaggaaaatcatgatagctgagagcatacctacaatgtcttacggaaaataaaagtaatcattttccccttatatttaattacattaatgtcttaatggatrcatttcaggcaaacatttattatgtttttcctgtggatgctagtgtcctgggtgttggaggttgaagtagggaaggctgtagggtattgcctgcttttatgtaagtaatatactttttaccttcaatttactgtctttggggaaatgataaaagcttaagaaaatacttctacttcatagttgtgcccaagttggacagatgttcatctcaattttaattttgtaaattcattcatttatcatgaacgtattaggctgtacagtttttcctgatattctagctattttcttgggtaagaggtgccatagaactggaggaaatactctttagaggagctacttgaagattaactgttataatagagagtaagcgacaaccaaaacaggtttaaaacaaaaagctgcaaaaactatttttacgtctccatataaaataaaagaaaatagtagatgaacaagtgaatcaggaagatctcttggaaaaagccatgtttatcataggaagaagatacttcaaaaaattgaaatagcttaaagaaggaggaccaaagtaaataatatgtacaaaaaatgaccattgaggttctgaaataatattttatcattattttaatgttaaagatgtcacttgaatacatagaaaaatgcaatatgaagatcttaatattatgaaaatatgtccatctttatgctttttaacaaaatggtgggkttttttccctgtgttaattgaaatactattttggcagtcatatctttttttcaattatctgtaaactyagatttgtgcatctatgcactatgcatctgtaaagtgaatagatgcactttaatttcagctgaaagtttgaatcctagcattactgtttttgatttgctgcataggcagtttgcattttaagggtgtaccctttcttttcaattatttttttgttcaaatacaaaatttgggagtagaggttatttctaatgacttaacagcatcatgtggtatgtctgattaaggttgattaaagttkatgccaaataggttgtggtaatgtaaggcctaatttcaggttgaaaaaaaaaaggccccaagttatttctaaccatgtttaaactcagcactagacttgctatttagattgtgaactataacttcaaaaatgctaatgatttaagacacagaatcctactagaacaagaaagaaaaactaagtttcatctgattagaatgttatgttcgattatcatgcgcttcagtyttagatgacaaaaatgggaagatgaggaacttttgtggtgtttttcagcactacgtagataatttacatagatagtcagaatgttgattctggcttctggcaccaaaatgttaccaactgatattgtgtgtccttcagtgacttagatcttaccttgattctgtttgtggtatagtttcctacaatatcaccatttaaacaatgkkgcacactttgccttcaaactggaaggaccctattagaagccattttgattgagaagggtcattgctggttggcgtattggtctgttaaagagaatctttattgttgtaaaatatataatgctttaagcttgtgtattagagaggataacagtttcttttcttagatcacctgtcatttcataaaatgaaattttatattaatttttttttgaaaagttcttagtggaaatagtagaatatttaacagctttttggaaaaaattgagaattccttctttattttaaacccttcaaaggcagattgattgattgattgattgatttatgacggaatctcactctgtcacccaggctggagtgcagtggcatgatcttggttcactgcaacatctgcctcctgcgttcaagcgagtctcgtgcctcagcctcctgagtagcttggattacaggtttgtgccaccatgcccggctaagttttgtatttttagtagagacaggtttcaccatgttggccaggctggtcttgaactcctaaccccagtgatccgccctccatggcctcccaaagtactgggattacaggcgtgaacctccgcatcctgtccaaaggcagttttaaaaaatgatctaaaaatggtgaacttttctttattagctttaatcataataacactagatattatccttgatagttaatattaatagtagtcatttatatattactacttcttaagactttttttttttcaaacttttttgccctttggaggaaagatstctacctttttgtataacttgccagtggtattcagtggatcctcattaaaaattattgtgagattaaattgtaaatagtcttttaaaatagctttttttttttttttttttttttttgaratggaggctcgctctgttgcccaggctggagtgcagtggcacaatctcggctcactgcaagctccacctcccgggttgacgccattctcctgcctcagcctcctgagtagctgggactacaggtgcccaccaccacgcccggctaattttttgtatttttagtagagacggagtttcaccatgttagccaggatggtctcaatctcctgaccttgtgatccgcccgcctcggcctcccaaagtgctgggattacaggcgtgagccaccatgcccggccttaaaatagctttttgagataaattcatataccatacagtccactcattaatgtgtacagtggtttttggtatattcacagatatttgcaaccattactatgatctattttagaatattttcatcatttcagaaagacactctwctctataccttaagtctctacaccctgtttccctatttccccagccttaagcaaccattagtctaccttctatctctgtagatttgcctattccagacattgcctataaatgaaatcatataacacgcggttttctgagtggcttttttcacttagcataatgttttcaagattcagtcatgttgtaggatatgtcaggacatatgatctcaaccaggtagactgcctggtaagactaagacaccaacattttccagagttttgagaaagaaccaaaagtgtacatgctcatagcatacacagtgcagtccaaaattactcagtctatcaggaaattatgatttagtctcaagagaaaaaacaactaatggcaactgtatttagtccattttcatgctgctaacaaagacatatctggccaggcctggtggctcatgtctgtaatctcagcattttgggaggccaaggtgggcggatcacctgaggttrggagttcaagaccagcctgaccaacatggagaaaccccgtctctactaaaaatacaacattagctgggcgtggtggcacatgcctgtagtcgtagctacccaggaggctgagtcaggagaatcacttgaatccgggaggtagaggttgtggtgagccgagatcatgccattgcactccagsctgggcaacaagagtgaaactgcatctcaaaaaacaacaacaaaaaagacaagacataccccaagactgggcaatttataaaagaaagaggtttaattggacttacagttccacgtggctggagaagcctcacaatcatggtggaagtctaggagtagcaagtcccatcttacatggatggcagcaggcaaagagagaatgagaaaccctgataaaagtggaaatccccgataaaaccatcagatctcatgagatgtattcactatcatgaaaacagtatggggaaaactgcccccatgattcagttatctcccactgggtccctcccacaacatgtgggaatcctgggagtacagttcaagatgagattttggtggggacacagagctaaaccagcaactcaagatgatccacgtatgagaattattggacaaagactttaaagcatttagtttaaatatgttccatgaactcaagaaaaacacatttgttttcttccaggtgaaagacatgatagaagtatctcagcaataaaataaaaactataaaagaaacaaatggaaattttaggacggaaaaatacagtattggaaaaaaaaaytaaatgtctttgagaggacaaaggagattacataggaataaagtatattcaaattcaatttggatatagatcaataaaaattatcccatgaaaaacagacaaaaagattgaaaaaatgagcagattctcaggaatgaaaaggtgtaacatgcaagtaattggagttccaggtagwgagaatagagacaataggacagaaaagaataatagctccaaacttcccatgtttggagaaatacatgaatttgtagaataaaaaattgcatagtgttacagctcttttagaattgcaccagaaccctcccctgccstccaccccacggaagaaaattgcagyaaacccaaaacaacataaattctgggaaaaccacacctagctcatcaaaatcaaagtacagaatacaatggatagagaaaaagtcttgaaagcaccagaggaaaacagtatatcacatacagggaaaaaaaaatggaatgatctcagatttctcatcaagaccacgggggctaaaaggtaattaacatcttcagagtattgagaggaagaaaactatcaatgcagtattctgtatctggggatattttcttcagtaatgaagtgggggtgagggggagacattttcagataaaggtaacccaaaagaattcattgcttcaggccttccttacaagaaatgctgaaaaaagcacttcagaatgtagggcaaagatagcagaaggcaacctggatttttaggaaagaagaaagagaataataattagtaaatatctcagtgtatatgaaatactgtatatatatatattttttttttcttacatctttaaaatatatggctttaaagtaaaagttgtttttgtgggatattgaatgaatacataatgtntatgacagctatgagataatcgagagaggtagggcataaacaaattctagaataattatttacctttaaagttaaaaaaaaaagtagggggcataaagagccagtggattagaggggagagaaaactactttatcattagacttcccagtgatgaagctttatgataaagatttataataccctagaaaagaaaatrtgaacaaaacagactttcaggtataaaagrcatgtacaaatgttatcaaatacaagaattttaggaatgttgtttccatgaattcctcttgaagaagatactaatctagttagtatagtgtaataatatatactagttagtatagtatacattttctagtataacctactagaaaatgagcttcagatgactaacatggctatagagatatcagtataaggactggtrttgctcattaaatagtcagttgtagaactaaagcagaaaaaagttaaaaggagtgagcacaggattaatggctatatgctgtggcatgagcatgtagtataactgtaaaagtaggtagtgataattgggagaatttatataaaatttttttcaaactgtttgcagtaatcaaattagtggtgacagtatagttactgttattttgacattgttgtgtttataacgtgaaatgaaacagaatgattatggagtattctaattttatcccttatgttaagaatcagaattcttggtgtagaagaaaggagatgctgatgtaatctggaagagatcattaaaaaccctaatgtcgtgaatttgaattgaaratatcattgtgggctgggcatggtggctcacacctgtaatattagcactttgagaggccaaggcgggcagatcacttaagatcaggaattcgagaccagcctggctaacatggtgaaaccctgtctctactacagatacaaaaattagcccggtatggtatcacacgcctgtartcccagctactcaaggagctgaggcycaagaatcgcttgaacctgggaggcggaggttgcagtgagccaagatcgcaccactgcactttatgtcagtatgaacttctgcagtatttcatacacacacccagtacaccatacatacagctctgtgtggtgaaaataactagaaacagtgaccagcacrtagcagtgagcatccctattgacagattatcgtcctcacatacgatttcctactgcagggaaaacaggctacttggagaaattgctgactcaagatctagataggaagtgtacaagatgagccctgtatgtcttgtcatgccaaatagcaaataagctttcaaagacttttagggtcatgtttgaaggatacaggagtcaaattggaaaggttactagtggcgtaagatgggaaaatttcaaatttaatagggataataatagaaagaaatagaaactcatcagatgtgcctgtattaatgagttttaatgagtgcataatgtacctgtaccagcctcagtgccttggagatgaactgaaaatatgaacagtacatgtaatgaatgattacttggtagtttatcatatgctgtgttaaagtataggatactacccattatccagttatttatttatatatatatatatttaaattagacttcaagtttgcagaggcatagactatgactttttttctattgtactcagtggatatattttatgatgtctctctggaggttttcttcatctagacctgcagccttgtggtttcaagggcttctttctgggtgttggttaataggttgctgcaacacagcactacagttgtcaagtcatattttaggaacagttgctgttatatctggaatttagaccatgaattctatataagttccaaaaggggttatatcagtcatgattgcatggaatgtacacgaaaatatatttcctgataatcaaattatttatctagttatttattcctttcatcttcactgtgttccataatgaatttagataattagaaataagaatgcatgcaataaatcaatggcagaatataaaaaggaataaagaatcacaaaatggaaattatattttaaaatgaagaccccaaaccaaggagaaataatgaacagaagtcgagtcatatgcttgaggcacaccagctttctgttgcgtagaatctctccctgagggcaagcaggttacatgaaacttagtgaaacttagtggaatatacgtgctttcctatcwttgttttaaatcttaaatactggattgaatagattcttaggatggaatgtatttttaaagtaatttttctttaccctagtccaaaaaactaaaatgaaaaaccagttaacttatttatggttttcttcataactctttttatctcatgtagtttcatagtcaagatttttgattacagcttttattaacctcatctctttaatgttgataatattttatataatgtggttgagtaaagtgtaccgatataggaaatagagcaatcctattttaatagaatttgttgggggggaaataccacataattcatatctagagagtttttcatctgttatcccataagaatttcatgaaggattggtatgtgctttgcctataccagagctttgcgctgatttcttctctttcagcttagatttgtgggtatgatttggcagttatcctcttggaatgtgtaaaatcattacttttacaatgagatagaaatattttgaggcctaaggcttactcaaaattctctcagtctcttacaggcctgagtcacatttcaaaattggaatttttcatattgctaatggaggaactatttttatagtattgtgaaactattaaagaataggtaatgttatatggatgctcctcgacttacagtgggctatgttccagtaagcccatcataaagttgaagaatcataatttgaaccattgtaagttagggaccatctatagttaaaaatatagttaaaaactgttacactagagtataggtgaactcaggatgtgcacaattaggaatttttaaatataaatatagttactatattacagttcagttggtatttcagtaactacaaggaatttggggcaactacagagttttagaggaaaccttccagttagaccactccaagttctgacaccaattggaagttcgaggggttcccaaaaccacctcttagttttgataatttgcaagactcacagaactcactgaatgckgttatacttaacagttgtattttattacatggaataccgattttattacatggataccgatttaaatcagccagaggaagaagtattaatatatagggtagagttaaaaaaaaaataccacatgtggagcttacatcattctttcttggtggaattaggacagcccagcatacatatatgatagtgcttaccgagtattgccagccagggaagcccacctaagcctttrgtttttatagtttttttagggtggcctcaattacttactgcctgtstgactgtctttagtctccagcccttcccaaatgttgggctgatagctttagtctccagtcctttccagaggcaaaacatagtatgactcaaataaattacatgtatcataaattacattggtagattgtctagtagtcaaagacactcctatcagttgtgctattccaggagcctagcgaycatcttccagtagctgaggataaaagccagacctctctttgggcaagattaggccttcactatacagataattccgtggtctttaggcaagctttcctatgatatttggacatcttcatttagtgtaatgttcatatggcagatacagcaatagtatcggtttgaatgtatctgtcatttggaggagccaatgcagggtaattgaacgaaacttctggtctatcctataaagccattatatacgttttcatatttttgtactaatgtaattacttgtttcctccttttatctgtcactatttgtacttgtacagaactatttagcatagaagttacttgataggtagctaaatgtagttattcctcaggctggccatttgattagatcctgaggagcctttaactgaatctcccagtgagtattcctgagatcagatgctattggctatactgtagttttagaaggtttttcttttagtgatatattatttatctacatacaagtatttgttaaagagagttagtgtaaagacatgttaatatataacaggataatgagaagcataaaataattctataaatttgctcaagatgatttttttttagcttagaaaaccttattttgaaataagtttggaatcacaggaaattgcaaaggtagtacagaaaggtcccatgtacctttcgcccagtttcccccaactatactatctatcctactcatggtaggacttcttccttccgtctcagtgggcagtggtttaatctgcattttattgccccattactccccgcttttctcttctttttctmatttgctgaatttgaatgtttattttcataattacacataatttgaatttcatagtagtctttctttgaattacattttaaatgtggtatgtgggttgttttacttgttctccttgttgattgtatctggatggtttttggaaagatgcagagaaagattaggatttgtataaccaccattattttgcagtacctggaattatagaatcattagttttttattcccataattcttaaataatagcttcactacccagtggaaaagattagtttgagaaaagtttactgacagaattttttgaataactgttttctcaaatgtaggatgaaccccaaattaatgttccataaagaattctaatttctgactgacagaaaggctgttggtgatgtaattttaccagtgtggactttcttttattactgatgtaatatttctttgacaaaattaagagacaatttcaaaaagcagtttcattttaatataatgcagtatgctgtttttatgagtataaaaaaggaggagtaggaaaattagaaaataaaagtattgttttagaagagtccactaccctaacctatataaatgataaaaaggaaccgaatgggagatattaatgtgatgttgctgggaagagaaatgcctgtcttaaattagtggttgtcagggaccaatcccctgtgcaatattttgattagtggtgtctgggttggggccaaggtacatgcaattaaaataaccctctatagttgaattcagtgtccagccagaattgaaactatatagattaactaatgtcgtatccgcattttggtcttatgggggtaatatttgtaataatcatgcttttggtactgatgttctagtgaagttaaaaaaaaaatcacccatagaatgttgccctttcaatgtaatckttgttttagaatgctttttttttgagacaggatcttgctctgtcacccaggctagagtgtagtggcatcrtcacggctcactacagctttgacctcctgggcacaggtgatcctctgacctcagcctcttgggtagctgggaccactagcgcaggcgtggaccactattcttggctaatttttgtagtttttgtagcratgaggttgctcacgctggtcataaactcctggactcaagtgttccactggccttgcctcccaaagttctgggattataggcgtgagccattgtgcccagcatagaatgcttttaaagtttttaaaactattattttaaaactaaaatcataaaacttttaacccaaatcttatttacttttgtttagggacaaggaaaattattcattttagaaactttaattagtgtayatgttttgactaatattcaaattatggaaaacttgaataatgtttttacagtaatagatattttatctcttccaaacatttctcagttttcatgaattatcaaagttgaaaataatgttttacctgaactttcctttcactccttttattgacaattcttagtatctggttgtctggctgccacgttatttgcaagacgtcactgactcagagtggttttgaatgccagatgttattttgctgcttcttccagaaaatggaatttgttgggctactgttccacttaacaattgctgtgtaacacattatgttctccagaagcaggcactgagacagaatgtgtcatgcagggtatttattaggggttaacacctgtagaagggaattggagaaagcaggtttgggtggaggagaagtcagattacactgaggccaaagcttcagtcagccctactaggagttctgaagcgtctgtggtcacctgaattgttgctagtttagtagaaatggcatggtctttcttatttccttatcagtcattcaatgcatatgaagttctccaagaaacacaggcagttgtttaaagaggctctctgtaactttgaaggaacctggcagtggggagctatctgttgacatctggggcaaagctcatcattgagggagaagataatacatctctgtccaccatacaccctgaaacactatagtgactaatataaaacaacaacaattttttttttcttttttttttttgctcatgagtctgaaatttgggcaggactaggcagcacctaattgtatcttctctatgcagcatgagttgcagtagctcacctgtggttggaagaatcactgtcaagatggctcacacacatagctagccaattggtgctgcccatcagttgggagttcagccagagctgtgggcatggggtttttgttcttcccatgtgggctgcttgactttcttaacaacatgataagtatgttctctagagcaagtgtctctagagaacaaagcagaattgcatgacattttaatgacctagccttggacgtcatagccagcctaagttctatcatactgtattgattgagacagtcacaagagtccatccaggttcaagctgaagggacaatcttcttgatgggtgagtggcaaggttctagatgaaaatgtggagtgagagatattattgaggccatgtttgaaaaatatggttttctgtattcataaaacttaaaagttcagggtgccttaattagaaataggattggctacatcttttagaaaattcaaattaataatggtccaaatgtatgaggagggctagtgacwgaatgaggtccttctgggctacggccctcacagaagcaactaaaaatctgagcatagcacaaagaccattatcctaaaggcactaaagagtgaayagaagcggggagaacctgattgggaatacatcctcaaagaagatggaggtatatgaaatgacatctcatgttttgcagctctcagcctggggctgggtgaaaatggcatggtgtacattgtggcatgggagaagataacaagaagataagtagaagaactctggtctctatggcctgtgaaagctgaatttggggaaactatgtttgttagagaggggatccaaaatctgtctactgacagctcacatgacccctgagtgatagcttcactcagagctgctcagctaaagacaaaagataagaaacttcttcccaagaaacagtttgcagtttaaatgtgtttaatcagctgattaaaaaaagaaagaaaaaaatgctaactggagaaaaattaaagaatccagagtttcagaaatttarcatttattatgttcagggaacattcagaattacccaatgtataaagaaaaaggagtatgtaactcctttacaagagaaaagagtatccctgaaatgacccagatgtagaaattattaatagcagactagratttttaagtggctgttaacaactattctcagtaaaggtaaataaaatgtgttcacaatatatgaaaaaataggaaatctcagcacagaactagaaacaaatcaaatggaaatttagaaatgaaaaatacaaaatctgaaatgaaaattttcactgcaaaaaattaacagcctagtggagatgacaaagtaaagacttgaagttaaataagccagaagttattgaaggtaacagagaggaaaagattaaaataatagtagtccaaggacctgttagaaaatatcacaargttttatgtacatgtactttgagatcaagaaggagaggaaagagaatgggccagaaaaaatacctgaagaaataatggcctcaaatttgatgaaagatataattttatgtatttgagatgctcaagaaacaccagggggccragtgcagtggctcacgcctgtaatcctagcactttgggaggccgaggcggatggatcacgaggtcaggagatcgagaccatcctggctaacacggtgaaaccccttctctactaaaaatacaaaaaaaattagccggacgtggtggcaggcgcctgtagtcccagctactcgggaggctgaggcaggagaatggcgtgaacccaggaggcggagcttgcagcgagcggagatcgcaccattgcactccagcctgggtgacagagcgagactctgcctcaaaaaaaaamaaaamacaccagggaagataaatatgaaaaaggccatgtcaaggttcattatagtgaaactattgaaatccaaagacagagagcaaattttggaagcagcaaggaaaaaatgacaagttacatttgggggaactacaattccattaagagatgaattctcattagaaaataaagaagctaaaagagagacttaagaattctatatatccagtgaaaatatccttcaaaaataaatgtgatatgatatttttaagtaaaagaagaacaaaaagaacaagaagccaggkgtgatggctcatgcctataatccctgcactttgggacactgaggcaggcrgatcacttgaggttaggagtttgagaccagcctgactaacatggtgaaaccctgcctctactaaaaatacaaaattagccaggcttagtggcgggcacctgtaatcccagctactcaggaggctgagggcaggagcmttgcttgaacccaggaggtggaggtttcagtgagccaagatcatgccactgcacttgagcctgggtgacagagtgagactccgtctaaaaaaaaaaaagaacagaagaatttattgccagaagacctgcactgtaagacatgctaaaggaagttctttaggctgcagggaaatgatactacatgaaagcttggatctgcagaaaggaatccaaggcacttaaaattgtaaatgtctagatatacatactagactataaattttttattcttactaatttcttcacaaaccatatgactgcttaaagcaaaaattataacattgtcttgaactcatcagagatttgaggtcatagggcaaccaactaacctgaaatctaagaaatgacaggtacttccaaggaaaagatcattgaggtacaaaggagagcagagagctgcatattaagaaagggcagcattaggggaatgsaaattatgcttctgggaaaagaggaaccaggaaaggaaactgagaagcattaattttagatgggagaaaaaatagagaagaaagtggtatagttgggagaataaccagcagtgtcagatgtcatagagaagtcattacaggattcaaactaaaaagatgctactggatttggcagtgaaaaggtcatttgtcatcttaaagagtattttctgcataatgaatagggaaagggaaagccaaaaaaaaacttttggacaacttcttttcagcactcaaattccttttaagaattgatcatacatttcagtggtaatgtaaggacgaggacttgcattttcttggagcaggtataatcataggtaactttatacttatgaccttcattatttaaaaagattttaccaaatatggaatgcaaaacattttctaggaggcctctagtttttattcttatgtagtattgtaagatgccaaaatcttagctcagtgatcaaattatttgtacagagaataggtagatgtttatctacctacttttctttgatcctacttcttcaagatgttggaaccttttgggtttgtgggtactgtcaattaagtgtaaccttctttctgttcaggtgacactagagagctcttgctattcctcctctcttgagcccccctcccccaagtttgaatgaagtatctatgcttgttttactgcctattgagaacatccttatgragtaattaagagccttctttactcagttgatagatgttggtcagcagaggcattgaggcacccccactcccgcccctagtgagcactaatgggaattggaatgtgtggcttctcctcactttgtttacactttagagtacagaaagaaccagggtggtcyttgtataagttcagcttagttcacatcatactttgccccaaacatttttcttatgactactataaatttagatttaaatgaaaataataggtaagtctgaaggaaaaaggaaacctcagaaggccaagctatagtcttggtcaaatgttttmttttgctcgaggtgataaagtatgtgaatttatgtaagttttacgccttactttcacctggtaatttagtgaaatattcaggccagctagatggaaaagccattttctcttttaccctatgaatccttcaaattctgcctcataccagcattatctattatattgcctcacccccaaaacaaaaataaaacttaaatattttcaaacacaacagatgactakggagaagaaatagcccaccctcctgaggcctcgttatttcgaaggttaggagagtttccgtctgcccaratagtgaccattttaagaacagagacttcagccatggaataaaatgagtaaggatgtggagtgagtcagtaggctacatactttattaaatgtataattgtactcattgttggataaacagagaccaattaatattgtcattttaacatcatggtgcttatctgtgatattgataaccrttaactgtttggactaaaatatattgcggactgcagatgatcttagtggcttagtgaaaacattttcatattctttgattaaatgattcagacatttacacatgtatttttggtttttaattaattttaatcaaacaatacttaacacagtaaagaaaaaactaatacaaaaaaaggttatattgaaaagtagtctctccagcatacctcttatgcctgctccctagtggcagctatattcaattctattttttaaaagttatttagccccrtatctctaatgtcctgatatgttgatgtttctagatttgcgaattttggacagtttgtaaagacttcttttgcctgccttctatgctagtggaggatttagctgtttgtattcctctttctacttttcctccctgcattctctcactatacttttatcactatttttgatcttcttggtagataatggttgcatttttgagactttgtaaatattgtttattgctgagccaagaaatatactataattttttcctttcttatctaacaatttttcctataattaataataggctcaaatttgttttcagttgtttgtcagtactcttaaaatttccttttatgtgtactaaatgcctaacagtacattttcaagtattcgagtacatcaaatcatgtatcaagtcaatttagttcctttctcccaaccttgtaggcagttataattcagcttccttggctctgcattatttatcatatgtatgttctccatctttgaaaattgtgttgacacccatcatcttccattgtcttttcttacattcacttgtgrgtttctaccttttarttcttgtattgtcattttactgtagttctggagggagcagagataaacatgtttactcccataaatatttttggggtgatgagggaataagaagaaggatttctgttttctacttttatgtactcctatagtgcatagtattgcatttaattcagtgctgttgcatgctgtaaatgtttaattaatgcttattgaatgttttactttgtcagttgttacattcttatcccaaccctcactctacccccaacatgcttatgggatcctgaaattttatttcctaaaacctgtctttctctcagctgctaatatataacataagattatttatacaagaagactatgtattgatttggaagaaaatgtgaagtgataagagtaatgttgagccctttgcattttagtgatttattgagagtttactgaatgttttgaaactaggatctggtttccagagtctgaatttttaaaaatttagttaggggtgtgtgtgtgtgcgtttgtgtgtgcgtgcacgtgtgtgtgcgctcatgcgcacgcacttgaaaagagataggagtcttgctctcacctaggctgaagtgcagtggcatgatcatggctcacaacagctttgaactcctgggctcaagtgatccttccacctcagcctcctgagtagcctcctgagtagctgggaccacaggcatgcaccacaatgcctaagatttaatatttttttttatagagacagagtctcactatgttgcctatagatgagayatgtaagttctctgtggaaaataattcataactgaagaatataaaaraagacttataggtttagtgtatatacagatgggaagtgtcacattgcaaagatgtcagttctcttcagattaatctataaaatcatgattcccataaaaatttcaatatgtattatagaacatattaagctaattccagcattgatctagaagagtaatggcaattaaaaaatatgctctgccgataggaagctcattattttataattaagacactgtggtattggtgcaggtagaggcatatggatagggtggccattcatcttggcttgtgtgggagagttccaatttatgcctgttatcctggcaattattaataggctccctttcactgtaaagattgtcaactgaaaaaaaatagagtaatacagtaatatttttgctcttcttgagagtcctgaaacamacccactaaatttatgacstatgtggtattagataatagtggtgaaaggatatcattcagtaaatggtgctggggtagaaagaaatgtaactgccctttatctcacactacacacaaaaattaatccccggtagatttaaaaactggaaaagcataactttaaaacttacacaagagaaaattaggacaccatccttatgatgtctgggaagacagaaatcatagtataaattataagactacattagtattttatatatatatatatwttttttttttacaaataagaaggacattaaaaacaatggaaaaacaagcccacatgcagggagaagggatttgtaacacatcatgaagaactaagttcgagtaaatagaatccctgaagattaaacaaaaaacagtgsacacacatttttacaayggcaagggatattaacaggcattttatagaagaggaatgtaaaatgaccaatgataccagtgataatatgaaaaagattctcaactgtattcgtaatcatgctagcamagttgaagatgtccatatctttcatctcagaaatttcacttctacatctatagtctggagaagcattcatatatgagtactagaagacatttattaaaatattcatccagcattctgtgttttaacaaaataaaaatgggcaacaatcaaaattccgttatcaggagaattgataaattttgatatgtatataattaaaattaattaaaattaatgaattaaaacaatatgtcccaaaatagatgttttagaaacatatatacacacacatatatatgtttggaaacatacacacatatgtttggaaacatatacacacatatatgtttggaaacacacacacatatgtttgtaaacatacatatatgtttggaaacacacatgtttggaaacatacacacatatttatgtttggaaacatacacatgtttggaaacacacacacatgtttggaaacatacacgtttggaaacaaatgtttggaaacatacacacgtttggaaacatatatgtttggaaacacacacatatgtttggaaacacacaaatatacacacacatatatgtttggaaacacacacacacacacacacacacacacacacacatatatatttattttattttatttttttcttttggagacagtttctcattccatcacccaggctggagtgtagtgacacagtcacggctcactgcagccttgacctcccaggctcaggtgatcttctcacttcagcctcccaaatagctgggatcgcaagcatgtgccatcctgcccagctaatttttcatttttattttttgtagagaaggggtctcactgtgttgcacaggctgttcttaaactcctgggctcaagtaatcctccctcctcggcctcctttggcctcccaaagtgctgggattataggcatgamctatcacacccagctgatgaagcataatatttgaataaaccaagttgcaaaaggcartgcacagtttggtgtcatttataaagacattttaaaaagtacatagttttatgatgttgtatataggcataatagtrtaaaatatgcatggatacagyaaacaccaaatttaggatagtagctrtgtctgggtagtggagggagaggatgagatcaggaatggtaatagaatacttatgtttttcagtactatctgtaatgtcttgttaatttttagtattttctattttatttatatagtattatgaataaaatatattcacataatatgctttatgtatatgtatatagtttataattactatctataaaataagcaaagatattattgatgcatataaatcctgtctttgcagttcctttaatctcctttacaatctaagaagtactataccagtagaagtaattcgtagtgactgtatagcttaatttttaagataaagaataaaatattttttcctcatctaaaaatggtcttagtaattgctaagcttccttccagaactaaactgtacttctttgatgtttccyctacagcagatctttttcarcaggttagaatacagtcaaatgttgaggattataaagctaataccctatacagattgttgntttcaatcaccctgtctctctttagcaaccatctatcatctacaataggggtttgaaaactttttctataaacagcctgagagtaaatatgttaggctttgtaggccatgtggtctgtgtcacagctactcactttgcctttgtagtgtgaaagcagacataggcaatacctaaatgaatgggcatggctgtgtttcaataaaactttatttacaaaaacaggcagcaaaccagatttggccgtgggccataatttactaactygtgatatacaacacactcagagaaattgcttcagtaatcaaagtaatactgttataatattttacccttattatgggtggtaaaactgaagcatagagatcttaaatggcattattcaggttaaagtagccctcccatattcctgtaatttacatggcaatgtaatttttwaaaaaatatataggttctccagagattctttttctccctctaaaagtagagtgagttgggtgggtataatctcttagttattcacaattacaacctttactatgattagaaacttaatattgttaagtccctgagaatcttctttacagaaccattttatatatgattatttttctaaggtttgcattcacatgcaaaaacaaatacaaaagctggtatatgatatagtttagatttgggtatctwmcmcaccattgacttaacatccaaagacaatgaaagctttaaataatatagacartctattaggcagttgttttagttcttctgtaaaatcaactttatgaagcaatttctttgtgttgtcatgacctgcagtaattgagactttatctatctgcagttatcttaaggtctagaaagtatatttttccctgtccagtttcatgggctagaggatagtattttttgtggttatcaggtaatgttgactcttctgtatgcagaaagtaggtctaccatagtcacattggaatctgtgtaaatcaaaaggaaagatagtaagattaatttaaccagaatgaaaattaccacactactttttatctctagaagaatactgaaattacatgtgtttgagaaagttttaatatgaatcagaaccaggatttgaattartaaagtaattaaatagattttcttagaatattacttttaaaataagttgagatttttttctgacaaaaagaatatcttaccaaacaatgaattgtttatttttccactaaaaattgaatttatktattttttcagagacattaaacctgacaatatactgatggatatgaatggacatattcggttagcagattttggttcttgtctgaagctgatggaagatggaayggtaaataaagataaatcctaaattattttgttcacagacatttcccttgctatttgtctgatatatctgttttagaaaccatctatttatactatctacccatccatccatttgtctrtctatgcgccacctccttccacaaaggcatttgggcatacttacagtggggttgtctaaaaagtcacaagccatttcagctgcttatatcagtgatcttaagattgataaaatataccctttatgagacccttgtttgctccttctttagttggtgacttctgttgtactttagatatttcaaagttcacygggggtaaaagaaytaagtctcacatagaaaaagaaaacgcagctttgcccgcacttttacttttttgtctttctttcctaaattgcttagttattctaagggatagtgttcaacaaatgaatccctttttcagaaagttcacaagttgatttagtttcatgttcccatttgcttaacttttgctaaccctaaacccgtcagttggttttttttgtttacttaatagctgggcatggtggtgcgtgcctgtagtccyagctactgaggagtctgaggtgggaggatctcctgagcatgggaggcagaggttgcagtgagccaagattgcaccactgcactccagcctgggcaacagtgaagtcctgtctcccaccccctcactcccccagagccacccagaaaaaaaaggctgggcatggtggctcacgcttgtaatcccaacactttgggaggctgaggcaagagsatcacttgagtccaggagtttgagaccagcttaagcaacatagtgatactctgtctctgttttaaagaaaaaaaaaagtttatatgccacagttttattctgtttttttttytttttaacttcatttttttctggccatataggagaggtccaaaaatatatcagtttaattgacagaaactttttggaggacagtttagtataatacattccaaaagccatgaaaatgtcacattactctagaccagtaattttaactttggaaaaattttattattttttttttagacaaagtctctgttgcctaggctggagtscagaggcgccatcttagctcactgcaacctccgcctcctgagttcaagtgattcttctgcctcagcctcccaagtagttgggatacaggcaagcaccaccacgcctggctaatttttgtattttttgtagagatggggtttcaccatgttggtcaggcyggtctcaaactcctgacctcaggttatctgcccacctcggcctcccaaagtgctgggattacaggcgtgagccaccgtgcccggccaactttggaaaatttgtcctacagtgataactttgttaaaaagaattatgtgacctctgtctctggccatgatagagggattaaattggtaccaaattagcactcccactgtaaggaactgtaaaactggatacaatagttgaagctactgttttccagcagtggacaacaggcagcataatactattatccctgacataaatgaactcgtgaggtattcctcacgattgcgcaaagactggggcagttcctgactctgatgcasaaagctagagtgaaagcagagctggactacctgcagcagctggaatatgcagggcttggcattggagaggagggaattgtgcagagagagggcataaagtgcctcatgaaggttgggctgtgcattgtaccacaagaccatatgaggcttgacaatagcaratgatagcatttgaaaacagaccagaatactaatgatcaagcagatctcccaggcaggaaacagtgctaggggaaattgaattttcatccctggagagccagctaacacctttgtatcacctaagacctactctctaacaacctaagtccaagccctgattagatccatagagtttggaagtcttccttccaagtagaggggcttatgacaaatcttagatttttgtatgaacctacaatcacagagtgtatctgtaagctaactcatggtcaaggagatcagtcagtaatttttttatgtgcttacataagaattgtttttcttcataagaagataatagaatcaatactctctataacatcttattcacaatgacaaggattcaaaaaaaaaaatcactgaaccaaacaaaaatgggsatgtggatagtgatacagagtcagataaaagcagtcagtagaggcctggctggcacacatgttggacttagcagacagagaattaaagaagtgatcataggtcggtcacagtggctcacgcctgtaatcccggcactttgggaggccaaagagggtggatcacctgaggtcaggagtttgagactgcctggccaacacagtgaaagcttgtctatactaaaaatacaaaattagccaggcatggtggcacatgcctgtaatcccagctactcactcaggaggctgaggcaggagaatcgcttgaacccaggaggtggaggttgcagtgagccaagatggtgtcattgcactccagcctgggcaacagaatgagactgcgtctcaaaaaaraaaaaaaaaaaaaaagttataaaaatatttaagaaaacaaaggaaaatgtagccttaaagattacacaaataaggaatttcagcagaaaaatgagtcaaatggacattttacgattagaaagtacagtaactgaaatttaaaattcactggatgaggttaaaagtggactagagataggagaagaaacagccagtgaacttgaagacagatgagtagagatgagccaatgtgaaaawcagagaaaaatattgagactaaataaatagaggcttagggatccatatagaagaagagagtgagatgtggggaaaaaaaaatgtgtacgtaatggctcaaccttcccaaatgtgatgaaaaactcagatctaagaattttaccatatctcaaacctataaagagaaccacatctggccatgtcagatgtggttaaagtgccgaaaactaaagattaaaacatttaaaagcagccagaaggaaagacatattacgtacagaggagaaatggtaaggactactgacctgtcatgagaaatcatggagtgatgtctttaaagtgctgaaggaaaaaaatgtgtwaactgaggtttctgtattaagaaaaatatccctcaaaaatgagagtgaattagacatcttcagataaatggaagatgagaaaaattaatctctagcaggcctgaatgctaaagaatgtcctccatgtcaaaggaaatgatactgtttggacatttggatttatagcataaaaatatcatatgcaataaataagtgggtaaataaaatgtctatactgtctttcttatttaatttacataaaaggtacctaactgttaaaagcaaaaataatgtaatrtgtaattatttgtaatgtgggtttatgacatgtagaagtaaaggatatgacaatagtcacataaacaatggaagatatgtatatggaattatactgctctaggataactgtatataggaaatataaagtgagaagtgggtagtgccaggtatgacattggaagagggaaatagcatggtggtgttgctgagttgagaaaacagagattgaaatcagggaggctttagcatctggaatttggggccaccattccagagaggatagagctgcagggaaaaataactccacggagagagctagtgattctccagtcctgcatattacaagcccgatggactcaaagttggagatagagtccctgtagtctgatgtttgcctctctaaattgcttttgaatgcattcgaaatgcaaattccagaatgcatgagtaatatttctgtctctgagtttcctccaattatatttgttcttgaaagtctggtgtgtcctcccagtcattcattctgatttttctggacaataggataatattttatgttttgtttctagcatacttattgatgaactcaaaatggttttcttggacataatatcaagttggacttccattttcaaaaggcctatggcaggcctctcaaagkctttgagaggcctatggcaggcctctcaaagtctttgagactttgggaggccaaggcaggagaattgcttgagcccaggagtttgagaccagcctgagcaacatagcaagacctcatctctacaaaaaaatataaaaaattagttaggcatggtggcatgcacctatagtcccagttactcaggaggatgagatgggaggatcgcttgagcttgggacctggtcaaggctgcagtgaccgtgatggtgccattgcattcyagcctgggtggcagcaagatcctgactccagaaaaataaataaataaaaataaataaaaataaaaaaaaactataatgaagaaactttattttatttcagatttttaaattaatttttagattttattgtcttattttttgaggcagggtyttgctctatcacccacgcaagttcagtggtgctttgagcatttcatttacttacatatttcccataaccatatttgtgctgctgtctcttgattatttatttttagatactaactcatactatcctaccatggtagatgaggattcaggtcttttgctctgctcttgcccatccagtacacatcctctctatcctcccaatgtaattatcacacaatacctcgttaaatcctgtttggtattttattatgacaatacaaatactcatcgtcgtgtcatagtttttttaaattgcatttcttttcttcagaacctttttattcttcctggtgtaagtgaccactttgctctgcttaatttcccgtgtaattgtcaccaatttatcctcaaactctccaccacgttgaattacttaataaaaggaatttagcagttcctttttttcccatggagatattcatactggagtcttgcattctcctaatctggactgttcgttctagagacctactgcataggtactatcctaggactacctttcatcgtcttcatggaatttatgttgttctctagtattggactctgtttcctggatcctgtgtggtgatagctrcctgaggaaggttccattggaagtaaatatttcataatcttccatgtctgaaaaatgccttcatattgtattgatagtttgtctggacatagtattctagatttgaaactattttcctcttagaatttagaaggcattatgttgtcttttaacttacagtgttgctgttaagacatctgacaccattctgagtctcagtccttttattacagcctttctctctatatctggaagcttttagaatgttttatttattcccaatgtcctgaaatgttatgattgttgactttgtgtgggtcattatttattatctggacagctgcctcaaatmtacgagcttttcccaagtttgtgactttcaaattaagtttcaacttactttttctgttatatctcggtcaaaaccataccagctgaatcaatttaccttaagaagtcaatttctgatggtgaggtgtttgctataattctttttcttgctctaaaattatcttggctattcttggcccttcatttttctatgtgattgttagaattagcatattgrtttatatccatacatgtacatacatgtgaacaatccttcataaacactggcttatgtatttaagacctgctttgaaattagcttaattttgggaacatttatgtctataacatggaatcttctcatctatgaatgttgtgtttctttttattgtttcaggttttatgtctgttaatacagttccatgatgtttactattaatccattacctagatgagttagatttgctcctaaaygacttatggattttttaatgttacctgtattataaatgatacttgtttaaatttgcagtttaatagtgtgttgctcttctttaggattagaattgattttgtatattcatcctgaatctagcaatcttgctaattttttatcggtttaaaatagtttatagattcttctagatttttcatataataaatcatgtaatccgtaaattatgagaaactttgggtttgtttcttcacaatctttatatgtgctatttttttctcttaccatggagtctaatgaccttcagtacaatgttaaataggtgcagtaatgtttctgtagcttcaaattaatttaatgtttgcagttagcttttggtatatatatcttatcaaattaagaaatcccttctcatttctgattaccagagtttttttgttatgattctggttgtaactaaattacttytctgcatccatcaagatgatgttaggttgtttttcctttaatcagttaatctgataaatgacagcttttccattgttaaatcattcattctttgagtaaatatgactttatcaagatgttatattgcagtattttaacacattcctagttgactctactactattttatatagtattgttacctggcattcatacatgacattrgtcatatctcagactggagtataattttttttccttaaattgttcttgtctgatttttaggtttaggtcattttagccttataaaataaacagaggacccatattttccccttacccattttggctctagaacagtttatagtacagttrtctgttaacttatgtcattggtagaatttacttttaaatcaccttagcctgggtgaagttttgttttcttctattttattttgttttgcagatagattttgtactattgattcaaatttttaatgattataggtctgttggactttctctttcttcctgagttttaatacgttatagtcttttcaatgaaaattgtccattttctctgagttttcaattgtattgccataaagtagttcagaccaccttcttcctagttttaacatctttgttacagtgtcattttgccccccttttcctagtattgtttatttgtgcttctcttttccttcgtaagttttgatacagagcattctactgttcaattctaaatattttccaacttaagttagaattcttctatgggccactatttagtgatatgcctttttaatattcatagtattatatttatttgtttagttagttattcctggtttcagtttactgtagattgggtctatttggtatcagawttttttggcattttttgaaatttgctttgtgattttgtaacaggccagtttttatatgttctatgtttatttgaaaagaatacttttttttttctaacttttgggtacagatgtatatgcccataagattaaaattgctaattttgtcattcagtttttttgtgttcttaaccattttatttctctgatctatttattcgttttttaaaaatccttatgatggtaaatgtgttaactttyctttgtaatcatcaatgttttgcacagctcttttgtagctttgctgttaggtatatattattcagaattgacatttcttccagggtattttcttttatattatattaatgaattttwaaaaaatctyacaatgattttggcatgaggatrtatttaattgatattactgtagctaccttaagtttcttttctttatcatatgcctgatatatccctttccatccatttacttttaactttcctgcgtccttatgttttaagtgcatcccttttaaacagattattgctgatgtttttcccatttgttcattttggttttgtgtgttgtcctgtgtaacaggtttgtttaacaggtgaatttaatccatgtataaattttgtgattattaatatacttatttctagtatcttacgtgcagtttattattggttttgcttgtttctttgcatgtatgcttgagtttgttttcttctttcttgccttctgttgacttgatcaagtttagcttttaaatttctctttgtttggaagttacatttctaagtattttagtgtttatctttacatttttaaacatttgtagtttacctgctgtctagagtttatcggtttttctgccacattccctatcaaaacaagaaacttagattacttcacactgtaattaactcaacgtgtaacactcacaacaaaaattaactcaaaatcggtcaaagacctaaatacaaaaactaaaactgtgaaactcttagraaaaaaatagaagggatacttttatgaccttggatttgtcagtgatttcttggggatgacacaaaattacaggcaacgaaagaaaaaaatagataaattcggcaatatctccattaaaacttctgtacatcaaagggcackatcagagtgaaaaggcaacatggaatgagagaaaatatttgcaaatcatatgtctaataacaggttagtctctaaaatatgtaaaaactcctacaagtcagcaacaaagaacaaaggaccctgttaaaaaatggacaaggtatttatttatttgtattttattttattttagagacagagtcttgctctgtcgcctaggctggtgtcagtggcgtgatctcggctcacttatcctgcctcagccacccgagtagttgggatttcagacatgcaccaccacacccagctaattttttttttttttttttttttktaragactgggttatgacctsttggccaggttggtctcaaactcctgacctcaagtgattgacccacctcagcctcccaaagtgctgggacaaggaacttaaatagacatttctccaaagaagatatttaaatggccaattagcacttgaaaaggtgctcaacatcactaataattagagaaacacaaaaccacagggatacaccatctcacactcagcaggattgctactatcaaaaaacagaaaataacaagtgttgtcaaggatgtgaacaaattaggatccttgggcactgttggtgggaatgtaaaatatggaaaatggtataggtagctcttcaaaaaattgaaaatagaattaccacgtgatccagagttcctcctctgggtatatacccaaaagaagtgaaagcaaggagttgaacatacatttgtacactcatttttagagcagcattgttcacagtagccaaagggtgacagatgaatggataaacaaaatgtgctgtatacatacaatggaatatcaatcaattttaaaaagaaaggaaattctgacacgtgctacaacatggatgaaaccttaggacattatgttaatgaaataagccagttagaaaagtacaaatattttatgattccacttatgtgagataactatagtaatcaagttcaaagaaacaaagtacaatggtggcttccagggtctaggggaaggggraatgggggaattactgatgggtacagagttaaaattttccaagatgaaaaaattttagagaaggatggtggggactggttgcacaacagtgtgaaggtacttatgccattgaactgcacacttctaaaaatcattaagatagtaaattttatgtctatttttaccaccattaaaaataataattaaaaatttaaaaaacctaagaaatttagaatacttgaatcctgtttacaccctcagtaatatgtttttgtttttccagtgtttaatttccaacttctttttttttttctttttttttttttcagggaggtaaagtgggkggtttttaaaaatttttatttttcyatttgtaaactgacaaattatagttgaayacatttatggggtaaacttatttttcagccctaaggtggttactcctgcctctttttctagtccttgtcctccttcttcttcattatgttatccaattaaccaccatttaaatgwattagtaaagtttactaatatctttgttcataattgcttctagtatcacattcttccatcttggttaaatttcttgttttccgaagtataccctttagtgcttgtttagccgaaaggaaatgttagcgatagtttactcagtcttgtgtgaaaatgtatcatttctgtatcataatttaggtaggtaggtaatactatattgacaattattttttcttatcactttgaaggtacaacttcattttcttctgactgcaattcttagttattaataattcagctgttggtctaattgtcatttcttagtagataatctctattctttaatgtttttaaaatctctttggctttggtattctgtagtttaattccaatgtgtatagacatgagtctggttttatttatcttctgagtactttttgttttttttgtttttttttttttgagacagggtttcactcttgtcgcccaggctggagtgcagtgatgccatctctgctcactgcaacctcracttcccaggctcaagcaatcctcccacctcagcctcccgagttgctggtagtacagacatgtgccaccatgtccagctaatttttgtattttttgtagagatgtggtttcacgatgttgcccaggctggtctccaacttctgagctcaagtgawmcacccgcctcagcttcccaaagtggtgggattactggtgtgagccactgcgctcaacctcttctaagtactttatgcccttcctgcatccaggaattcgagtcttatatcattcttgaaaaaatttaagctttgtctctttggatattgctttccactattctctcttttatctcattctcttatactatgttgaacttgtccattctagggtctgtacgtcttagcctttcttccaaattttccgttttttaagtcttcatattagatgctagtaatttcttcagctcttcttcaggtttattattctcgtcaactgtatctaatccactgtttacctatttattacgtttattttatttcagtgactattttcatttctaggacttccgtttgatttttaaaaacttttgtgtttgttgatttttttaggtctttaataattttaaacatgcttatttcatagagtggatctgattgttgttagggatctattgttctgtttgttgggatttctgagttactcataatagacagtttactcatttggtttatattattggattgtgagttcatattcagcaagattttatgtttaagaattatatctgccaaatttgagcatgtgtcctccagagtagatttgaatttgttttgcttcctagaggcaactaaccttgggtcagtgttaatgccggtttcttggcttgggaacttttcaaccacagaagcggtgtgcatttgaatcccaaatgttgagactatgtgatgtaatgttacgaatttctacaggaacaatatttttcattcatcacacattagtcamgatagatgaaatgtcttgtccgtctctgctttgtggcagatttttataatgtaccgtttttcttacagtatacgttttaaggcaaaaggtatgtatatagggcagcctttgtcttcaaactcgccccctcatgtaagctaaggataaggtcttktcttttgttcttacctcatataagcataaggtactcgcttttgtgtatgttaaaatttgagtacctaggaaatgaaaaccaacaattccccaaccctactcatctctaatgcttattatcctgattctcaagcatttcttgattactgacctctaagaatctctctttgtaaaaaagttcttttatatgtttatacaaataattgttatattttatctagcyttttttttttttttttttttttttttgcttttgaraccgagtcttgctctgtcgcccaggctggagtgcagtggcgcaatcttggcttactgcaagctccgcctcccgggttcacaccattctcctgcctcagcctcctgagtagctgggactgcaggcatccaccaccatgcctggctaatttttttgtgtttttagtaragatggggtttcactgtgttagacagggtgtttgtctagcattttaagagtttgtaatggaagggttttcaagtcatttaatctcagtattgctaaaatgtaagtttatcctaattattcagaattggaaatgtagtctagaaaatccaaaatattaactggtattctactttaggaatgttcatgttttggataagttcttctaaaacatgtaaagggctaatattcttttacttcaaagtaccttacaacatgcatacccaggatttttctagttacctgttttattttttcttccacttttttacagagatagggtcttgctgtgttgcccaggcttgtctcaaactcctgggcccaagtgattctcccacattggcttcccaaagtgctgggattacagatgtcagctcccatgcctggttttaattacctgttttctaattaaacctaacctgctataacaagtactcaactttttttctctattggaacttyagattttgaaggatatayctcttcttttatagttttttaaattagtaagtagtttgttgtacattattgacgtgtattttcttaggtttctattaaggagtttgaacataatctccaggcttctcatagtgttggcctaaatatcaggagctttttccccccatctcattgtacaattttgacggtttcatttttttttttttacacgtataggtttgacaggtaattatcaataatgagtgttctaaaccaaatattcagtttgttcttaattggtatgatggtttaaattaaattgttcctctcaatgtcatcagttaagtaacactataataaaagttctatagtgttatgaaatcctgaaaactattaatgtggggataatatacaatttaacatatatacaaggattattattatttttcagataatgacaaagatgtgtttatgagataataatgtctattgtgtrtcttaagtaactatttaaaatattttatttctaatataggagattaataaaaatgtaaatttcttcaggttcagtcctcagtggctgtaggaactccagattatatctctcctgaaatccttcaagccatggaagatggaaaagggagatatggacctgaatgtgactggtggtctttgggggtctgtatgtatgaaatgctttacggagaaacaccattttatgcagaatcgctggtggagacatacggaaaaatcatgaaccacaaagttagtatgttttacttttgttcaaattaatgtggtaaataacacatataataaaaccatttttaaagagaaaatatttttctaaaaacagtgaacaatcacatttctatcctagtatgggacaggacaacataaatagtcaaaatccataaattattcataagttattagttctaattttcttgtattttattagagatgccgctaagtaggaaattaagtggtctccccagtagaataacaaaggtcgtaagtagagaatttagatcattgcttactatagtatatgtataatcatgactagaatatgtgtaaaaaaattttcaactttagtggtaataagtgcaatacaaatttaaaataaggatgagatacttttttttcttgtcaaattagcaaagatcaaaagaaaaatagtactctgtaccataaataatgcagtgagatgggcattctaagacattaataggaatataaattggtgtracctttctgttcaggaagtttacaggtgtgcacctagagccttaaaaaatggttagaggttttgattgagcaacttcagtctaggaatctaccctatgacattctcagtagaacaaagatatatgtacaaggatacctattctaacgttatttatgatcacagaacactagaagcaacacagacacacaacaagaacaaattaatgaaacgttaatatatttagtactaagtgaaatagactgttcataataataagaagaaaggttttattagcagtcttagaagattgtgagcagttgcaaatacttagaatatgaatatccgatagaagggaatgataatctattctttttaatttgttctagtgaagcaattatgattagttgctttacatgtataaaaatcagttttatagggtttatattcttcttcctgtttgcaaagataatgtttcatatagttataaagagttgaaagactggaaatagcagcagggttgtaaatagcatgtacatcatttgaattagaaaaaaatattgtagtatatatttaacagcacagattacagcttcagttcaaattctggttctgccacttcctagatgtgtaatgttgagaaagttacttgaattctgtgtgtctttatttcttctataatattagcatagtaggagtacccacctaaaatgactgttttgagggttaaatgagtaacgtactttaaatagtgtcagatacatattatgtcctttaaaaatatttattattagttaatcattagtatgtaacttatatgaccattatcaatcatctatcttgatttaaatagagtcaaattccactactttgaagtaatttctcttcattctgatagcagtttaagatatctaaggtacaatgtattcttctttctatagcgcatgcatgattgagtcatatatgaaattaaaagtcctaggaaaatgatcttctgtcattcatccctgtattcctttagtattagtactttgcaccaacatgcagttattagatatatttaaaataaaatgtatttttaagaaaataaataagtcaaccaactacttagtatgttaaacactgatttatattttgtttctgtttttctctgtttaggagaggtttcagtttccagcccaagtgactgatgtgtctgaaaatgctaaggatcttattcgaaggctcatttgtagcagagaacatcgacttggtcaaaatggaatagaagactttaagaaacacccatttttcagtggaattgattgggataatattcggaactgtgaagcaccttatattccagaagttagtagcccaacagatacatcgaattttgatgtagatgatgattgtttaaaaaattctgtaagtatgacactstgaagaagttctgtccctctgtttctttctactrtggktatatagtaattttttggtttataagtattttgctaggatgattttacaatgatcagttattagtcagtgatcatggcttcyggtgcttattctgtcacaaatcaaattaagaagaaagttaactgaggtgaacatagttatttgtgactaagaacaaaattaaaattcaaagttttacctcttagataagttatgccattaagcttcgtaagagaacaaattagatatttaaaaaagcagattttatgattgtaaagtgcagaggttggcaaatttctccctaaaaccataaaactggacaaaattatcaaaatcaaccatgtcagggcctgatacaacaattgaagagaaataaattgagaagcatttatttgtgaaaaactgctkaactttagtttaaagtcacatataccacacacgtccatccccactactgacttggtctgggacagtagtactagtagcatggaactggatagaaaaatcagcagctttgctgatacagagggcagattccaggactaaatacccaagcccagtgtgttgctgctaacaatagcaaacttggtaggaaatcaatagggaaaatagtccacagacgtggtatagctctgaggtatagccctgcctgaggtgaatacagacctcaagccaattattcggccagtccaatagccaaataattcaaccattcttaacttgtgagccatgccaaaacaggccaacatagtatattgacctctgctataaccctttaggttatatgagattaaaatttaggaaaataagaacttaaaatttttgagttttttgcctttttagccttcctcttttttttttttttttttttttttttttttgaaaaaaaattttgctttttctcccaaggtggaggggtggggcacaatctcgggcttattgcaagctcccccttccgggttcacgccgttctcctgcctcaacctcctgagtagctggaactgtaggcrtgcgccaccacacctgggtaacttttatgtttttagtagagacggggtttcaccgtgttagccagaatggtcttgatctcctgaccttgtgatccgccctcctcagcctcccaaagtgctgggattataggcatgagccactgctcccggcccctttttagccttcttaatttgagcttttatttttattcagttattttatttactatggctttaatcctgtactaaaaatttttatgttaatgttatatgacttaacaaaatctttatttttaatttttgtgggtacataatmggtacacgttatrtaacttttcactgaaacagtgaatactatttcaatacaataagctgtgatcactgtttgataactgataattgtaaaaccatcctagtactgtattcaaggcagataaaaatttctcatactttcctgtctaaacttcacaaagaataattaaactgacttctcttaccaattttttataaatagaattatatttactgttaacaaattatgaatcattccaaattaaatacatagtacagttgatcctaattattcatggwggttatgttctatatagttgccttgaacactgttagctaatattgaaccawtgctctgagggaaatacagggttaggtttctgtgagcctctgatcaactgatcaatatatagtcttgttttatgtgtgcttctctttaaagacactttatataacatatgttgttgattcattaacactgaactcaccactgaactcaccaccagcagcactgtaactcgtgcctgartgaagcttttctagcacattattttctccataaaggcacatcactgtcctctggcrctaggaacactagacagygcttcagcactatgcttgggagcctttgcaagcagtgaatcacatacagagggcccaaaaatgtgaaatgcatgacaccaaagagaccctgtagaggacacttgtttataatatgagagcttaaatgagaaggcagagcctctcctgttcaacctcagctgggaatgtgagcayaggacatctcaaatttttctctgctctgcacgtgtctacaaatgatcataaaattaccacaagtattgatttggggtttacaaataaatattagcttctacacaaatttgcaaatacagaatacatgaataataatgactgtattctcaatatcagactttgaatcttcattttactttaattagaattttagagtascagtgttcatggtctaaattttatatcactaaacaactataccaaacttaccagtgttttaaaattgaacagtcacaatttttttttaaatatttctttttggcattttatatttatagccaagcctacagatcatatagctayctatttcttaccagatgttttttcctcctttaggaaacgatgcccccaccaacacatactgcattttctggccaccatctgccatttgttggttttacatatactagtagctggtaagtttgaaaagttaacatagtttgggccaagtgcagtggctcacgcctgtaatcccaacactttgggaggccaagacaggtgtatcatgaggtcaggagatcgagaccagcctggccaatatggtgaaaccccatctctactaaaaatacaaaamttaggtgggcgtggtggcaggtgcctgtaatcccagctactcgggaggccgaggcaggagaatcacttgaacctgggaggtggaggttgcagtgagccgagactgcgccattgcagtgcagcctgggtgacagagcgagactctgtcttaaaaaaaaaaaaagttaacatagtttggacaatttaaagcaaattaaattgaattgaggttcgtaaaagrtgtatgagaaaactttgtgaattaaaactttttaaaaaatagartgagcctactgctggaaatagaaagttaagcattacaaaatgaatagaacgcatgaaaatcttaactcgttttggaggggaaagaatggaacagagagctcagaatctaatccttaccaatgaagcagtaattagaagagtttcacgctgttgaatattctctagatgtcaagcaggagaactttcaacccattaattctaccatcctttcactgaccctcacttcacttatattccctatttcccccttaccctgtttaaattccattgagaatgattataatcactccttgtatgccatttcagttcctttgactgtctctcattctgttatatttgttttgctaagtgaacattaactattacaattttattctctacctgtacagttccaaatgactagaaaaaatagctgactattcttactggtctactttaaattcatgattaccaayctcaagtcccccttgtctgacaaatgtactgtattaccctagtatattcactcttccactcacctagtaactattttttactttctttttttttaagagatggggtcttgttctgggcagcagaagggctggaatgcagtggtgcagtcctagctcactatagcctcagactcctgggcacaaatgatccccytgcctcagcctcctgagtagctgggacaataggcacaagccaccatgcccagctaatttttaaaacgatttagaaatggagtcttgctgtgctgtctaggctggagtgcagtggcacagtcatagataactacagcctcctactcctcaagccgtcctctggccttaacctcccctgttgctgggattacagatgtgagccactgcatctggcctatttctttctacttgagtttgaaacctctgtcatcctcactttcagcttgcatctcctttcactgaaaggattgaggcaaaccgcagacaacttccacaagctccagttaccatatttaccgcctacttaytgttrgacccaaattctctgttcttttcatggatgaactgtgcaagcctctagtaaggccagtatcttccatcccttcctggctagtctagtgcatgttttgctttcatgtcatgaatttttttcttcttgtgtcatctgcatcatcagatcatttctatcagcttacaaatgtcagttctccatcttaatgcaaaatataaaatctggattcctcttcctttacctcttatcaaccatgtctctgctttacattatagaaaawttacttcaactgttgactatattttgtttatgtttctcatactgttgtttcttgaatccattccagtcaggtgtgtgcccccatcacttcatgcaaactacttttatcgatgtcactgttgaccaacatgttgctaaatctaatgatcacttgtcagtcctagtcttacttatttgcttagtctcatcttatttgccacagctccatacttttaaaataccacmttctcctrtcttctaaggcacttgactgagtttctctcaccttgctggtcattccttctcagtctccatacctgatccctcctgatttccctgrcttgttaatatcagagtgtcctatggctcagtctttggacttctcttttccatctaaactctgtagtgttctcccaaagatttgctgatgactcctaaacgtgcatctccaactgagacctctcctctcgtctactgtaaaaatctgtcttaaccacccacttactatgtaaataactttcttttagttctctgatcctgttcaggtgatcctcttaaaagataatcagaacatgtcactcccctgttcagaaccagtccacccatccccaactccagtggcttcatattttaactccaaatcaaacttcttacaaggccctacatgactgccttacttttatctttctgagtttatttttccttgtttactcaactccatccacacaggcctcctttctgggctgtgaacatgccagacatactcttgtctcggggctttagtacttctgtttcatctgcttggaacattctttcttttgatattcccttaactggtcccctcacccttacttagctttttccaaagttactttagcagtgacagctttcctaacttctttatctaaatttttatctcctcctcttcaatactttatttctccctttcctgctttatgttttctccttagcatttaacattttctaatgtaatgaatatctccattaktttctttatttctgtctcagtcactggaatataagctctatatgggcaaggatttttgtctgttttgttcaccaccaaatgtccagcagtttcagcatttttatttaaattgtattgaattaaagacagaaacttgcttttgaatttcaaattctagtaaagagggccgtggttggtgctttgactactactgtttcacctannnnnnnnnnnnnnnnnnnntactgtttccctaggtggtcaaattgttttaaactaccagtaacccttcagcaaacttcattttataatttgtggggtttttaaaatcataataatttgggggattttaggttttcattttttaaaatgcttctaaaaacagtttatggtgattttgcaaacaaatttttataattattccagctggctaactgcaagatattcagatctgtgttttaaatgagcaatttaaaaatgtttttgccataaatgtggagtcagttraaaacaatttttaaaaaatgttaaygtttttcttcaagctttttatcacagtatgaacctacatttttttttcttttcttcagtgtactttctgatcggagctgtttaagagttacggctggtcccacctcactggatcttgatgttaatgttcagaggactctagacaacaacttagcaactgaagcttatgaaagaagaattaagcgccttgagcaagaaaaacttgaactcagtagaaaacttcaaggtaaatatattttaaatatattttcactttttgaattgtactcacagtgttatgagctgtttattataagtggttgttttatctttgaaaaaaattattttaagtggtgaaaaatcaagttgtagagatgtatgcagaacacagcataataccatttatgtaaaatcacacagttaatagtaaacaacaacaaaatagctttggtctcctgtgggtacatatttatgtttataaaaatgtgtgggaatacctttggggatggggaaatgggaccctcctcacttcgttatagcactttaatgacttttcctatattatttgctcaatctttaagagctctagctcctttcacactgtcattctctgcagcattgcttctgccatatttggtgattttaaaatgcacatacacataaactttttaagattctgagtgagtttcttgagtcttcaccttcagtgattgtttactccacctggtttcatccagtccatcctatggtaataagatatgtcttaagattacaatacctaaaactcttctttaatcgcagtttccagcaaatcttttataatctcctgctcataatttttagtgctctctctctgaccccttaactccagtatttcttcactgccaccgttacctacaagtctatcaccgtttaactctgctatttataccctcatttttcrttctctggtcagccatagtcataccctggcatataccttcaaatctattgttcctcwttctctttgtcaaatacctttggcagaaccccaactgtgtttgaatacaacyttgtatcttcaactatccagctgaagacagcttgcttaaaacacccacaacgtgctgactaatattaattcagattcacagacactcacctcaagtcagctcttcatgctatttcccctagtctatttccctatcctgtgttgtaaaatccagtgatgatttctgtcttcaccttttaacctatcagcaatatttgaccctatggaccttttattccttctgataacgctctctttttttttttttggcttctggggcactttatctcctggttttctttttcctcataaacctgtccttcccagtctcctttgctaagttttccttaactcttcgacctttgaatgttagaatattctctatttgaagcaagtctctaattgaatgaggccttcagtgaaggttttcctgaccatcctatttataatttaatcatatatatatccccagtactactgtctcctttttctgcttttttctctaaaataaaggatgtaacrtattttacttacatattttgtgaatgaaggaatgtatttatggacaaataatcaggaacttttgtaactaatcaragttttacaatcacaaaactttactgtcatacttttagaggcccagtagagaaaaaggctgtgtagacatcaatagaatggactattttctgtttttccgtaagttgttaagatctctgcatatgaattacttccctyttgtgactgaaatttttctgtttcttttttttcctgtggtgatacacatatagcaaagtgtgcaagcattctacttttaagtataagcctaataaatatttgtatatgtatacactgatgtaaccttcacccatattcatgtgtagaatwtgtccagcatagggtaaagtcctcacatgtcccttcccagtttgtaacctaccactatgaaataaacatcatcctaagttstttcaccattaatgaatttttaccggtttttgatcttcatataaatggtatcatacagtatrttctcttttgtgtatggcatctttcacttgttttttgaaattcacccatgttttgtatatatcagcagtttgctcttttttttttttgtactgctgtttagtatttcattgtatatcagcaataaaaaattacccagtctgttgttggtaaatatttgggttatttccagatgttgactactgtgagtaaagtwcgtgcaaatatacttatctatttatttyggtggtcctatgtactatttctctcagatatatacctgggagtacaatttctgggccatatagtagaggattttcagctttagaagatattttcaaagagttttctaaagtgactataccaatatatagttctactaataatgtatgagttctactgtcttcaactcctcaccagaacttatcgtccgcgtttttcacttgtagccattctggtagaagtatagtgatgtyctgccrtgattttaatttgcatttccctgatgaataatgaggttgaatatcttttcatgtatttactatccatttggatatctagtcttgtgaagttttggttcgaggttcttgcccatttttctattaggtctttatatatctttttcttaataatttgtatgttactacttcacaaacaacgtagaaacctttagacaactccttgtatgactgttgttacatagtttactttaatctgtgttataaatcttttaatacacttttactcsattgttgctttatgttttctttactcattaattttaagtatctttttatttacccatatatttacccktttggtgctttttatttctccctagtgatccatgtttctatctggaatcatttttctttagcctaaaaaacttcctttattgttttcttgtaatgtgaatgtgttgtgacaaattcttgataggattttgttgatctgaaaatgtctttatttttaccttcatttttgaagaatacttgtgctgggttagaattctagcttggcagctttttctttcagagctctactgtattatttcattgttttctataataacttccataatatttcttgagaagccagctgttaatcttaagctcttgaatgtaatgtgtatgttttcccttctggctgctttcagtattatgtccttaacttcaatttcaratagttggactgtgattcacgtacgtgtcgctttctttatgtgaacagaaaatcctggttgagattcattgagcttttgcaattttctttgatgtcttttatcagttttgcaaaattctaagccataatctctgtagatattattttgcctcatgcactttctcctctccttctgggactgtaattgtgtatatgttagatggtatctcacatttcctttatgctctgttctgttccttccgttctttctgttttttgtgtgcttcattaagatattttctattgatctgccttcaggttcactagttctggcttctgctttatccattttgctgttaagtccatctaattagtcttaatttcagatattgtcttttttagttaaggattattcatttgattctctcagtttcagttttctgttgaaatttccccatatttttatgtatttttttctctgttttctttaacattttaatattttgaggtccttatctgttactttcaacaactgaatcttytgcgagcctgcctttctgtttttttctttcatttgtcatgcttttctgcttttccaaatgtctcatgtgaaagatgtcatgaataaaaataacacagagaaggaagtttatattatttttgccccagagaggtttctcccttttcattccatcaagaattgagcttggacaagactaaattgctttttttttttttttttggagacagagtctcgctctgtcgcccaggctggagtgcagtggtgtgatctcggttcactgcaacctccgcctcccaggttcaagcaattctcctgcctcagcctcctgagtaactgggactacaggcacgtgccaccatgcctggctaattttttgtatttttagtagagacaaggtttcaccatgtaagccaggatagtctcgatctcctgacctcgtgatccgcccgtctcagcctccmtaagtgctgggattacaggcaagagccactgtgcctgcccctaaattgcatttttaattagactcaaccctacctttgatttcaaatgcccagaatcgggagctggatagagcctagttgggcctctttctccttcacttcctaaactatgggagatttrttctgttcttcagccttctgccctataccatttccaaatttggtgtcttgatgaagagactggccatgtatttgaagcagattctcttcctcaagcagctctttgtctctgaaataattctgtactatcggagatttctgtctgacttttcaaagctccctaacttcccatgcagcccccaagtacatcaattaaaatataccatgggaataaaagcaccatatgcttagggactttgagatttccaaattgttgcaccatccccacacatcctccagaagcttcagtggtttttctttccagcatgttatctctcaatttaaaggccaggcttgacctaagtacactcacagaaatggataaggcttccaggtaagaagcagttgtaatagcctcttcacctcagaatgcctcacttccctggctcactttcccaactccaactgaaaaagcaaagagaactaagtaaaataaaccaaagatgtttttaaaaataagattttctcaaattatgtattgaatttttactttctacggcaggagaaacaaagcagtgacctgttgcttcctagtccatscccttatgactaagaatttcctatgttttgggttttttttaaatgttttgaattctttaatttgttcttrgtatttttacatgtgtagtatcgtttgcacagagcaaagtgaacaaaaatgtaagatcattgccttttggtatgaatacttgtttcatagcagtgacatagattaacatttaaactgattcattcatttattagctrtttattgagtatcaaacagcccaggagctgtactgcccatgaccaggaatgtaataaaaagcagataaaggcaaaaatacctccccttgttatgtttgcattctgttttgaggagasagacaataaatcacatacaaagtagggtcatccactgagagttaggaargtagaggagatattagatatttgacaagaaaaagagaaaatgtgaaatggtcagtatggagacgaaaagagtaaatgagctagggaaatagtttaggatcgccagatatttccaagttatttaagttyagtaatcatgagttttaaatgactgtgtatttttttcagccattttcagctacttgggtaaaatcatacagtaggaggagagtagaaattatccaagatagagggccttctagaataagtacaatggaggagagaagggtaaagaaattgaaggtatttgcaaaacagtgatggaccaaagaatctaaccagggtaagtaagaaagtaaagaggaaaaaaatggaaaatgttaggaacacattgattggcatttctggttggaatgaaaaattgttgaagtggtccctagagtagtaagctgtacagatgagagagatgattttggaggccatgcagttattgataatgacaaagtgtatagttgaatttcttttttatttatttatttatttatttattcatttatttttttattgatcattcttgggtgtttctcgcagagggggattgggcagggtcataggacaatagtggagggaatgtcagcagataaacaagtgaacaaaggtctctggttttcctaggcagaggaccctgcggccttccgcagtgtttgtgtccctgggtacttaagattagggagtggtgatgactctcaacgagcatgctgccttcaagcatctgtttaacaaagcacatcttgcaccgcccttaatccatttaascctgagtggacacagcacatgtttcagagagcacagggttgggggtaaggtcacagatcaataggatcccaaggcagaagaatttttcttagtacagaacaaaatgaaaagtctcccatgtctacttctctctrcacagacacggcaaccatccgatttctcaatcttttccccacccttcccccctttctattccacaaaaccgccattgtcatcatggcccgttctcaatgagctgttgggtacacctcccagatggggtcgtggccgggcagaggggctcctcacttcccagtaggggcggccgggcagaagcgcccctcacctcccggatggggcagctggccaggcsgggggctgtccgcccccacctcctcccggactgggcggctggccgggcagaggggctcctcacttcccagtaggggcggccgggcagaggcgcccctcacctcccagacggggcagctggccgggcggggggctgacccccccacctccctcccagacggggcrgccggccaggcagaggrgttcctcarttcccagtaggggtggccgggcagaggtgcccctcgcctcccggacagggcggctggccgggcggggggctgacccccccacctccctcccggamggggcggctggcctggtggggggctgacccccacctccctcccggacggggtggctgccgggcggagatgctcctcacttcccagacggggtggctgccggacggcggggctcctcacttctcagacrgggcggctgccgggcggaggggctcctcacctctcagtcggggcggttgccaggcagagggtctcctyacttctcagacggggcggccgggcagagacgctcctcacctcccagacggggttgcggccgggcagaggcgctcctcacatcccagacggggcggcggggcagaggcgctctccacatcccagacgatgggcgggcgggcagagacgctcctcacttcctagatgggatggtggtggggaagaggcgctcctcacttcctagatgggatggcggccgggcagagacgatcctcactttccagactgggcagccaggcagaggggctcctcacatcccagacgatgggcggccaggcagagacgctcctcacttcccagacggggtggcrgccrggcagaggctgcaatctcggctctttgggaggccaaggcaggcggctgggaggtagatgttgtagcgagccgagatcacgccactgcactccagcctgggcaccattgagcactgagtgaacgagactccgtctgcaatccyggcacctcgggaggccgaggctggcggatcactcgcggttaggagctggagaccagcccggccaacacagcgaaaccccgtctccaccaaaaaaatacgaaaaccagtcaggtgtggcggcrcgcctgaggcactcggcaggctgaggcaggagaatcaggcagggaggttgcagtgagccgagatggyagcagtacwstccagctttggctcggcatcagagggagaccgtggaaagagagggagaggaagaccgtggggagagggagagggagagggagagggttgaatttcttaattggtgaaccacaagcatttggggtgaggtaattttttcacatgagagagagtttcacactctgagatattgaacattctgagtttccagatgttaaatgcttgtagcagtctcctcatgtgctgtgtcaacaactgactcccgttctcctgtccccttacataaggtgatggtaccacctgcagtagagaaccactagtttaggatgtggccagttaatctgatggttatgctggagagaagtctatcagctagattgttttgggctgcagatgtgagaattcttaaataatatggatttattttctcacttaagtcagaagtaaatggtttcagtgccaattttagggtagcttccctattaatttcttggctttccttacatgattccacaatattgtaagcctcaactttcagatgtaaactttggaaggtaagacctcccttcatacaccagattcagttcttcatatatcatctgacagacataccaggcatttcatttatcacacggtgatgttccctgctaggacaaaaaggagctaagtagattcattggcagagtacaccaagaattccatcttcatatctgcacatatccagagacccagaaagtggaaagattcatttagtttcatacatctttcatttaatgggagattaaaacctctccctgaagccccctagtggacttcttctcaaggtaccatttaagttctaactaggtcacatacctaattcttgaccaacacttgcaatgtagaatggaattattatgattaacttaaaccagccagttttgactgggcccaccttacatgtgcacactgtagcctgataattgaatttggttcacaagacagaagagatgaatagatgtcgggtaaaaacaagcagtatctgccgtaggggatttatgtgcctcagaagtcagtgttagatggattatctattttgatgttaaagttactaagaataataagaagagtagtaatggaaagaacagcagagaacaacatgtaaaatccttatttaaaaaagagtaagatagggaagacaagtggataaccacataagcaggaaatggtcatttcagtagacctaggaattttgaggaaagaggtggcaataatgagcgaggatgcctgccccaccttcatacctgtggtaggtggggtacaggaggaaaagtagctcctattaatgtccatttggtattctttggtcttttgtttgtttgtttktttttgagacagagtctcgatctatcacccaggctgggtgtagtggcatgatctcagctcaytgcaacctctgcctcccaggttcaagcgtttctyctgcctcagcctcccgagtagctggtattacaggcatgcaccaccatgcgtggctaatttttgtatttttagtagagacggggtttcaccatgttggccaggctgatctcaaactcccaacctcaggtgattcatctgccttggcctcccaaagcrctgggattacaggcatgagccaccgcacctacacctcccctgcattgggtatttttatgtctccccattttctacccccaatttagatgtcttaaaaaataaaaacaatggatgttcttttcaaaataataaatacggaaaggaccagtttttagtatgttttgaacccaaagagaaagaaatgtataagaaatacttataggatgcagaaaatcaacatcagatgcacaatctagtatatcttatacctttaattcaaattaacaaatatttattgactgccaaacatatagggattatggtttacacacacacacacgtacatatgcacacacaaagtaatcagtaatgatttgcactaactcataaagaattatggtaagggagagacttattatgtgagaatccctccataaatagcagaatacctattttagaacaaagggcaatttcatttctgatgtaaaatggtaaaaaatgttttctttgttccatgtcttttgatgatatctgggaataagcctcaatagagttattgtttttttaaaaccttgtattttytaattagaagtgcaagataaattaatattttctattttaactaaatattttagctaaattgttgarccatggttacctgtagctgggcctcaactttcagacataaaatttggaaggccagcatttctgcatatgtatattaacatgcctaacyctccatttgtaaaccagattcagttcttcgtatagcatctgactgacataccaggcttttgagttatcacatggtgatgttcctactaggagaaaaaggagctatgtagttgattcattggcagagtacgccaatagtatttaaaaccaaaaattattagaaggtggattcttttgtatatatatatatrtatatatatgcagtggattttttttttttttttttttgagawacagtctcactttgtctcccaggatggagtacagtgccatgatcaaggctcactaccacctcaacctccggggctcaagcaattctcccatctgagcctcctgagtagcgggacttcaggcatgtgccaccatgccctgccaatttttatatcttttgtagagaaagggtgtcattctgttgcccagtctggtctcatactcctgtactcaagtgatcctcccactttggcctcccaaagtgctgggattaccatgcctggtctgattttttatgacttaatttttgagtattcacatgctttttgtcagtgagtagatgttttgttctataaaattgtataagaatttctctccaaaaaaataatgttattagttttaagaatttagagtatggtgatatttttatttcttttatccttttttttaaagagtcaacacagactgtccaagctctgcagtattcaactgttgatggtccactaacagcaagcaaagatttagaaataaaaaacttaaaagaagaaattgaaaaactaagaaaacaagtaacaggtaaatatctgtgattcactgttaattcaatttaggaaatgtttaaaaaatggtttattcacacaaaaaacatctattgagaacctgtctgtgttatgtgatgtgagttgcatgctagtcagggaagggcaaataagaatgggttctgctctcaaggagttcacattttggtctgggaaacagataaacagttattgcaatacatatgaaaaggctatcaggaaaaataaatggaggtacgtggagagtacataggaggatcacctgacacagacttacgtgaacaaggatggcttttttggaaggcctattcattttggaatttgtctggcaaagcatatttgtgaggagaggaaaaggtgagttaggagtgaggaagaaggacactagagacaagcagagtgcatgtatacaggcatcaagaaaatttattttctktgttaatgcaattattttttcagtgtattactgagattaaaactaaatttgacaagtgttcgtatacctattattcatttattgcattttttcaataaatatattgagcacctactatgtagcaggtgttgttttaggctcttgggattcaacattaagcaaaacagactaaacaaaaattctttgctttggcctgggtaaaggacagaaaacagaaaccagtaaatatataactttgtaaatgatacaatatgttggaaggtaataagtgctttaaaaataagaatagaataaggagaattagtcagatgtgcaaaatgaggagttttatcattttaartatagtgctccaggggtaggcctgactgagaaggtgacatgttagcaaaaatttaaagaaggcaagggggttagccatacagttatctgcaaartatgtgttccaggcagaaggactagccggtgcaaaaactctaaaatcaaatgtgccccaggtgttcaagtaaaacagagagtactggatggctagagcagaatgagcaggcagggagaatggaaggaaatgagaactaaaggggtgaaatgggcttgttgcctgatcagtagagccttactgattgttgtaaggtctttggtttttactcagaatgaaatggcagtttttcgcagkgtttagaggcattacatgatctgaataagcagarggatagggagagagagcagaaggtactattttaacgagaatggtgaggcctctccagaaaggtagttttaggcaaaaataagtgaaagagaagaaataatctaatgtagcatcttttataaaaatgactatttaaaatgccatattaatactttgtttatattaaatatatggagatcttagttttgagcataatttatgaatgctattttgtgtttttaagaggctctcctcctaagaaatatctatatatctaatctstgttactttatctttccaaaagtaagttwttgtagattgggaacatgataagtgaatcatggagtttgctttggtaccaacaataacattaagagtgccactgaatgtctgtgttagagttgtatgacactaaaaaagcagtagaacagaagaccagctagaatggtcagtgattcgtcttcagagaagcgatatcgatttggaaaacttattcataagcatatctctcctctttttaatagtagaatgtggctttgaatggcagtagcttttgaaagcttgctaattaattttaaaactgccttgaaatagatggtattgatgtaaaatattcaaatcaacaatctagttgttatgtcattcactaaaatagttgtgagcttctttgttagctctatgtaagagctgaatttttaaatattaaaacgttttgctgtcattcacaataatgttctggcactatccaaaggaaacctttgttgatgtctaacccagtatatatagaataataataagtaatttcattttctgagcaattccaaatggtatcgtatttttaattttattgttcatgtgtttattgtaatatatagaaatatagttgatttttatatgtttattttgtattctatagtgttgctgaactcacttattagttctaggagggtttttaaaaaatagattctttgggatttttaattctgacaatcatgtcacctgcaggtgggaacagttttatttctccctttctgatctatatgctttttgtttccttttcttgccttattgcaagaacttgcagcactgtgttaaaagaagaatgatgagaagaacattctagcttcttaatcttggggaaaagcattcattttcctctgtttctgtacttctaagggtttttaaaatcattaatgggtgctgaattttgtcagattctttttctgtatcaattgatatgaacatacgattttcaaaaaataacctgttaatatggtgaattacattggttgattttaaagtattgaaccagccatacatccctgttgtaaaccatggtcatggtgtacaattatttttatatattgctgaattccattcctaatatatttttaaggatttttgcatctatatacatgaaggatattagtctttagttttccttttttttcttctttttccttycttwccttccttccttccttccttccttccttccttccttccttccttccttccttcctttcttgtactgcctgttttctctgtcaacgtagctggtggctcctgtcaccagcagccaccagaggcctgaacaaaagagtaccagcaggggatccacctgcatgcatcctttctgaagcaaccttgcagtcaggagtcagattgctggtacagtgtcaatgacaacctcgatgtgaacatttaagagtttttagtacttaccttgtggcacgtggcacccctggaggccacacacctggaggtcagggagtgcaggcagacagagaactttgagcaggagagcatggcaactagcagtatatattagggaatagggtgtaggtcactttaagtttgtaagccagtgcttgaatggtccccttagaggaggcagctggaaggcaggatcccagtctgctaggtgggagagatgtctcctgcttgagccccttgggtgtggtgtagaactggaaactgcatcaagagtgactaaaccctgcctctgaaacaagaaagctaaacctgcattcaaagtggatgctgaggcaacataaaattattataaaattatacatttattataaatttatgatttattttaaagtaaaattaaatatgctgtaaatttgtaaatacagttgatccttgagcaacatggatttgaactgtgtggatccacttatatgcagatttttttcccaaccaaatagagattgaaaatacagtwtgctttggatccgaaacccaacccaggttggaggtagaagtccaggttccccgtgtggtttctactgacaatgtgtgaggagaggcttgttgtcagcyagtgagggttaatgtcctgtctttttctgacatcactcttttttttttttttttttyaatttgkagacagagtctcactctgttccccaggctggagtrcagtgacgcgatctcagctcactgcaactaccatctcccaggttcaagcaattcttgtgcctcatcctcctgagtagctgggaccacacccagctaattttttgtatttttagtagagacggggtctcgctgtgttgcctgggctggtctcaaactcctgtcctcaagtgattcgccctcctcagctttccaaagtgctgggatttttgggatgagtaaccacacccagcatttttctgacaccactcttgcagatgtgtttgagcatctcattatagcctcatgaggttggaaatctagctccccctgcacttgtccattgttgacattggtgacatggggccagttttttttttttctgtgatgtttatctcaagtagaattgttactttctrtgagttgtctgtctttctggtctacccctttcctaatcctttggctagaaagagcaggcttttgttggggctttttctctttacagctgttgtcatttatgggttaccatcttctttagttctaattctgggatatatgaaccaagaagaaaccccagaaaactcaccgttatgttgtttatcaggtcccagtgtcctgaggaagtttttttcttcacatttyggagtcgtcttatgtttgttttatgtataatgtctyagggttttaagttatacttaaaatgggaagaatggraaatatatctattccttcttcccagaacttgaagtctccagagtaagcttttaaagtataagtctgttgaggtcacagcttcaacatacctatcttcagtggatcctcattgcctccaggataaagtagaaatttctcaattctaatacaaggcccttcattattatgcatgtatttgcctctcgagctttgtctcttgttactacttccttgcccagtgattccagccatgctgaatcacccagtgatgctccacttccttcacatactgtttttttcctaccctttctttctttccttccctttttttaaaaaaatacaaattgaagtctccccttaggacctgcctgatgagtagccccaactttaatttggctctgaagaaaaaaatatatataccttcaaagaaaaaatatatacctccaaagaaaaatacatacytctgaataatatatacctctgaagaaaaaaaatatacctccaaagaaaaaataccttcaatctgtcattcctccagatacttcttgagcaaagtctttgtgtatacaaatacccaccatyaatgactgtttctcttgtgtttcccagcagcagtgttctccaatatttttaagtttctggaaaaaaatgcgacagttttataattattgacaacttctttttaatatttgcttctttaccatactctgagcttctaaaggttaggggtaggttatagtaggttttcccactatattcctagtgccaagcttattgccagtattgtataactgacactatatatatatttgttgagtatctgcagacaaaaataaaatttttttaaataaaaaaktcatacctcrtttaatatttttgtatgagaaaatagaatttttttgtytcctaaatgaaaaatttattataatctataatgtacttctgagactctcgttcttatgttgccttgaggttggggatatgtgcctctgtgtactgtttctgtttctccaaccccaaactaacacacacacactctctctctctctcccctccctacctcctgtgaataggggcattgataataaaggagcctatttttactgattataattagaaataaagtttcttcgcatctcagaagagttacataatgggaaaaatgaaactatccatcttgtggatcagggagatgttttggttattctgccaacctcccactgggtctagtcttaactcctttccagtttatagtgttccactttgaatactgctttaatcatrcccattttttgacctcaattcctatagcacatacagcctgccacacaatttgcatttgattttctactttattatttttttaaagagtgttgctgttgtctaacttacctccttcaagacagattccatgttttatatttctcttccatgccatacagtgccaagaaaataaccccatatgtatgatgccttcattaagtcctcattactaacaagttgaattttatagtcctaaatagcaccygtgagctaagaaccatttagttggtatcarctaacccagtttcgtagtactgttttttcttttgagacagagtctcattctgtcacccaggctggagtgcagcgatgcaatcttggctcactgcagcctccgcctcctaggttcaagtgattctcccgcctcagcccttctcgagtagctgagtttataggtgtgcgccacacctggctaattgttgtaatactagtagagatggggtttcaccatgttagccgggctggtcttgaacccctggcctaaggtgatctgccagcctcggcctcccaaagtgctaggattacaggcatgaaccatggtgcccggcctagtacagctttttctatttgttcactataattagtttttaacaactttatctaaatgtcatggctaattgtgttggrtatttataatagtctctggatttctttcagaattatagccatatttgctatttgttgtagtgaaagtwaaggctctgctgccttactcattttatagtatttgaccaaagttcagagcattctggatttttcgtgatatggggttttcatcttttgggaatgcaacattctgtgttttccaaattacaagtgctgtgtttctctccataatggaggattttattaaatattaggggaggggttatcttttccaacacttcttaatctagtacattattttttacttctcataattcacatactgttgtttaaatgaatgttttgagcttttttcacwtttgaaaagtgactgaagtataaaacagggaaatttgacatatattctctaacaactccattgcaaagcagccagaatgaaatggctgtggtgagaactraaattaacaytatattgaaacaaatcagtaaaaatatccttaaagcttttagaagctatcccctgtgatatcatctgttayaaactttatatggtagagaaattttatgaaatactgaattttttgtttctcagagctgttgaaataagtcagtaacaataatttctgaaaaaacaacatgttagagaagaacacttcagaagtagaagaaagaaagtgtgctcagaatggattactaaatgtacyatattgctactctaaattgattttccttaaccataagattagattaaaatgaaccaggaagtgacagaagtcagctgccttacaggctacatttttactcttaattatgagaaataacaaaagtaaattaatatttactttagaaattgttgaaatccgggcaaggggcagtrgctcatgccygtaatcccagcactttgggaggctgaggcgggsggatcacctgaggtcaggagtttgagaccagcctggtcaacatggtgaaaccccatctctactaaaaatacaagaattagccagacgtggtggcgagtgtctgtaatcccagctgctcgggaggctgaggcaggagaattgcttgaacctggaaggcggaggttgcagtgagccgatatcacaccatarctctccagcctgggtgatagagcaagactccgtctccaaaaaaaaaaaaaagaaaaaaaagaaattgttggtatcctaaaaatgttaaaaacttaaactagaaaatatttaaatgtgtttgaaagaaattgatttaaatagaaatattcccatatgaaatgccaaaatttgataaagtgataaaatacagttttctgaatataagactaaacaccatgattaagattaaacaccctatgatttttagttttcttcacataagcattcattaattgatactgttcagatactatgaaaaccagttaatacaactttacatcttcaaaagttaactatgctattaataactatactttcaaagtaggttttaaatctatcaatttattgcactgatatcagttatttatggaatgtagaactatacaatgcatgatacactaatacatttaagtaatttttagactccaggattcatctacacaagtgaattgctcttcccaataggactaacatattaacactgcttcatttattgaaagcatcagtctcaacaatatacaacactttgtgcactggttcccacacattaatktacaaatgaatgacttgaggatactgtatagattctgcttcattaggtcttgaytggggcttgagattctccatatctaagttcctaggggatgctcatgtcacttgtctggggatgktacttagagcagagatccccaattctcgggygacaaactggtaccagcagactgggccgcacagcaggaggtgaatggcaggtgagtgagcattagcgcctgagctccacctcctgtcagatcagcggtggcattagattctcatgggaccgtgaaccctattgtgaactgctcatgcgagggatctaggttgcatgcctcttaygagaatctgactaatgcctgatgatctgaggtagaacagtttcatcccgaaaccatctccyggactcctgggctgtggaaaaattgtcttccacaaaactggtccctggtgccaaaaaggttgggtattgctgacttagagtaataatgtgtaaagaacagaaaatatccagagcagaaccgataatgagtgttgtttagatttctctgtatcactgacttcarttctttactagtttacttttgataccaggaacatttcctatcaatttattacattttgaggcataggttaaaatcartaatgttgtttcttaaaagcccctcttatctgagaatgttaaacattatttaataacattatcttgtaaggtggaaaagtcagtgcaagatttcctgggctctagtcttagctctgatacacattttgcaatgtgactgtaggcaaattattcaactccctgagtttcttcatctgaaaaataggagaattgatttagatcaggagtttttcagatatttgctctttagaaatcagagtttattcttcagataaatagtggtgaaactagactgagtgatttggaaccaccctgttagaatcaaaaccgtcttacacggtaatttgactaacatcagcactaggatgcttaccaacactgcagtaaaacttgccctttttttggttggttttattgttgcttgttagttttaaatttttaatttttccgaaggtgctgtttttggaagcatgctttttttttttttcctaatgagtatgtaaggcattgttgcacatcttcacactggcatacaccattcaccgtctttacagtgaactgataatgcatttaatttgtcaagagtcatactggtatacactgtcagatctaacactaaattgaaaataccaattttaaaaaaaattttagttgttttaccttaggttcaatcatttgcttttatacaaatagtaaaagaaacattgtcttttgtttttagaatcaagtcatttggaacagcaacttgaagaagctaatgctgtgaggcaagaactagatgatgcttttagacaaatcaaggcttatgaaaaacaaatcaaaacgttacaacaagaaagagaagatctaaataaggtaaaatatgtgactagatcattaaagctttttctctattttgaatcttrtataataagaatactgaaagcattcataatgaattacaataatacatagtatattttatcttcttaaaagttggtctaaaaatttaggattattttggtgtatgttatttggttagtagctagaaattaagaaactttgttgaagcttgaaagttcagaatcttttgttcttttagaaagttaatagtcaaaggactagattaaaagaatgttattgaaaaagaaacatgaagaaataagaaaatagtagaaactgtttagcatctatagaaaaaatttaaaatacaggcatattttcattataacttactgatatgaacattcttaaaatattataatttaaaatttatttggtgatttgttttaaatgtcagtttttatctttcaaagcagcaggggtaaataagctaaagttattttcataagaactttgtgaaacatttaaacattattttaaacatcaaaaaaatttattgatagctaagcctctgtaacacagcccaatagggtaaataatattcaagcactagagaaaacacttttcttgaaccacatgctgctaagcaccgtgactttcattaacaaatagaaaaatgttgggactaatactagccattgcaaacaagaaatcagtagtttgtggcatagcataagttgtattcaatgatgtaatatattaatataatgcactgataatatagaatgaatgaagtcctcctggggaagatttgaaagtcttggtgccaggaaggagatggagggaattaaaaataaaacaaataacctttagctgatgaaactaatcaaaaggactaaaagagaacgctattaaagaatagattgaaatagaccagtacatttttactttctgcttaatgmggtttcaagcaatttttttrtataggtccatttaaattcattgccaatttaataatatttgtcatttaaaactgttagtgttctattygctttaataatattatagtaatattaatggtttaccatttttattggtaggattactcagccaaatttagttaacataatcggcgttatgcttcctgctttctactcttctgagcgatttccttggaaatctaaagagaaggatcttggattctttctctaaccctttggaaagaggatgaaaatcagatagctagatttatagtgacaggtggtcaccaatttttaatgttttagtattaaaaatcctttttatatattttgagaagatgatagtgctgacgaaaagaaacagattataccaataaaggactttgagtgatttgcttaatatcctataggcagtagaaaatgatttttctccacattccttgccaacacttgttatcctttgtcttttaaaaaaaatagccattccaatagatgtgaagtgacagctcrttatggttttgatgtttacttctcttatgactagtgatgttgaatactttttcatatacctattggccatttgtatgtcgtcttagagaaatgtccactgaggtcctttgcccattttttgattgagttagcaaatattctgatttyttataatgccaaactgttttctagcataccaacttccatttccacgagtagtgtagagtttctgtgttcatatttccagatttattacttttggccaatctagtctaaattgagattttaggttttagaaaatgtttggttgtggtcttaatttgcatttctctaattagtaatgaggtcaagtatcttcacatgggtctattgtcgtttacatttcttttgtgaaatgcttcttaatatcttttgtatatttttctgttgggtttttttcttactggttataagaattcttggaaatatttgggcattctaatcttttgtgagttatatgtgttacaaatatctctcagtggcttatctttttgcttttaggaatctttttattaaaaagtgttcttaggtttgttgtggccagatttatcaatatttttatggttagtgtatttgctgtcttgtataaaaaatctgagattttaaaaaattctcctaaatttttatcttaaagttttaaatttttaggtctgtatctcaactattttttgaaaactgtgaagatggaattttgattaaaactgcatttaatcagctgggcatggtgacttatgcttgtaatcctggcacttttgagaggctgaggcaggaggatcacttgagtccaggagtttgagaccagcctaggcaacaacagaatgagacccagtctctacaaaaaataaaaaagttagctgggtggtgcacacctgtcatcccagctgctcaggatgctgaggcaggaggttcacttgagcctggtagattgaggctgcagtgagccatgatcatgtcactgcactccagcctgatcaacagagcaagaccctatctcagggggaaaaaaatgcactgaatttataggtcaayttagggagaattaacatcattacaatattrtctttaagttcttactatctatatttattactatttttctgaatatacacacagatttccagaatagaacggattgttattacttacatacagcaaagaataactacrtggctcccttctgtgccaagtcttrccccaagagaaataccctgagagctggcaggataaaaccctacacataaggagtctgtgttgtaaatgaggagccttgaaaacatttatgcaggtgcttatatagaggaaagaagcaactgcttcctgctttctcctgttctgagagagttccttggaaatctaaagagaaggatcttgggttctttctctaaccctttggaatatagataaatattccctctggaaatataagcccagagtctcctgctccatcaaaggaagcccccttggtccaggctcctactctctcccacccyaccttgaaatgtaaacacataacctccagaaggtaaatctcttagttttctcactactaaatcagttataagttactttttaagactttcatttagcccaggtttcggtaaaatttgttcaaaagggaccagctgcaaaaacataaaagtttctctgcattcctaaagtctttttatttgtaaacatgatatctctccatatatttaaagttcttttaaaatgttcttccataaaatttcatacagaaragactttcatttcttttcttgttttactgtattagctagaacctcagtacagtgttgactagaaatgataatagcaggcatccccatcttgttccccgattttaaagaaaytgcctctgatatttcatcgctaataatgtttgctgtaagtttttaataaataatttttatcaggttaaagaagttaccttctattcctattttgttaataccttttatttagaatggrtactgactttattaaatgtgcccttctgtgctctattgatatgattatatgattcttgtcctttaataagttggtgtggtgaactacgtttgtagactttttctaatattaagccactgttatatttctgggttaagcccaaatttcttataatactgtgatagtatagataacatttatgtagcaaatatctgttctaatagcactgttgtgaatgctttacatatattaaattatttaatctccatcacagccccatgagttaggtgttattctcattttatgaatggtgagaccaagcacagagaagttagttcacttgctcaaggtcatagaaatagaaagtggtggagctagattttcagcacaaggagtttagctccagacttcatgcatatctactttatatatcactggaactgatttactaattttcaaaaagggttttcactgttttttataagtgagattgacgtgtttttttttttcctcttttcttttttttgatattcagattatactggtccatagaaagagttgaattgcattcctgctttttctcacggaccaatgagttatttataagtatcttttaaaattttcaatatatggagttttatctttttttgttgacttctaatttagttgcagtgtcattacagaacttgctctacgtggtatctgttctttgaaatctactgagacttgcttcatggcgtagcctgttccatttttaaaacattcaatgtgtgttcttgaaaatagttcgtgttccaatttagagagcaagcttctgtgtatgaagcttttcagatcgtctttatattcactatttttttttttttgcctacctggtttatctattaatgactaagaaattaaaatttttcattatagtgatgtttaccaatttttctctgaagttctaacagtttctttttaatgattttgagactctcttatagaaggcacaaaagtttaggataatatttcttcttagtgtattgaattttatcattatgtagtgatattccttatccttagtaatactttttctactgaagtcaagatttcatttcttaatccagtataatagatggcctttaactggttactaatgtatatggatgtgtttctactatcttttttyctgtttgtcatgatttttgcatgctgctttttatttcctttcttcccttctcaaaagtttttaactgtggtaaaatacrtataacataaaattaccatctaaacaattttcaagtgcacagttaagtaatgttaagtgtatttacattcttgtgcagcagtctccagaactctttttgtttgcaaaatcatttcttcttcactgaaatttgttgttgttgttgttgacattttagtttactctctagtcttttggtggttactcttggcttctaccatgtgtattaaccaagtttaagtttaagttaaatatcctaaaactatttcccacaaacaatttaaagacgtttaattttacagattgagtatcccttatctgaaatgcttgggaccagcatttggattttggaatatttgcattataccaattgagtatttctaacctgaaaatccaaaatctgaaatgctccagtgagcatttcctttgaacatcatgttggcactcaaaatgttttggattttgaaacatttcagatttcaaattttttggattattcaagctgtattacctctttacagctttatgtgttgttattggccagtattttagctgttatcttttgtttactgtacaaagttaacatttttatagtataatcttatatacacatttgtttacattcacattcatgttaaccattttattagctcttcatttctcttgcattagatctctaaaatctttttttttttttttcctgaaataaagctttactggttcctttagtgcagatctgattatggtaagctctgtcagttttgtttatatgaagcctcagacttgaaaagtaatttttggggtatataattttaattatcttctcatatctttgaaaatattttaccctgtttctgttgctgttgttacttcttcagtgtctgttcttagtctaattttcctcctccccgccttatttgaggatggggaataggtgatttgtctttctttccctctgatttctttacggtcttttatttctctttggtattacccagcgtcattttttgaacacttctggtttgggttttctaaattttttcttgattcataaatgtagagcttcctgtggtgatggatgcatgtctttaattttaacatttatattttttcacttcttttcttttctttttttttgagttggagtctcactgtattgcccaagctagagtgcaatggagtgatctcagctccctgcagcctcagcctcccaggctcaagtcatcttcccaccttagtagctacgactataggtgcataccaccatacctggcctttttttttttttttacattgttattttttgtagagataaggtctcacaatgtcgcctaggctgatcttgaactccttggctcaagcaatcctcctgcctcagcctcccaaagtgctgggattatagatgagagcaactgtgcctggccttatgttttctatttctaaatgttccatacagttcttctataaatctgcttggtcatttttaatagccttttgtcatttttttgtttttattatttcatcctttattccttgaaatatttcatatgtagcaattttgtgttgatatctaatgattttaataccaagatacctttgatgtttatttttattgtttttgttgtttgattgtggtgctttgttctttgagtattttggaatctgtggttgtgagctcattcttgtttgttcttaatatgtgaaaaattcagatttcattgcacttctttcccccaaagaaaatttgcatttccttttgctgggaggcaggtagtggtactgccctgagtccactttagctctcctctaagtttctcattttaattagggagtctccggtttagtttctatctccttgcttctggcttgaggcgtagcctccatgtcaagggcaacacttgttttttatgaaaacaacctcacacatatttattaaatttcacaaatatttattttgaccatcatatcgtttattcctaaactttttcctcatttgtggaaactaaggtactataaggttaaatcagcagctcctgtgcatttactgtattagcataaggaattgagactatatcaggacaccatgccgttaatatctgttcagaagtagtttatttcttttaatttgtcctaaggtgaataattttggctcttcttgacttaatgatagctattctgatggccaaatttggtctctaggttgcagaattggtaacttatattctttttacaaaactgtaggaactagtccaggctagtgagcgattaaaaaaccaatccaaagagctgaaagacgcacactgtcagaggaaactggccatgcaggaattcatggagatcaatgagcggctaacagaattgcacacccaaaaacagaaacttgctcgccatgtccgagataaggaagaagaggtggacctggtgatgcaaaaagttgaaagcttaaggcaagaactgcgcagaacagaaagagccaaaaaagaggttagtagtcaggcaaattttgtagtgcccatgggatagtgattaaagctgctttttgagactagtaatataatatataatttttaaaatatttytaaagttatttttatagttcattaatattatttaatatggatttaaacatttgaattatcttcctgttacaaggtaaattctcattgggataaatgttttgtttggaaaaaaattataaccgtgaaatctgcatttttcattctgttttaaagctggaagttcatacagaagctctagctgctgaagcatctaaagacaggaagctacgtgaacagagtgagcactattctaagcaactggaaaatgaattggagggactgaaggtatcttttgacttcacatttatgaagcttaattrattttcttctctttaggcttgttaggagtgttagcttgtatactgtattcggtgtgcagtgaaaactagcctttcttcaaacctactattcataattctcgttcttaccagtaggaagctaatacagatttcttaattatgctgaagaaaatggaggactatgtttagtgggaaatatgaatctatcaggagggagttagaatgtttatgcagacctacacaagatgtactggtaatctgcatgggagtcatggttagatatccagaccctctatatatctcataaatgactcaggagaagctcaggggtagctttgcagacacttgtgtctgttaggataagatgataatgggcatagtctaaaacatctcagcagaaggtgctttgcaagggaaattcttgagccgttctggagttagactacctattcttaacttcttgctttcaccagttacttgctgtgtaacatgtaacattggacagaacattatggggccgggcacagtggctcacgcctgtaatcccaacactttgggaggccgggatgggcagatcacttgaggtcaggagttcgagaccagcctgaccaacatggcgaaaccccatctctactaaaaatacaaaattagccaggcatggtgcgcacgcctgtaatcccagctactgaggaggctgaggcaggagaattgcttgaacccgggaggtggaggttgcagtgagcctagatcgcactattgcactccagcctgggcaagagcgaaactccgtcttaaacaaaacaaaacaacatttaacctcattatactttaattttctcctctataaaactatttcatgtcacgagtacatacatacatttgtaagctgacacattataagtgttcagtaactgttagtataatagwattatgtatattacagtgagtgaattaagatcaaattgacgtgatatttttaccatactaagtaatagtctgartgtggtatctgccttttatcttttttgactggaaactttttccatcctgttttctctgctatatctgtcagcccccatttcacctacttcttttaggaccatgcttagtctagtgtctaattatccataacatgtaagaatcatactccttaaaatctacatactcctgtactgcttcttggaattctgttaatacctgtagcttagctcttattgtaattatttatttgcaaatctgtatatttccaactaaactgtgacctagcttattgaaaacacagacagttatattgttaatttggccctggcaaaggaccagatattgaatacttgtttaataaacctgttaagttaatgaatgaatcatgtggtagaattggtcagagcttactttgtctgacaattgaatttcagtggttgcaagtcaaattcctttgctgtaartagaaatataaactcttgattttattcttgtttttgttttgggagttttagttcatcatgaattcatagtcctggttagctttacgaagtagagatgtgtcttctatatacctctagagcaggattagtatgtagaagtaattacatcaccatcccagatacttttcagtcagggcctgctttgtttccagcactattctgggtgctttggatgataagaataataaagtacaaactggaagaaatcttaggcattatttttatttgagaaaattgagggtcagaagagttaaatattttagagtcataagtgatagagtacaatgtaaacccaggttttctaactttcattcacatgatttatctaatggtttgctttttattttttyctacaataaacattacttcattggagactctgtatcatgtttacctacttgccaaacacatctctgtgtcatttagaaatttgagataatataacacctacctagtaaataagttaatgcatttaacatgtatagaccagaacctggcatgtagtaaagggttaaaacatattttggcccttttaaagattgtaggaatcttcacttcattgagaatacttttgacagacttaaagagagaaatagccctacaaaaagagttaaggacttcaatatctcacttctaataatggatagaacatatgcacacaagatcaataaggatattgaggttgtgaacaccactataaccaactagacctaacagatacagagtcagcccttcatatccatgagttctgcattcgtggattcaaccaaccatggatcaaaaatatttggaggaagaaaattagatgggtgcatttgtaccgaacrtgtacagatgatttttcttgtcattgttccaaatgtaaaacctacttatatagcatttayatcacattaggtattgtaagtagagatcgtgacgttttgatcagccacagactgcatatacaacaatggtccyttaagagtataayggagttggaaaaattcctatcatctagtaacgtcttgatgatcttgaccctgtgtaaaccctatattaatgtgtgtgtttgtgtcttaatttttaacaaaaatgtttcaaaagtaaaacaaataaaaattttacaaatagaaaaaagcttatagaaaatggatataaagaaagatagccaggtgcggtggctcacacctgtaatcccagcactttgggaggctgaggtaggtggatcactggaggccaggagtttgagaccagcctggccaacatagtgaaaccccgtctctactaaaaatacaaaaattagctgaacgtggtggcgcatgcctgtaatcccagctactctggtggctgaggcacgagaatcgcctgracctgggaggcagagattgcagtaagctgagattgagtcactgcactccagyctgggtgacagagtgagactctgtctcaaaaaaaaagatacatttttgtacatctgtacaatgtgtttgtattttaagtgttactacagaagagttcagaaagttttaaaatagtaaatagcttataaaggtatagtaagccaagttttttattggataagtaaaattttaaaaatagtgtagcctaagtataaagtgtttatctatcaggtctccagtagtgtacagtaatgtcctaggccttcatgttcactcaccagtcactaactcatccaggccaatttccagtcctgttaagttccattcataatgctctatatgacataccattttttattttttataccttacttttataccatatttatatgcgacataccttttttatcttttatatgatgtttttactgtatcttttctatatttagagacacaagtgtttactgttgtgttacagttccctgcagtattcaggacagtaccatacygtacaggtttgtaacctgggagcaataggctataccmtatagcctaggtgtgtagtaggctgtaccatctaggtttgtggaagtacaacttatgttcacacaaggacaaaatcacctaatgagatgcatttctcagaatatatccctgtcgtttagcaatatgtgactgtaatctagaggtgatttaaagtatatgggaggatgtgtgtaggttgtatgcaaacactgtaccattgtatatatgagacttgagcrtccgtggattttaggtattcaagtagggtcctggaatcagtgccctatggatactgagagacaaccatrtatagaacttttcacccaacaacagcaaaatatacattcttttaaagtacacatggcagattctccaggatagaccacatgttaggccaaaaaacattttagtaaatggaagaagattgaagtcgtatgaggtatcatctccaaccacaatggaatggagctagaaatcaattacagggaaaaaaaaaacctggaatgctcaaaaatatgtggaaatyaatgaacacactcttaagcaaccataggtcaaagaataaatcaccagggaaattagaaaatacgtgaatgaaaatgaaaatacaatacaccagaacttacagatgccataaaggcagtgctcaagagagaaatttgtaactataaatgcctgtattaaaaggaaggactaaaagggaagaaagtaaaaatcactaacctaactttatatcttaaggtactagaaaaagaagagcaaactgaatccaaagatagcagaaggaatgaaataataaagagtagagcacagctaaataaaataaagactagaaaataatagaatcaataaaacaaaaagttagttggttagaagtcaacaaaattgacarcctttaattagactgaccccttcccaataaaaagagctaaagagagagagatgttgcaaataactaaaatcagaagtataagggaaaattttattactgaccaacagaaaacaaaagaattataagaggaacaactgtatgccmacagagtagataacctagatgaaatggacaaattcttagaaggatacaaataacccagtatgactcatggcaaaatagaaaatctctgcagacctataacaagtaaagacattgaatcagtaatcaaaaaccttctgacagaccctcctgcactccacaaccccactccagcggcttgttaaaaaaagacaggccaccttctaacaaagaaaagtccaagaccacaccacttcactgctgaattgaaccaaacacttaaagaaaaattaacagcaatccttcccaaactcttttttgagaaggcacctgtcgtcccagctactctgggggctgaggcaggaggatcacctgagacttcrgaggtcgagacttcagtgagccatgattgggccactgcattccagcctgggtgacagagtgagaccctgtctcaaaaggaaaggtacttgagacttgagcttaaaataaattcacccaagttccaggctgcaagatcaacacatagcaatcagttgtgtttctataaggcagcaygaacagtctgcaaagaatgttaagaaagcaattccacttaacaattgcatctaaaggaataaaatcccttgggacacatttatccaactaaaaatgacaaaacattgctgaaaggaattaaagaaaatctaaataaatggaaagacatctcatgtttatgaatagtgggatttaatattgttaagatgcagtactactacctaaagttatgtacagcttcaattcagtccctatcaaaattcaaagtcttttttgcagaaataaaaagctgatcctcaaattcatatggaattgcaaaggacctggacagccaaaacaatcataaaaaaaggacaaagttggaggagtcatacttcagaacttactacaaagttacagtaatcaaaacaatgtggtactgtcataaggatagacatacagaccaataaaatataattaagaatacagaaataaatgcatgtatctatggycaattaatttttgacaaatgtactaagtccattcaatggggaaagaatrgtttctacagatgttttgggacaactgaatattaacctacaaaagaatgaaattggtcacctgcatcacaccagttatacaaattaactcaaattggatcagcaactgaaatcttacagctacaactataaaactcaagagaccttggatttgataatggattcttagaaataatactgaaagaagaattaacaccaatccttctcaaactctttttaaaatagaagaggaggaaacacttcctaactgattctgtgaagctggcattaccctgaataccagagccagacaaaaaaatcacaaaattacagaccaacgtttcttattaatatagatgcataaataacaaaaaaagtataaattgggctttatcaaaattaaaacttaatgtgtatggtatcaaaggacattattaagaaagtaaaaagacagcttaagggatgcaagaaaatatttgcaaatcatatatgtgataacaatttaatatccagattrtatgaagaactacagctcaacaacagaaagacaactcaatcaaaaaatgggcaaaagacttgaatagacatttctccagagaagatatatataaatggtcaataagcaaattaaaaaatgctcaacattactaatcactaggagaattcaaattaaaaccaaaatgagataccacttcatatgtactgggatagctaaaattaaaaagaaagaaaaagaaagtaggtcttaacaagaaggtagagaattggaacccttatatgttgctaaagaaagtataaaataatgtagccacttttgaaacaatgtggtggttcctcaaaaagtcaaacagaactaccacatgatccagccattccactcctaggtatatacccaaaatatttgaacataggaactctaatagatgctttacacaagtgtttattgaagtattattgcagtagccaaaaggtggaaacaatccaagtgttcatcaacagatggataaagaaaatgtggtatataaatacaatggagtatcatttatctatgaaaaggaatgaagtcatgatacatgctacaacatggctraatctcgaaaacgtactaagtaaaagaagccagacacaacaggacaaatactatatgattccacttatatgaaataatttagaataggcaaattcaggcccgatgcagtggctcatgactgtaatcccagcactttgggaggccgaagcaggaggattacttgagcccaggagttcaaaaccagcctgggcaacagagtgagaccccatctctacagaaaattaagaaattagctgggcayggtggtagatgcctgtagtcccagctactcaggaggctgaggtgggaagattgcttgaggtcgaggctgcagtgagtcatgattgtgccagtgtactccagcctggacaacagagtgagaccctgtctcaaaaaaaaaaaaaaaaaaaaaagagaataggcaaattcacagatacaaagtagaatagaggttaccagggtttgggtggagtggggaacagggagttaattcttaatggttacagaattttttgttggaatgatgaaaaaattttggaaatagatactggtgatatttatatagcattgcaaatgtaattaatgccattgaattgtgcatgtagaatggttaaaatggaaaattttgttgtatgttgttttaccacttaaaaactattaatgcagtataacaagataattgaattttacacttttaaatgagtgatttgtatgatatgtgaatcacatttcaataaaaaaaatttttaaagaaaacttttaagttgttatatatgatgctgtgatgttactagaggtatttttttttccctattgtgttagtttgttggggatgctgttgtgaagtaccacacactgggtggcttaaaacacagaactgtctcagttctggaggctagaagttcaaaatcaagatattggtatggttggcttctggtggcatgcygacagtctttggtattgcttggcttgtaagatacatcaccctgatctctgctttcatgttcacatggagttctccctgtgtgtctgtgtccagatttctccttttataaggacgcagtcttaatgaattaggggtgtgccttaccgttttgattcgatttacctcttaaaaccatattttaaaataaggttacattctgaagtactggtggttagggcttcaacataggaatttgarggtaatacagttcaacccatacacttacawttttcacttaatagtgtaataagcatttttactttcattaccaaattgtcacaaacataattttaatgattttaagtagytcaagaagaattttcacatacctagttatttctatttgttattacaaaattatcacaaacataattttagtgattataaataattcaagaagactatccgcataaccaattttctattgttacctttaaaaattctttgcagtattataattgccaaaaacacctttatgcactgctttttctgtrtcattttcttaraacaggcacccagaaacgaagttagcgattattttaaggctaatttatgtgataaatcccacaaatctttgcaaatacgagaggccaaaaaagttgtacctctttatttcttggtttattagtggattgttttattaatmatattttctgttcataaattctctctttatttgctaatttaatttagtagtcttaatgtttttcttaccaattcataaaactctctgcacagtaaaaattttactttttgaagtgttttcagcaactatttaaccaatttatcatgtatcccttaattttgatcttgtttctttttaaaattatagaagatttgttggtttttctcagtgtttcttctgtcgcttcaaagcttggcttgtccttctctcagagttttgataagtatttaattctgctttcttttggatgtttgttgggtctaaaaataattaactgtttaatctattaggagtttgttttgctaaayggtatgacatgagattgatttttgttattttattgctagctggtgattccaatttcatttattaatcattgccttacccaatgactgaagatgtctcatatattgaattaaattatttcggggagcagatctgtcatagtgatactttagtaaagagttatagtatgttttaatatttgaaaagtatattttcccatgcaccccttggtattttctttgacatttttaccagtttattcttatccacggagtagaaacatgtctccatgcccttctatctccacatttataaagaacttttaattagaattatgtggaagataacatgaaaaatattgaatatgtacatttaatcttcccttttaaatactttgtttcaagacttgtaggtttctcatataaatcagaaatttctcactattatccttcaattaacaatgaaatttttgttatgtttattgcttattttaatatctggaagtattgatttgtgtttatcttatatgctattgctttactcaactatcaattctaacacatttcactagatttatttgtattttctgggtgaacaattaaatagaaatgataaatatgttatttttctttacaatattcatttttttaactattttacatgttggtcagagagacaattttatatgttggtctgaaatgaatgtcgcataagagtggtaatggaagacatcctttttgttgatatttctgaatttactcgatgtatctctgatgtttcacgtaaatagtattttgatagctcaaaatggatacttttaaattaaaagaattactggttttttttatgtaatggttttattgtgggacttagagtagtatttggaattattactggattttataaaatgctattgggtaggggtacatactgagattatcatttggatttttacatactgagattatcatttggattttaaaatttaatctattaaaataattcattttatgacacatttattaataagtttgctgacattaaattatcttcggtgtctgcaataaaacctattatttcttggtaggtttttcttttttacagatggtttaataatatcatttgtgttctatttggcttttcacattcttatcaataagtgatatgcatctgtaaccataattgttggtatctttgttaggttttgatttcaggggaatttttttttcttgaaacttactgtacatgckgctgccatcccaacagtcatcacaataaacagaacatcaaactaaaagtgttcttttctttaagtagttagaaaaatgcaagaatagtacgggtcagtggtaagtgccacagatgtcaatttagttmtcattttcatagcgatgcttcagagcaagaatctgccttgctctggttcttctcaagttaagcagacttttgcatgttaggctgcctcataaaccattggacgatctggatctggcacatgaaaagtattttttcgataaatggttaatattgcagtggacacgccagggctatttctctggcccacatcacttcctttgctctttttaaattatatacttcaaayatgaaggagtcagggtatttttcmttctactttwagtcaactacgcttaccagtttttattgcccttatgactgacttcaaaaaagaatacagtgacctccagatcttgattctttgttgtccctaaacttaagtgcatagattcttttagttttaaaagttttattgcaactggggasacagataagatataacaaattaatgacctttggaaaattacaaagcttaggaaatcttacagtcataatctgtagtctgtatgtttctgtttaccctttaggcagtacctggaagaatctttggactttacattttcttttctttcttattactgagaggatatttcagccttatttctaaaaaggtagatttcaacccaatttcttctccttcttaatcatacctaaaagtgaagagacctaccgttttttttctagtgtagatatgaaggagatgttagtttagacctttgccatttctcacaggactattgcaaaaggtttctgtctttatttttgtacattctactctaccattcctttgcccattttaatttttttaagacacagatatccttaaaactttttatcagttcttcatcagatttaggatgcagttagatttttctctcactccatacaccaacaataattgtaaataaattagaaatttaaatgtaaagcaagaaatcatgtaagtcccagccaaaaatttgaataaatatgtaatctttgtgtgaagaaaactttttaaaaacagcaacaaagacagactattaaggaatgtaaactgaggaaaatatttgcaatrtatggcaggcaaaaagttagtagayttaacatagaattttatttttgttaggatgtacaaaaaatgcagttatatgaatactcatttatattacagaaagaagttatttaaatattttattattcttgtagatgcactaatcttttgttattatttctatagcaaaaacaaattagttactcaccaggagtatgcagcatagaacatcagcaagagataaccaaactaaagactgatttggaaaagaaaagtatcttttatgaagaagaattatctaaaagagaaggaatacatgcaaatgaaataaaaaatcttaagaaagaactgcatgattcagaaggtcagcaacttgctctcaacaaagaaattatgattttaaaaracaaattggaaaaaaccagaagagaaaggtaagaatcacattatttactatacagtaaatacttaytgagtacctgttatgtgtcaagtattggagatacatagacaataaacatatcctagacctaaaggagaccaaagtcaggattgrcagatagaaaattataatacagcatgatagaaaagcaaatgggatgataattctgaacaaaattacttctagctgggtatgatggcacrcgcacacacacacacacacacacacacacacacacacactagctgggtatgatggcasacacacacacacacmyataatctgagctacttaagaggctgaggaaggaggcttacttgagcccaggagttcaagcccagcccaggcaacatagtaaaaccctatctctaccagggaaaaaaagaaagaaagaaacgataaacttctaagctgagatataatyagtaagaaagaagtagctagggaggagtgtccagggaggatgtgctaagatctaaaggaaaagggggacatgccacattcagaaaatgatagctgtttactatgactgaaacataaatagatgagagtggtgagaaatgaagctggaaagtaaaatagaggcaaagtcatgacagaatacaaggcatttgcacattatcctcaggccattgaagaaargtgacatgattatatttacatttttgaatcaccactcttgctactgtgtggagagtgaagtgggaggagcaggctggaggtaggaatccagctgcgagagatgaggtgtgggcctcaggtggtgatagtgaagatggagagaagtggatggattccatctastaagaagatagaacctggagaacrtaataagcagctgtgagaaatgagggagcaggagaaattatcagttatactcagctttctagatttcaggcaactgaatatatgttattgtcattctcagcttatattggaagcccaaatttattcaatttggtgcatttattcattcagtaatattttttaacctaccatatctgacgcactgttgtagggactggtacaaaaagacaataacaatgaaaaaaattcctgtcccrtagaactttctataagtaaaacatagaatacattagataatgataaatgctaagaacaaaaaagtaagaggaaatccgttctatgaagcattcaagggagggttaaattatataaatacaggatggccagggaaaactatactgagaaggtgattgatttcttagttaaagattaaaacaagaagagatgtttatacagatgtgtgaaaagagcattctacatggagaagaataagttttttacaaaatagtgaggaggccattgtggctcaagtagaatgatgggaaaagaatagtagagacgagagaggaggcaacagggggccacatcatgtaaagccttgtaagtcatatttagtggatgcatagtttcttattctgagtaaaactattgcagggaattacagtcatgcattgcttaacaccagggatattttctgagaaaggtattgttatatgattatatacaagattttttttaaaaagggtacacctatataaggcacttaccatgaatgaagcttacaggactggaagttgctctcggtgagtcacaactagaaggtcttcagggacagttacatacatgaaattgtcatttcctatgacaacagtgccttcttcgggaatacttcctgaaggacctgcctgaggttgttttacagttaacttttaaaaaaatattaagtagaagcygtatactctaagataacgatamgaagtatagtaaatatataaaccagtaacayagtcatttattattaagtattaggtactgtacataattgtatgtgctatacttttatactgccracagcacagtaggtttgtttacactgacatcaccacatacacgtgagtaatgctttacattagtacttaaaacagttacaatatcacaggtaataggaatttttcaacaccacatagtgttcccataagattataataaagttgaaaaatttacgcagttayggactaatgcattatggactaatggcagtccatagttgatcaaaatgtcattatgcattacatgactatattgtagaattctgagcagaaaagtgacaactgatttgtgttttaataggatcactctgaatactaggttaagagtagtctgaattaggtaagagcaaaagtgatgagaccacttagaagacgattgaagtaatccaagcagaagatgacagtggctttggcctagagtagtggcaaaagggataagaagggtttgaattttaatgatctttaaaggtaaagatagcaatgtattgatggactaggtatgggatgagggagaaaaaggaagactcaaggatgrtactaaggtttttggtccaagcagttgggagaatatattactagaaaggacgactacaggagaggcaagtttgggattgggagtgttatcaagggcacattttttcccctgacragactctttcataaacagaaagagctcattttaaacagttacagttgagatgcttattagacattcagttggagatgtcaaataggctgatgtatagaccagcctggatttgggggcaggaggtaaaatcctgagaatatttatcacttccatggcatttaaacctctgagactgtatgaaaacacttagtgaatggatatagatagaaaaaaatttcttagaactgagccttggggtactccaatttttggaagtyaagagatgatgaggaaccagcagagtggatagagaaagggcagtgagaatgacagcataayaacaggcaaatttagtgtccttgtgttagcagcgccgaatccatatgtgtttrcagcagcctcaattcttgcctcctcagaataaagaattagaccaaggggcataagacagggagagactgaggcaagttttagaacaggagtgaaagtttgttaaaaagctttagaacaggaataaaaggaagcaaagtacacttggaattgggctaagtgggtgacttgagagattcaartgtatgatttaacctttgacttggtgtttaacctttgacttggcatgcttctgtggggttgcatcccttctctgattcttcccttggggtgggctgtccacatgcacagtgacctaccagcacttgggaggggctgcatgcacagtgtgtttactgaagttgtacacgtgctcatttgaggcattcttccctgactggttgagtgctcctagaagaaggtcatatgccaccagttaaactccaccattttgcctcttagtgtgcatgcttgagcccacttgcctaactcctgagtcttattgggaagctgctgatcaccagtttcaggcttttctatctagtggtagactgccttttcctggcaccaggtgtgaccaattattattttagmgagacagtttaacaaccacctgatcatcacctgatgtggccattcctggttgggggtgtcctcctgtcctgcttatgtctgcctgactgcctactgtaacactggaaaccaagtgargaaagcatataaagtctgtcagcatgtcaaataaaatgagttctgaatcaartragataaggactaaataatgacattgagtttagcaatatgaaggtcattggtgcctttgataagaacaattttgtggaaaagtagaggcagagaccccacagtaggatcaaaagagactgkaaggagagcagttagaggcagaacatagaggtaaaactattgtactttgttgtgtgggtgtgtgtgtgtgttttaagatggaaaaaataacagcatgcttgtaatctgatagaaattatagatgattggaggagagaggagaggaggaaagtactggagcaaagtacttgaggatgttcataatgaaggggttggccttactcgatcctgttttgttttttttaacctatcatgaaaagagaaagtagagtatatggacatagatggggtggtgggaacttgtctgtgtgttgagctctcttgttgagttgggcatattgaacttgtggtgcttggaagacatctttgtggagatgtcaggtcagtttgaaggccacaaaagcttcaagtgtagattcagagatcatcagctgaatacataaataaaaccagctggtgtcattgatgagctaactcaggcagcatgtgtagagagggaagagacagcacctaagacagaatactgaggagcattgatatttacaggaaggatggaagagtcacaaagacagctgaaaagaagccaggaatgtagactaaaactaggagagcatgggatycctgaagtcaaagccagacagcatgtcaagagggcaagagtggacaacactgtcaaaagtggccagcaggttggatgtaatcacaggcagtgttgagttttgagagagctgttttcttgagatggtggaggcagaagccagattttggtgtggtggagagcaactaagcgatgaaaaagtrgytacagaatctgtttcaggatgcttaccagtgagtgggaagacaaggatttaggaaatgaattgtgacacagggtatggggagagtttctttatttttaatatggaagagacttaagcttgtttaatgctaacaggaaaaagaatggttttacatgaaaattttactcaatttatttgtgtacatatttttctgaaagtctttgcagtttttttattgaagttgcttctgtgttaggaaagcttcctaaacataactaaatttaacatctgtctatagatagtagtgaagtgacaaatttgcttggagatggaggttggcttattttccttgaatttgtcatttaaattataatttatcttcaataatgttatgtaggagatttttaagattacacttttaagatcaaccattacttacattgtttgttcaccagaaagcaatcatataaaattacccagaactgatccacatggaatttcatttattgctaacatcctatagcatccatcaaattgctgtagatatatgcctgtttgtcacataacaatayagtcttcaaaaacttattccttgctgggcacggtggcccatgcctgtaatctgagcactttgggaggctgaggcgggcggatcacctgaggtcaggagttcgagaccagccyggccaatattgtaaaaccccatctctactgaaaatacaaaaattagccagacacagtggcatgtgcctgtaatcccagctactccagaggctgaggctagagaattgcttgamcctgaaaggcggagattgcagtgagctgagatcgcaccactgcactccagcctgggatacagagtgagactcttgtctcaaaaaaaaaaaaaaaaaaccaaagaacttattccccttttttccttagaagattttttaagtcttattaaaactgtgtttacttctaagggtaaataagtcatcatgatccacagaactatcattttaaataagctttgtaatattataataataaatgtgtatatatgtagatgtaagaaggaatggctgaaagtattgatagaactgttggaaatttaattgaacttttaatacaatctagggttgagaacaaggaatcattttgtggttcatatatcctctttccctaacctctcctttcaccatgctttctagtatatacataatcaaataaggtgagcataggaagtctacacatcacagatgttttcctcagatttccaaatgaaacacaaatagatgttattaagtatacgttcattgaactcattaaaagtaaatgagtgtgacttttaattttaagggaaaggatgargatttggaagcatcaggctataagtaaagcagatggtgcaatagccaatctggaatactgttattttcaataaaatcaggcaatgcagttccattctggcattttctgctgtcatttgcagactgtcatctgaagacacctaccatagtgtttctccaggatgctaatgtgccctctcactggtgtatttattaatgccttggtgaaaggagtsctttgtgggtggctgaccaggttgcacataataggtccactctgacattctcatctctttgagccagtagaccctttatgctcagtaagtcaaatatctcgagctaattgactgtaggccactattgggtccaaagtccaggcttcaattactcagcctagcagtgaaaaactacacctgaatattgagtcaacacattaaaccacaaatcctagatgagtatgtgcatttgataaatttggctgtatttaattttttatttacccaycttggggtaacacccttctgacctgaaggaagaagctgaggcacaggatatgtttaaagagtttgtttgagccaaagtgaggacagctgccaggaacacacttccaggttaccttgaggagtgctccattaggyctttgttacaagtagggttttaaaagcaaaaggaggcaagggctgggctgatacaaagttgtttgacaggcattttcactggtttacaaaataacattgattagtgactggctattcattgttgaactatagcgtgtgagtcatggtctccagtgtatggcattttatggctacttggcatcagtttagagcccacatagcaagtggcctcaagaggtgattatttagctcaaggtgggagtgagatgtgactgctctcacattttaaatacctctctgggcctgataatttaaatggtctcacattcctcagataaaaaaagtttattttctttctcagctcttagaattcatttctgtatgctgcccatactccttccaatataaattgccaaaatgctttaacaccttcattgcttttatatctagtctctgctgtgatcttaactgtcatcataggcctgaagacaatgacaagtgattgggtaggtgttaaagatasttggcctccctttttgatgtaactatttcaggtgaagttaataaatgatttatgcaaaaacaggttggttgcctcaggttatagctgctttgaggaaggggatgagattgcttctacctgcagaggtttgaagcaatacgagrgttcagagttctcascactgtcttttgctgcctgaaggttccaatatgttgtccaaaagacagaaactgagacaaaattaatatagagtttatttgggccaaggttgaggactgcagcccaggaaacacagagaagtgmtccagagaacaaaaaagaggctcaggtttttaaagaaaaatcaggagagggaacatacaaaagtctttggtcaggagttctcactggtttgcagaaataacattgattaatgattggctgtacattgttgaactatagggtatgagttatggtgtccagaatatggcattgttgggttaatttatagctattggtgacactcagtctggagtccacatagctggtagattacttagctcaactgggagaataagatgtgactgcagtcacatttcagtgcctgtctggccctgctaatttaaaggggctcgcatttctcataaaaagtttcttttctttctcacatctcatgtcttggggactgcactcattctgaatccacacccttagcctaagaggtttggtcagtgttgtgcagatcaacattttgcaccttctgatgggatgcactgagaaacattgttcttgtggtattccagccaaaaatgaattctttgagactagtcataaacatcagatggccccaggttgagtgtcactgtacataattagagacctatacattataaaactgttgtgagagatagggaagactgaggaactgttctagaccaaggaaaattgaagagacatgactactaaatgcaacacatgtttctcagttggatcctgggcttcataagaaaaggagacatkgtagggataacttgaattgkgtctgtgaattcagatggtaagtgttctagtaatgttgatttttttaaattgagaggattgcttcgtgattatggyagagtgtccttgactttgaaagatacacactggagtatttaggggtaatagggcataatatctgcagctagctgcctctcagtggttctgaagaacactaataaaatcggtatatacacaataatagagaaaatgcagtaaaatatttacaattggggaatctgggttaagagtatacaaaaattctttgtactattcttgtaactttgctaataataatgaaattatttcgaagtaaattttttaaaatttctgaactcataaattctaattatgaacaaaatgtttggaatactattgttaatcaaattgataacactaggaagtggctctggcctaatactaaataagggcccagcaactttgtattttgtaagaatattgtggtggaaatacacaaagaaaagtatctaatttggtctcaaactaatttgcctttggatagaacgtaatgcatgtgaagcaaatggcaattattattttcattttggtccattrtcaaccttgatgtacgttctctgactatataatctaaagtagccaccctctcccaratactttttgcattgccatatatatacaatttagaacttattatctgaaattagttcattttactcactcttcattggcagtctgcctctaccagaatataagctctgtgagagcagtagctgtcaagacctgcaacaattccttggcacctagtaagcactccataaatagttggtaaatgratgaacaaatcagtattattrtaatataaattcctggaacatgctttcaccaggcctgtcattatatataaacaagctgtattctatggggacaacatttctgcarttcaatctgatattttgtgttttatgtaactattggaaaaataatttcaagttttcaaatgacctttaattcccctttttccttttgtgttttgaattgtgttagtcaaagtgaaagggaggaatttgaaagtgagttcaaacaacaatatgaacgagaaaaagtgttgttaactgaagaaaataaaaagctgacgagtgaacttgataaggtgagtgatttaatctcatattaattgagtagtacatgctagatgttcaacactgataggaattgtgggtataactttatatttgacatacatttttgtttaatagtctttctcctgagttawgttgcttctatgatatatgcaattctttgttataataatctgataggagtcttctgaagagagagttttgcttatctccttttattctttgtcccatatatttttttgagcctcttatttatttcactctccatccatattagtccattttggggttactataaaggaatacctgagactgggtaatttacaaataaaatagatttattttggcttayggttctgcaggttgtacaggaagtgtggtgccagcatctacttctggtgagagtctcaggaagcttccaatcatggcagaaggtgcaagggcaagggagggagcaagagagagactggggaggtgcacacacttttgaacaaccggatctcagtgagaactcacttatcaccaaggggatgatgctaaaccattcatgaggggcctgccctcctgatccagtcacctccccccaggccccacctccaacactgggaatcacatttcaacctgagattcgaaggagacagacattgaagtcatatcaccatctgttctctttcttactcttttttttcatatattcatygtttaccccgtcacggatggctaataagttcaggccaagttaaggctgtcccttggcaagaacagggacaattaggccaaacctggagaaattgtaacagctgattcatattcacaaagaagaactagtaaagctagaaatgataccaggggtaggtgatatctaaagaaaccatctcagcctgatttctagcttgcatacagaatcatgtattgaactgagaagtagccatattcatgaacaaaatttcaaatacttaaaggaatttttttcccacttagtatctcaaatttcccaacttcccaccattctgcatttcttgtgctaattcctarcaagcagttgtaaaaatcstaatattaaccagaagtttattgtttgtttgttttgatacagtctcgctctgtcgcccaggctggagtgcrgtggtgcaatctcgtctcactgcaacttccgcctcctgggttcaaacaattctcctgcctcagcctcctgagttgctgggactacaggcgcacaccaccacacccagctaatgtttgtacttttagtagagwtggaatttcaccgtgttggccaggctggtcttgaactcctgacctcaagcaatccgcccacctcagcctcccaaartgctgggattacaggcgtgagccaccatgcctggccacatgagccactgcgcccagcccagaagttttaataattctacttaaatttaaataataagggctggttaattgtattttataatgatatctagtattttcctccaataaaaatattatgttcaattattagttattccaataacagactgaaagaccttgacttgtaaaatagagactcttccttttgttttctgtatagctctgtatttctcactattttccccatgattattcagcatttaaaatgctaaataagtatttaaaacattttttaaatgactgcttgttttctaagcctttaaaaaatgactagttgaaaactacttgagaaagaatactgttcacatcataaagtcttgtaaagctaacatacacaaacattgtaggaagtggctgaacagtaagtaatataaattgattttttaagccatgaatagtgcatgaactttaacagttatttccattgaaataagactaacaatatttgaactttatccaarcaggtcaataattgttatttcatgtgttgactaatttgattacaaaatttaatgtcattttgtcctataagacagaattttaagattctgttgagttacctactaaaagatgttattacattttaagaaaaattgtattggaaaataacttgaatgtagatcaaatttttgcattcaattattggtttaatttcattgttagccatacatttctgctgagtttatccaaaatacatatttagagagaatttttcaaaacttctcatttgattaaaattgtgttgcagtctaatacatccatgagaaatggacatacttaggcctagtataygtaatgaagcctccttgatgaggcctgaaggatagtttgtttttwwaaaaaaaaaaaamaaaaaaaaacggaattacccattcttgctaaattgaaagataggtaggatatgagtagcacyttaagagcaaattcatatggtaggtaaatatttaatgtccagtggttacagggcagtatttattcctgaagaaatgggagagatctggaatctctatttccatttgaacctctgctctgtttctcaaacttttgttcaatttttgcatctctctcttcctaattctcagtctacctttccctttttaattctgtctgtctcagtagtgataagctgaacttcactgtacatcttcactttccatttattcattttccaatttggttagaagtgggtagtttccccaaggatgaccacagaagcatttgccattgctacaccaactgttccattgggaaccagcttgaagagaactggatctcttcttgacagaattacagatctagaagtcagaaagcaattattaggttaattttgaaaggtacatattacagattttcacgtttttaaattccaaaaataaaaacgtttaaataaatttttaaaaattagatgacatttttgtaaatcttataaaccccaccttctattaaaagataattcattgccagctgggcacagtggctcacacctgtaatcccagcactttgggagtccgaggcgggcagatcgcttgacgtcaggagtttgagaccagcctggccaacgtggagaaaccccatctctactaaaaatacaaaaattaaccgggtgcggtggcacgygcctgtagtctcatctactagggaggctgaggcaggagaatcacttgaacccaggaggtggaggtagcagtgagccgagatcgcaccactgcactccagactgagcgacagagcgacagtctgtctcaaaaaatatatatatatatcattgcaaatataattagccatctggtttccttcaatctcataacaaatttttaaaaatcagccatttatgccagtgagtaaaattaattgtttacagtaagaaaagttgtaatttgtttttaaaacttgttttgtttttaaaatattttcaaaaaatgtggaaaatatttaacatgaaagttacccataatgtgatcaccacaaaacaggtattttaattttgtatgttcctttccaggtatatccttattattacataattgcaatcatgtatacaatccacttactaatctgccttttcacttaaaatgttaagagcattttttcgtattcctatgtagtcttcttataagtcaaatgtgtcaatgtacaaatagtaaaacctcattttcaaacatgaaaaatgaactaatacttaaaatttactatgtgcaggtcatcttyggaattacttcatataactcatttaattttcacaataactctctaaggtgtacccttttgttcttgccattttatagatcaggaaactaagtcaaagaagggttaaactactttcccaatcacaagaataagaagtaggatttgagtacaggtagtcgggctccggagtccatgcttttatttggtaataatgcaaagattaacttttttctaaccgattccacatacattaagcaatctattgaaaactgcttgtcactgttgtaatatgacagtgcagagtttgcattttcctccttctcttgcaaatctccaactgaaaccccaaccacaaatgtggaagggctataaaaaataatggtaatccaaaatggatattagtgcaggaattaatgtaagagaagatgctgcacatacaactctcaaaaacagctgatagacttctggctatgctaatatgaagaaattgattaaycttctaaaaaaatactaaaaagcaaatgcaattgtcaaaaacaatcatttcagaagtcttggagttaaccagaggaagatgacagctacagaatactgctaagataaattaaggactatctgaacaaatggagagataaactatgttaatggattggaagactcaatattgttgggatagcaattctccccaaattgatctataggttttgggacatccctatcaaaattctggtaggctttttgttggaattcacaagcttacccttaaacttatagaggaatagaaaagaccaagaatagttcagatattttgagtaaagttagaagtcggaggattaacactatgtaattttaatacttgctataaaaatgcagtaatcaaaaacatgtagtactggcataatgaaacgaagagtccaaaaataagttcttacatttatggtcagttgattttctgcataagtgccaaggcaattcaatggaaaaaggataatcttttcatatagtactggaacaattggatatccatatgtgagaaaaaatgaacttggatccttacctcataccttatacaaaaattaactcaaagtggatcacaatctgaaatataaaaggtaagcataggagaaagtctttgtgattcagggttaaaaatgtcaagataatgacattaaaagcacagtgcatgagagaagagtaatgataaattgagcatcaaaatttaaaaagaacattaagaaaatgaaaagacgtgcacagatggggaggaaatatttccaaatcatttatctgaaaaaagacttgtattcataatatgtaaagaactcttaaggtggacgtggtggttcatacctataatcccagcactttgggagtctaaggcatgaggatcacttaagcccaggagttcaaraccaatctgggaaatatggtgagaccttatctctacacaaaatcttttttaaatattagctgggtgaggtggtgcatgcctgtagtcccagttacctggaaggctaaaacgggaggatttatgtgagtccaggaagtcaaggctgcagtgagtggagatgacaccactacccagagtttgaccctgtctcaaaaaaaaaaaaaggaaaaaaaaacctcttaaaatataaacaactcagtgttttaatgggtaacaaagccgaatagacatttcatgaaagatgatacatgaataacaaataagcacatgaaaagatgatcgtcattaggagaatgccacttaaaaccacagcaagatactgctgtataccctcgagaatggctgtaatcaattggcgtgaccgtatcaactattgatgatgatatggaggaactagaacttacacactgctcataggagtataaaatggcatagcacttgtagaaaatagttccaaaaattctcaaaaagttaaacatatacttaccatacaacctggcaattctcctatttactgaaaagaattgaaagcatagtccccttaagacttacatatgaattttcatagcatmatattctcataatagtaaacaactggaaacagtacaaatgtttatcaatggtgcatgataaacaaagcatatcatacccatatactagaataccactcagcagtaaaaaggagtgaaattctgatgcatgcaacagtattgaggttcaacttcaataatctaagtgaaagaagtccaatacaaaagactgcatattctgttatttcattgatagaagatttcagaaaatgtttctacagaaacagaaagcaggtcagtgatgcctagagaaatcagagtgcggaccaagatcaattataaataggcatggggatatttcttgagtattagaagtgttccaaaactggattgtagcaatcactgtacaactgttgaagtttgctaaaaatcattcaagtatacacttataatgggtgaattttatgttatataaattatacctcagtaaaagtgtgaaaaaaaactggtaaactatattttcagaggcaaatggcacaccctaaggtacaaacttaaatctcttgtttgcaataggcaaatcagtgtgtgccagcagtgagtgatagcttccctggatctcatttccttttgggaagacaaggaggttggaggtaggattaaatggggtattacagacaaactctatatgcataaaacaatttgttgttgttgttttgccagaggggaagaaatgaaactttgctttgtgatttgtgccaaaattgcctatctctgcacagaaatacaggttcaaaatgcacaccaataaaatcctgtgtcatcagtagaattcctaatagcttagaattgagagttggcaaactatggcctctggccaaatctagctcccagattgtttttgtctgacccacagaataaaaatgatctttacatttttaaatggctatttttaaaaagaagatgacgatgatgtgagattttatgtggcccacagaggtgaaaatacttgcatctggttctttactggaaaagtttgcagacccttgacttagaacatggttgtggcctgtattagttagggttccacagagaaacagaaccaatagagtgagtgtatgtggggggtgggaggtggtatatgtatgtgtgttgggagcaggggagattataaggaattggctcaagtgattatataggctgacaagtcccgagatctgcaytgggcaagctggagacccaggagagtatattttgtagttccagtcccaaagcttggcaagcttaacattcaggaaaagcttctgcctcgtttcaggtctgaaggcaggagaagctgatgtcacagctgatgttcccccctactattggtgcattcagcctttttgttctgttcaggcctttagttgatcacatggggctcacatacattagggagggggttcttctctcactctcccaattcaagtgttacgyagagacaccctcacagacctacccagaataatgtttgacccaatgtctaggcaccttgtggaccagtcaagttgacaatcacatggcccttttatccctaaaaacctgtaaatagatcctctaggagcaactcaccttcatcaaagttgagtaatcaagaagaaactagcacrgtatctctacaaacatacaaaaaaggaagaaaggagtggtaataaatagcaggtgagaccatttatcagaaaaaaatgtagctctgaaataaagtagtatgcaaatattttttcatgaaaaaaaaattttttttttttttttttgagatgaagtctcactctgctgcccaggctggagtgcagtggcactatctctgctcgttgcaacctccrcctcctgagttcaagcgattytcctgcctcagcctcccaagtagctgggattaaaggcatgtgccaccacacccatctaatttttttatttttagtagagatggggttttaccatgttggccaggctggtctcaaactcctaacctcaggtgatcctcccaccttggcctcccaaagtgttgggattgcaggcgtgagccaccacacccagcctttttcatgaattttctaaaaacttaaagcaagaactttttgcttctgtgacagattagcttacatcctaccacctcaccaagaagagctataaagctggattttaaaaataatactatatgaataccacttacagtattcatctgtaagaagtcattggagtgacaacaaggaaaccaggactttactgaccaagatcctaaagagaagaatagtacagagcagtgagcccaacatttagtgccacttttcctctttaggcatttgcagatatgaaagcagaaaaacctcagaatctaggaagttgaacatggtattccacagttttacaaggctggagagagaaaaatggaagtgcattgcctatcaagttgcaggatctttagtaaataattcaaactttcagttgaacccattgaaagcctacattttaggagtaagggtgagtaagaaacatgagtcctcagtgactgaaacccagtctccaagtatttcaatctttgatctatctttactctgattgcctaccaaaagtaaaagtaaatactctgtggaggaagatattatccagagtcttmaaattatctaaagtttgtatacacgatatgtggcatgcagtaaaaaattaccaggcatatcagcaarcacaaccaaatcattgaaaaccaagagaaaaattcaacagcaaaaacaaaatcaaaaaagggaaaataaaaaccaggcagtcagtagaaacagacccgcaggagttcscagtatgaaatttttatgaatggactttaatcgtgtgatttgttcaagraagtagacatatgaaggatttcagcaaacaactggaatctatacaaaactgtcaaatagaatttccaggagcaaaaaattaaataactaaaagactcaatagaacattttaaaaacagattggagagaaacaaagaaaaggactgcatatgttaaaaaaaaattttttagactaaagtgtagtcagggattaaaaagaatagaaaatatagaaaggaggatctaagacatrgaggatgtgatgaaaagttctaacatacaaataattggtttcccaaaaggcaaggagagagatggtggcagtgcaatayttgaagagtgtttatggcccagaatttttccaaacctatgagaaacatttagccacaaattcaagaaataccacaaaccctaaaagtgaaataattaatagaaatcagaccccacttagacaaatcctagaaaagcggccagaaaccaaccaacataaaattytaaaagcaaccagagaagaaagacacattacgttcaaaggcatgaaacttcaactgaaaactgacctcccaacagaaaaattaaaaayggaattcagaagaaaaagaatgtcctaaaagtgctatagtaaaataactgccaacttacagtgttatttacagcaaaaaatgccttccagaaatgaaggcaaaaattcagaatgtggaaaactgcaggacaacctacattctttttttttttttttttttttttttttgagacrgagtctcattctgtcacccaggctgcagtgcagtgacgcaatctcagctcactgcaaactccacctaccgggttcaagcaattatcctgcctcagcctcctgagtagctgggactacaggcacatgccaccacgtctggctaatttttttttatttttagtagagacggggtttcactgtgttacctaggatggcctcgatctcctgacctcgtgatccacccgtctcagcctcccaaagtgctgggattacaggkgtgagccaccgtgcccagccaggacaacctgcattcttcaagtcaaaagaaaaataaaggkgttgcaggggaacctataaataaaatagacttaaaagatgtatcgggccaggcatgctggtgcatgcctgtaatcacagtaatttgggaggccacagcgggcagatggcttgagcccaggaatctgagaccagcttgggcaacatgccaagaccccatctgtacaaaaaaatttaaaaaataaaaaaataaaaaattagctggatactaattttttttagctgtratcccagctactarggaggctgaagtgggaggattgcttgagcctaggaggtggaggttgtaataagctgagatcacaccactgcactccagcctgggtgacagagtgaaaccctgtctcaaaaaaaacatatatccagccattaagctgggttttcttmttggtatcatgattcagtttaataaacaagttttgtgatatgttgaagtaactggaaacttgaactattactatttatgtgatattaggaaatttgtgaaatttgtagtatgatgctatcgtggktatattttaaaagagagatccttattctttagagatacatacagtgatatgtatggataacattgtatgatgtctagtatttgttcccgaatagtacaggaggaggggataagagaacaggcgtataggccaggcgtggtggctcacacctgtaatcctagcactttgggaggccgaggtgggcttatcatctgaggtcaggagtttgagaccagcctgaccaacatggtgaaaccccatctctactaaaaagacaaaaaattagccgggygtgatggygcacatctgtaatcccagctactggggaggctgagacrggagaatcgcttgaacccgggaggcagaagttgcagtgagttgagaaygtgccattgtactctagcctgggcaacaagtgcaaaactctgtctgaaaaaaaaaaaaagagagagagaacaggcgtacaagtgaaacaagattgatgttgaagtaatcattgttgaaattaggtagtggggctcatgggaattcatttttattttccttttctgtatatgcttgaaattacatgctattttaaagaaaaaatgacataaagacatttttggagaaaaaaaaaagctattaccaacagaaatgggcaattcttaagccaagtagagaatgttcacagaaccaagtcactgtaggttgtaagggaaaagcaaaggtagcaggagaattcagagtacttgatatccamattcagtgagcaaaagggattattrtaataagacaggcatttttgggtagatgatgttgagtaatcaaatttgacaatacctgtctgaacacctcgaattcttggtcctaaaagtcatgcatgtcttaaaactatctttcagcttactactttgtatgagaacttaagtatacacaaccagcagttagaagaagaggttaaagatctagcagacaagaaagaatcagttgcacattgggaagcccaaatcacagaaataattcagtggtgagtgctcttttaaacgtttttttgtggatgattgtgagtatgtggccaagttggtatgaattccaggtggctactaataatggtttttatctcatttgtcagmtgtgataaataagttactctgaaaagcacagttttattactgatctgttgtgttctactgtgttttctgttacattcctctgttccctaactctaacaaatgtcccataccagcatttaacacagcttcattgaaatctgattattattactttctaagaaaatgttaccaccttcagagtcaaagttggaattcatctgctacctatggatgtttctttctaagaccaraagtcctgtatttgtgagtattttaagaaatggaaggcctgcaaaaaaaacttagaagctaaagatactgtactgttatcttgtatcatgattataccagattaattcacacatggcatttttaaaaccttaaatggttacattttagttttatcagctctttcttaagctcttgggatttagtttggaatattcatcttagtaaccttcatattcatttattaaacgattattctggtgctggtaaaaaaatttcatattttaataatacatggggaaagtagaatctaatgaagactgtatttccaagtaaaaataggtaacttaactttttatatttatttaacttttgaaatccattttggcaaatggtaggtgtttaatttatatcaaaacaaatacaggttgagcattcctaatctgaaaatctgaaatctgaaatgcttcaaaacgtgaaactttatgagtgctgacgtgacaccacaagtagaaaattttagacrtgactttgtgatgggtcacagtcaaaatgttgtttcatacacaagaaattattataaaacattgtaaaaagttaaccttcaggctatgtttataagatgtatataaaamacaaattttgtgttttgtcttgggtcccatccccaagataatctcattatgtatattcaggtattccaaaatttaaaaaaaaaacctgaaatccaaaatacttttggtctcaagcatttcatgtaaaggatacccagcctatagtttcatcatatatttatagatcagtcatttgtagggaattttaattcctgtatgcatattttggttcaaatgtttttccattaagagctcttaatgcttwtaatgtttctattcagtgcatataaagggaatatgcagattgtggaaatttatttgggttctagacagtacagttattggttcattaatttatatctatatcatcaagtctgcatttctgaagcaaaatccattttaatgtttaaccaagtttataatatcaaaaattatgacttgatatttgtgattccatttttatgttatcaaatatatatgtaaggaggagctgaaaatgacttcagaagacagagtcaaaacctgtgatactagactactgattttttcaagtgtctggcatgatgagttcagctggaatgggaagtggtgctagtaatggaaggaagctttcaatgtgggctttgtagaaagggttaatagaaagggtgaagatgaaagttttatatgatgccacaaaacactcactatacacttttcacattcaaacgaaatatgcagaaatcagaaatacgaggaagtcactttgcatgaaagctgttattaaccctactttttatttagaaatggagtaatagatagcagattggcaaatacccaaagggaaaaagtaaaatatatattccctgttcaactttcttaccacttcaaagttaactctgtgagatacaatatccaagtttataaaggtcagaagactgagttattttcattttttgagtttagtttacagattgagtattccttattcaaaatgcttgggaccggaartattttggatttcttttggattttgggaagtttgcgttatacttaacagttcagcatccctaatccaaaaatttaagcatcttgtcagtactcaaaaagttccagatttggaggcatttcagattttggattttcagattaggaatactcaaccttcttttgaaaaatgaggtaatgctcaaacaagattataggacctcatgacatatagcactttaaatgtttcctgggacaaatgaacagttttaatacaaaacaaacactgcagtatataaaaccttttacgaagtcacttctaatggctcttgaactccacctcctctctcttttgctatgaaatatccctttcatcagaaactcttttagagcaaggacatcttctcaccgccgttagagtaggaaccttccttctcgccattggctcatcagaggacttcacgttttctctttgaaataatattacaaagagaggttagattaataggctagtccataagatttattttttaaatgtgttttcctcacataaggcattcttctggtacaataagagatacagagatctataaatgtagtacttttctttaagtaacttgtaactaaacatttaaagtttaaaaactattttgaccagagctggagataacttatgagacttaaatataaatgccttacatattgaatagatactgactttttaaaaataagaatgtagtgttgagaaaattatctcagactagttgctcaagaarggtgggaataatcagttaaactagactgtgtgttctgaaaaccctgagtttagtaaaatatcctacacctagtttgaccaaattggagaatttwtgtaaaagaatagtaggaaataagagtaataaagttactgcaacacagttgtcatgaatactaggtaagaattttaccttcacttatttgtaagatggagaaggtttttcaaaggtaatggtgttaattaaaatgatgattaggcaaatagctcttaacagtaatgttcagaatgaagtagaaggtaatgttggaaataaagtgaacaaatgcaggagacattgtgaaagaaaactctataggacttaatactatttacaaatgaagggcaagagatgaggagaaattagtattcctgaattgtgagttaaggaggttaagaaaatgatggcatcattgaagtaggaaagttaagaggggtaaccacccttggggaagatgatacaatcaattttagctgttattttattttgtttgttggtaagactgaggtgatcctgagacatcttagtagagatttctcatgcttttgaaaaactaacataaagattaggattagaaatgtaaatttgggaattaaattccttgtgaataaggccagtgaagtggttgagatctttttaaggagacaagaaagaaggaggatggtaagggctatattataaaagctagatgaaacagctctgtagaggagaaccaggagaagggtttaataattacaaagcgtttcagtaatgaaacctttgtctctctttatttaaatccactcacatatttgaaacattcctcattcagtaatgctcatttgtgtatagtaatagcttctattgattaaaacataagagtgttctggtcattaggctggaaattcacatgtattcttatttagttattacaccggtcctgtgagatagatatttttactatccccattttataagtgggataacaaagagaagtaatttgcccaaagttacacagctggtaagcaccagagctaggatttgaaaccaggtctatatgacttaagaatcaaagttcctaattactatatatgccccaacttttcaggaactgtcccttatttgtcttctcaatatgcccaatgcartagtatttaataagtattaactaattgatcatttgagagaacttggaagggaaggattaaatgtgccaagagaacacatagatctaagttggccttctgtagttgagttttaacagattagcttcagcaaaatagttgaggcaggaattagacttcgggaagtatagagtagtgaatggagggtttaatactagagcaattacacgtatggagtgtaacaatgaaagagggaaaatgggatgtttggggatttgtcagtgaggaggacagggaacttttggatttggtagagtttgtacatgtttaaaggaaccaatggaaataatgaaattgaaaatatgaggtgtagtagggagggtgattatgtatagtaataataactgttattaagaaatatttgaatgatttagccaaataaaagataagacacctacctctaaaactggttttaaaagttaagagaatgaatatgaataaacttaaccaaatggcctacaagcaaggagcaagagatagtgttggggccaggtgcggtggctcacgcctgtaatcccagcactttgggaggctgaggcgggtggatcacctgaggtcaggagttcaagaccagcctggccaacgtggctaagcctcatctctactaaaaatacaaaaattagccaggcgtggtggcatgtgccagtaatcccagctactagggaggctgaggtaggagaattgcttgaacccaggagacggaagttgcagtgagctgagattgtgccactgtactttagcatgggcaacggagcaagactctctcaaaaaaataaataaataagagagaaagatagtggtggggttggagaaagtaagatttttttttaatgaggtggaaaaatagacaaatagcaatgattatgagaaggagttgtgtgagacttagagtacagtggaacttaaatggcatgagttgccctccaaaccagtaattctctatagccaagaaaaagagaaataggtttaatcaaaagttaggaattagtggaagactgcagttgtaaggtgttcaacatgtaaataaatgtgttcaacatgtaatgtgttcaacatgtaaataaaaagcaaagttagaaaaaagagattgtcatataaaattccaaataacttaaagtcagtttacaagaggttgatttccaaagttaattaaacacattggacttcacagtttcttggaaatgtgcataaactaagatctctgagccatggtagatactaaaccagcactaggtgagacctgttagcctggrcacttaaaggataatacagttttctttattgttactatataagtatcttttttgtattctaaaaaagataatcttccttcatcccaatttattctctacactatagatcaggtaattaaatgaaaagattacagtcacttgtagtcaaagaattttagaaggacacaacccttgctacacaaacattcttaaaataatttccaaaaccatttttctttaacaggcaataaaaatgtgtacatgtagatagagcctaggaatgtgtaactgtcccttaccatggttttattgcatctccatattttcttttgcttatactccaaagacaatctcccatctaagaggagagagcaacaagcctcttttaaagggcctctttaagatatatataaatttsactcctcaggagtttacattctaagagatactaaagcagagctcaggagttaaacatgtctgctgtatgcatcggatacatgctgatttacctgaaatatactttcctcatagcttcagtgacctggattttatctgaagacaaccagcctgcacaaagacaaattgtcttccccaaagtgtgtttagaatacacttgtgagcmttgcaaatttcaactccattttttttgtttgtgcagtatggctttctgtataccagtggttttcattcttcctgagaataggaccttcttttttagattcttgtagatatgctggactcctcccctcaccttctccccacttgagggaagtgtaagaaatgcagaygttttcttgagaaattctaaaatgtggaatttgtcttactaaatataatttgaaaactttctgtctaaaattataattgtatcgttasctagatagccttaagacagtaagtagaaattaggttttggtagactttaatcttccctctttgttattttattgatcatttcagaaaacagaagagcttaattacaatataaccctgatttttgcagaatatcctacattaaactttctaaatttaatatacacttcagttttaagaatggtatgttgtttttatgatataaaatggcagaatccaattgagaaatcttattatttagaaaacctcacacatttgtgcatctgtgttaattgttagatttaaagagtgttaattctgtgtttcaagggtgaagttttaatartgtatcagctatgagtaacttggacttttgtaaacatcacctgctctaccatgtacataaaagaacagttccataaacctcttcccagttgttgacaggtagtatactatggtagaccttttcaaagaaattatttaagactatctttgaatttcctaccacttatttctttaggaagctttaaaataacatatattgcactgaagcttttttgttttacttttgtactttgtctttatatattctagggtcagcgatgaaaaggatgcacgagggtatcttcaggccttagcttctaaaatgactgaagaattggaggcattaagaaattccagcttgggtacacgagcaacagtaagcttctatgattttgcatggaggcttatcatattagaaaaaagagatttaaaaaacactataataaatccaattacttatatcagtttgtttagactytgagcctactaaagagttttttatgagaaaactattagtttgggtcttttccagtttagaaaaacataacacacagctggttaactataataatttaaatgttaaaaataggatggaactaaaaacacagtcattatttcataggatatgccctggaaaatgcgtcgttttgcgaaactggatatgtcagctagactggagttgcagtcrgctctggatgcagaaataagagccaaacaggccatccaagaagagttgaataaagttaaagcatctaatatcataacagaatggtaagattgaatcatatagtcccactagaataatttctaagtttrtcataattatttggagagaagttacatgtttagtttccattgcttgcttttagaaaaatgatggccaaatatgttacaaagatttgaaaataactagatgcttttaagccttgtagrtagtgatgaggttttaatatagccttgttttcctctggcttgtccataaagtagaattaatagtattaaataatattccattatttaattttcctcataaaatttagttgackctcaaattttattaaacctaaaattctctcatgtttaggaatattatatttgtataataatacaacatatggtgagaacaaaatataatcatttgaaaattgtggcctctaccataggtcttttataaatgaaaattctattgatggcaaatttcataatgatataatatcttttaagtataattattgtttttcatgtttctttatgtatttagaaaaagtgtatcccacagtctctgaagcagttagctaatgaacacatttcgtcaattctggtcacaacactagagtgaatcatactctgaatacataaatgattcacagttagactgattataaacatggttcaaaataagccagtttaagtgacatagaggaacaatagaaacttcacatcacaagtgaaactacaaatacgaaaatccattgactgctgagaataccaaaagttccaaaagcctgaaaagaaatgcaggcccatgaattcagtttttaatggtgtgtagtcatagtccttaaactgcaattgtttatctttttaatcaaatcaaaggccagatacatgatacttstgttggattataaacttttggtttataagctttttgctataaataatgcagacattgtatgttttacttaaatgtgcttatgtggcattgaggaggggaaaactttttctggagaaagtgaattgatcccagcataaagagctaatgaatatcattctctgtgttgtaatttgaaataagtaatatcttttctccttaygcctaggacagatgagtttacatattgttcataagtcaggaagatgagccagtttgaaaaattataaacttactcctgtatgtgctccactttcatggttgcctgtaatggtataatatctaacaaagtctaacagaattctaaaattaacctttgattttgtaacatttttaaatttaataatttagttcagggtccacaaatgttttctgtaaaggttcatttagtaaatattttaggctttgattagcttccatcacagcttctcatctctgctattgtagtgtaaaagcagccatagtcaatacttaaatgaatgagattggctgtgttctagtaaaactgttaatctacatgaaagtaggtagcaagctgtatttgttcttccygcagtaatttatagtcccctaatttaccatgcctgacatttaaaccaagtaagtttggctacatccaagatggctcactaaccagcaataaaaattaatgacatttttccttttttctccttatttaagtaaactaaaagattcagagaagaagaacttggaactactctcagaaatcgaacagctgataaaggacactgaagagcttagatctgaaaagggtatgggagtgtgtgtttgcctcaytcaggacttactgttatgttataaatatattttattacagaagaatcaattcattgcataggtgggagaattgttgacataagcaattctggcactcatttatgaatatacgtgtgtatatatgatgcatgtgcatacacacacatttggaagactgacctctgagtcattttgttttacttaatatgcattgtttaatgatttcatagtaacagaaaaagacactttgccrtaaatttgacgttttttttcagtgcagtggactacttcatgaataayatttttgtgattggaaaaaaattttattttataatgtactttataatattctcaaatgctatgatatgaggttatcactctgacagtggcaatgtgtgttaacatccagaacttggtaagggtacttgaacaagtatttcctagcactttttatgtgcctagaatgtataaaaattggggggggggtgggattcactttcagggtagttgaggaaacaatgtatgaaatagctgaagattaatttagtattaatggagcaattcagtaaggaaaattttggggggcattttaatgtcttcttccagtttgacacttaaattgcttgtcctgtaggatatcccggatttattaccattttcttgaaaactttacttgaacatttttccattcatgtgaaagcttagtcagagtgcttcatagctgtattacaygaacttcttaaactttccttaatgtggatgttaagaaagtgaagatttaataaaaagaaattcagatatttttaaaataaagggatatcttatatacatttatttgaaattgattttcytgacaaaggccatcactgaatacygaactcgttaatgggctttttattaggtctaagtgctttcctatcatttctcagccatgcaacacagtgagataaaactggtggagtctctgcatctgcatgtaaaatgatagagaacagagagtaatcacataaagaagctaacaagaaaaagcctttacaaatagtsgatgctcaataaattcttgtggattgaatttcttaattaacaacaaaaggaaggagcccagaaaaagtgaatagtaattcagattaggagcacaagccatcatgccaaaatgaaaatcaagctaggttttaattaatggaaatttgaaagaagatacattatttagtgaggaaaagaaaaagaattcgtaagacatggacaactcgtggccctaatggcaaataggagagagactagtgcagaatatgacttgcacgccagatgacattgattgcatcatttttagaatagacctaaacttgaaagagacttaagtttatcactgaaggcatgtttaccacagctttttaatttggattttgaatattgcagaacaaaattttattgtataacataatgtatactactacttcagtaatataatgtgatatttacagtatgagggcaaggatgtttttaatgcttcatttactattatttccccaagtctctaggacagtgtctggcacactctcaatatttgaatgaatttctgaacatactgccttacctgataactgtgttatattattagatagtaatatgaaaaacacaaatcagctgatgtcaattcctaaggatatggaagtraaaaatgtgggattggctgttttctggtttttttctacctagtatttttatttgtatgttgtaagaattacttgggaaattgtgcatttaaagttaatgccatagtcaagagatatgtatgaatttttaaaaattcatctgagaaaaactggggtttggagtcttcatcctgtcaataaaaaaatacctgaaatcagattggcagtttttttgtaattaagtgtatttgtttcatcactgcattaatttcttataaaggattattcttattagtgcatactctgtgctttgataagagtatttcaaaacataagcctgtttggtgttgaattagcttagaaaaatcagatataaacagactcctatttttaaattctctcaagcctaccaaaagatttaatgtggttttttattatttactatacacaaaaagaaagaaactcagtaacataaataagcatttcatggaaactgatgtaattgaactattaagtgatattctaggaaacactagtgtattttagttttgtttaaatgtagagttaattatagtgatcaactttgaaatacagtagtttgtgaactgcttttagtagattcagacagggaaggttatccattaaaatcaattttaattgttgtagccttaaaaaaagttgctgctgtcttctaggtatagagcaccaagactcacagcattctttcttggcatttttgaatacgcctaccgatgctctggatcaatttgaagtaagtattaaacatgtcacatatcctctggggtcaatttaaaattcactttgtaatttaaagttcacttataataaaaccattttattgcttcccacatcagaggacctagaatcttaaataaacaaaaacatattagcagaggaatatgttctgcattcttatggagactataatcccacctctgtttaacaaaacatctaagaaagatttaatcatgagagtcattataagatttaaaagcaatttcatctcccttaagaaacattaagagcagaacaaatcccaacttttgaaataatttgacaatttttttattctccaaagcatagtgccacaataaaaagtgagaaaatgtcaaagctgacaataaggtattgctggttcttatttcaaatcaattcatcttttaaaaactatacagtaagaagtgcttttgttaaaaggtgttacatagactctgttaggcatatcacacagtaatgaaattgtgattatgtaactcttgatcattcgttggtatttaaattctttgctttaaaaaaatcaacttactgttatcaagtatatttttgtctcagtaaatttaagtgtgattatatctttattgaacaaataataatcatgtagctttgtgcaaggcactgttgtaagtgctggagatatagtagtgaccaaaatagacaaagtccttcccactagaacttacattccagtgggaagaattagaagcctcaggaattccattgcttacttttagttgttacttcaaaagtacttacatttaatttgattattaattatttgtcatgagcttcattttattacattttgggcacagtatgtgaattgtgtttcgttcctttaggaaaaggaaaaataatcactctttaaaaagtaattaatgaatctcttaagtttctcaagaacaatgatagtgactgcttttctcatttatttatttgaattaatgtcatttgcctttcaattgttttacaaagtttttgatttattattcttattaaattgcttcatccatattttctatttttttattgctgtattcgttaaataggattccttttcttcttcctcatcttcactgattgattttttggatgacgtaagtctttgattttcaaaccaatgcatccttcagtaaaaaagatcagtgaattgatttgaagaatttgcctagtaatgcagtcagttttagaaataccacatttgaaaatttatgtgagccaaaatatgcttctttcttatcttaaatataatgaaggatttatcagtattaaacataatgaagtaaaaatttactttcaaaaatgctttgactgttgtagaatcccagtattttcagtctttgtaagaattctaaaactagaatgcttatttaattattttttatatatatataaataattgcttatttttatttttcctggcgatttctattttacttttcccttttcttttcagcactttactgtttaatttctatgttggttaaaaataaacctctggtggtataatmaaaaaaaattacttttaattaatttctccagtaggttttattgtatgacaataatagagtactgattttaaaataaatcaatgtttaattgatttatttctaatgctgacagaatttctcttctaatgtgcaaagtgattttagttaacatattcactatatgcactataaattgactgcattatcactttctctcctgaattctatcaatttaataatttagaagttcctgttaaatgtgtatcattcattctctttactacctggcataacattctctctattccacattaaatgcacagtaattcttgtcctaaagcatttattatcctgttgaatagtctttacagaaatggggaaataaaatggattcaaatgcaaatattgtgcatagaattgttttttaaatcgggagattttttaatgttttattctttctgttttgttaggatacttatagtcagaagagtagttagcataatgttctgctaaaggaacttcttgatctagatgtttaaaaattattgaacaaaaaagtgattttgaatatgcttggaatatttatactgaagtttgcacattttcattctaaacaaagtgttttgctattctcaaaacaaataattactctggttaactctatagtgtgataaaaagagaactctcctcgtgtacagtggtattgcatgttataatctgctgctcaggatgttaaaatattcaatatgatatttccatacagatattattcaccttaaaaaagaaagggaaggaagtttgagtaaattattttggttgttctttccactagaaaacctttttatttctaacaaacttctctccatcccttttcctgtcacaaaaaaaaaatgtacatatatttgattgtaaaacctaagagcagtatgtattttggcaaatacatgaggtcttctcagcagacctttcaggaatgcacaccccagccaggtcctcagcttgtttctgctctcacaggcactctgccactgctgccacccacctgtaatgcctgagcaccccgcagccatttcccagtgttacttttcctccaggaatatcctttctcatcttctaccctctattaatgcaacatgagctcagtataaatataaaagtaaattttattgcactgcaagggaactcctagtatgaagtaaaaaggarctgagttcacaagagctgccaaatcttttatttatattccacctcctaaaaggcatgatttcccactcatgtgctttctaagctccattctcccaatttattggttaagtgcataagcaggcacaaatcctgcctgtacaactttctaggtgtatggtttggaagaaattaacctttctacaccctaaatttgctcatcaggcaaatagtaataataatataactaatctcataatgttgtttgaagatttaaggaaacagtgtatgtaatgccgtcagtaataatgcccttattacttttaataagctggttccctccctttctgtattctctttagcttcttttctcatccatcrgttcagtttcacttaaatrctttcttagctcttcatcactcagtcatctatccaccaccaatattttatggcacaaactttgtgtttctctttagagtttgtacctatgatctcccttcccagagttatcattcattcatttgatcctcaaagtcatagcagaatgatgttttgaacagcagtattcaatctttgacatacttgagttcagcatccaagatatttcgcataacgctcaagttcttctgtagctctttttctgctaggaacttggattctttttttktttttgtttttgttttttttttgagacagagtttcaccctgtcaccaggctggagtgcggtgacacratctcagctcactgcaacctctgcgtcccaggttcaagcrattctcctgcctcagcctcccaagtagctgggactacaggtgcatgccccccgtgcctagctaatttttgtatttttagtagagacgggctttcaccatgttggccaggctgctcttgaactcctgacctcatgatccgcccgtctcaacctctcaaagtgctgggattacaggcgtgagccaccacgcccggctgcacttggattcttaaggagcaaatcaggtctctgttgttctctgtgccaaatctagttatattgtgcttgatgcttatatgcctgccctttgcggtaaggctctaatgagtagtacacatccttctggacattcttttttgttttctgtctcgttgctatagaggagattatgttgaagacctaaagtttgaattgcagctggaacttgtacgtatagaagggaataagactagtattgactagaattgcaggaatcaagtcctttggtatcaacatattatcattcttctccctctgtctctgggaacccagtgttctcatgctgccctctgatttgttggagctttaccaccagtgcctctcctcctccaaagttaccttctttactcctacttttacccttccacacaggcctctaagtgtagttactttatttaaaacagtacggttttaagttaaaatgttcccatccctattttttcctccacatgttttgcctgttaactcaaaattcaaatgaatgctggaatttttggcacaatgggaagatgttcggagcaacatgctttcctttttaagtcacattgtttggccaatacttgtatgtgtaagagtagctttgaagagaagaaatatatgtaataccagtcattcccttccctctgggaaaatgaaaggaggcaaccaggcagagcagagcatattctcaacactctctgcttctctaacttgggggaatgtaggcatttgggcttttctacatgtagaatcatagagttttgaaggagaaaaccttagaaagtatttaatccagttgttttaaccattacagcactcttctgttattaagagtggataggttactctcccatttttaagagtgacttttttaaagttctcaatctttggggattaggacagtgtggtgatacattgttatgtaaaatattctttaggacagataaagaagggtttgagttaatttatttatttatttatttatttatttattttgagatggagtctcgctctctcacacaggctggagtgcagtggcgcgatctcagctcactgcaagctccgcctcccgggttcacgccattctcctgcctcagcctcccgagtagctgggaccacaggtgcccaccaccacgcccggctaattttttgtatttttagtagagayggggtttcaccgtgttagccaggatggtcttgatctcctgacttcgtgatctgcccacctcggcctcccaaagtgctgggattacaggcatgagccaccatgcctgactgggtttgagttaattttaaaagaaattgaaactactttgataagtggtctcttgagaaaggcattyccattcaacctattaagaaagcagtagaacagagataccaagatcccttctgctgtagaaattattcccacttctaccctcatcttttccttcaaccgtgcatgcccagtcttggactgtctagtccatgttagccccagcctctttctctaggtaataaacagggtgaggagcaaatggagctcagctgcttagattttcccatttctttcccccatctattcccttcatcccaatagtaacagatccagggatcatcacaccaagcttgtagcaacttcctatactctcttcagttcattttcttttcagccgaacctgaaaaagcttggcttgagagtattatagataatactaattacaatcatatawattagctgcttgctctttatatttgagaaacgtattgtcatatattaaatatgtgctaagtaagttttgaatttgattaaattacaattctacactttgttcatttagtcccagttcacaaaaatagaaattgcccatttgcctggaaaatgagaatgtactcaacttggtttttcagagttttcttactctgatatactgatgaaagagtaaatcaaggattaagctcgggaatataaaggtcagacacagagaaacagagatagtatctatagcccaacagtctggtccccctaatattgttttccattcttatattctggcatataagaaaagcaagtagtctgacaacattggcaggctgagttctggacttgattttaaccttgtataacatcttactaagatgcttcaaaatatttaatttcagtcatggcttctaacttctttaatttatctcttgatttcacatggttttatctcccagcttcttttacattctgttacaatcagttacagaaatccgaggcttttacagaaatctgaggcttggcagcatagtttcagcgatacttgggggaatggtcwattgtatgtgagaattggtaggaaatagagttttaaaacatacattttaaagatttttagtcctatgaccaaaatcagacctagcttctttggcattcctgaaatttgctcattcaattcttgtttttacaatttctatccacatattcaccacaaccctacctgaagattgcatatttcagaaagttacatgcattttttcctcaacttaggcaatatattatgttgaatataattgtatatattacgtattttatcgcatatataatataataatatatttagacaatctaaagagaaagamccatgattacatagtccatttcttctttggtattttattaaataagacctctaggattaattgaaccttaaaaactattagccaaattatgtactcctgagattatttcttttggtttctgcttgtgtgcataccttcatattcagtcttaaagttttgttggcatgtcatggacctatatatgaaatacatgttttaaagtggtatttggttgcacattaagacaaggtgctggtttatagtgtttgccatgaattcaatttcagtgtttataaaaaccacagtgtgtgtaggtatatatgagagagaaagtgtgtgggtgtgttttcctctaactcaccttttctgttgaaaacataaaaatagttgaaaacgtaacaatattgaaaacataaaaattagacaatttctaagtaaacactttggtaagaaatcattgctgtggtgatagtatcattattagctttaaatggtattggcttagaaaatgtattgtccttcattttcaaagatagtttcgggagacattttaacttgtttttagtatagtgataatatatttattttgagatattcatgctcttttccatggttttagcatactccagactctagtctagaagtagagatagccaaaaaagttttttttttttttatgttaaacattttagcactttttacatgggtggtaatatactgggcataatggatacaaagacaaagcagaygtggaaatggacctcaaagtacttattttataattagaaaaataattatatagttacacactatgcaatgtggaaagcaataaatgccatgagaaatacctaggctaagtactatggacattcagaaggattcattcaatatttattgagaatatttaagtttgaagkcttatgctaagcawaatacaatacttcctgcccttaagcgtaatatttcctgcycttaagcataatacaatatttcctgccctgacagtctaattggaaagacaaayatataaccagataactataacaccatgtgggaaatatagtaataaaagataaagatcgtatatcatgggaatacaaagaagagagatttctgattgaaccaggaggatccagaaaagcttattaaaggaaataatgcctgagctgggtcttcacagatgagtatgttcagcaaaatcataaaacaactacataagaggagtatattctagacaggcagagcgaacttgcggggggagggagcagggagttacgggattgtggacagagggagatttcaatttagttagaattgtcccttgcttggcaaacaaaaagggtgaggaagggattgagaaatgagtatgaagacatgggcaaaggccagaataagggtctatgtttctcaactttatacttcatattacagagcttaggtttaatcagtcccatatgtaataattattaaaagatttaacagaagagaaaggtgacagcttcattttggacaagttaagtttgagattcctaagggacatccagttggagatgtccagcagacagtcagatatttaatatatgcgtcaggagtttaaggaagaggagtggactggcaacagagatttggaaataatcagagttgaaagtggatgagattccccaaggggcagattgtagcagtgagccaaggacagaaacctggaatctccattgaagaaagggtgaaggaataggactccacaaaagctaagaaagcaatcgttgagaagtatgtggttacttaggaaagtacctgtcagaaaaactagaagagcagakaattttaaggaggggaatggtcagtgtgatggtatggcagaggtggttggtcagataggacaaaccagaaatactgacctgagtatcagatcaaagcagaatctgaattgcactgtattagaagttaattgggagtttagaaaatacagacggcatttgtataccatttttcagaaatctggctgaggaagttttgaatcctggctctaccacttaatagttttataaccttaggcaagttgatccatcttctacatctttaaaatgaggatcataattcctaccttatagggtttctgtgagaattaaaataattcatatatgtaaagcactttggaaaacgatctgcatatactctgcacataataaatgttattatgattattaaggaagaagggagatagatgatagctagaggaagagttggagttgatttgtttattgtttggttgtttggttttgggggcaagaaggaatgagagaggttcttcccattaataactgaggaaaagtaactaggtttgaacctgagactttagcctccataatggaaaaacttctttagaactctccgggccttctaatcctggtttactattaactctgcaggacacagtgttcaagttatcttccattccatttcctatggaaagaaagaatatttctggccaggcgcggtggttcacacctgtaatcccagcactttgggaggccgaggcaggcggatcacttaggtcaggagttcgagaccagcctggccaacatggtgaaaccccatctctactaaaaatacaaaaattagccgggcatggtggcgcgcacttgtaatcacagctactcgggagtctgagggaggagaatcacttgaacctgggaggtagaggttgcagtgagccgagatcgcaccactgcatccacctgggtgacagagcaagactctgtctcaaaaaaaaaaaaaaaaaaaaaaaagtacctatttacttacctgccagagttattgtaacactaatactgaatttttggtagtgtttctcattcttgaacttttccttttttcttaaatcttctataactcctgtagacctagtctataagttccctcctctaggtccccaagaaaatcttctctgtccctcctctaggttcccatacaaaccttgtacatatctcagtgatagcatttgtcacattgttgctggcatgatgtcttctctaccagtctgtgaacttccatgtcttgtttatctttcaatcccttgcaaagtcggcttagtatccaacgtattgtgagctcacaacaaatgttaggttgcactgaatgttagaaattgccgaagtagatatggttcatattagtgaagctctactgctggagcatcacaaaaatattttgattgggaggccaaggtgggtggatcacgaggtcaggagatcgagaccatcctggctaacatggtgaaaccccgtctctattaaaaatacaaaaaattagccgggcgtggtggtgggcacctgtaatcccagctactcaggaggctgaggtaggagaatggcatgaacccaggaggtggagcttgcagtgagccaagattgcgccactgcactccagcctgggcgacagagcgagactcccgtctcaaaaaaaaaaaaaaaaaaacaaaaaaaaactttttgagataattgttccttttttcctaattacttaattctttaatgttagaaaggtgaaagtccctcttttgactatggctgaagttgagtcaggatggagtattgttcaaataacttttaattttaatttattatcattaattctgaaatcctaacttagcccttgtcatttaaaagaatcatttttgaaaagagtaaaaatttactaggtaaatgtctaacgccaggctagttcattattttattgaatgtttgccagcactaaatcagaaatatctaratcctttttgttctcatttgttccagtctgctactgccaacctttccaraaaagaaattgtctatcacttgatgaaggcttattttgtgggtcactgtacatgggccagtgaaaagtttgtcaaccttagacgtagtccaaacaactgtttctttaccatcctatcctccagtttttcctaaaaatacatgtacattcaacctatccaaaactgtggctttatatgtatgtttatatactttgtctgttaatacaatagtagtccttgagagtcttawgtgtgtaaatatttgtaacatgtcctattctcctttctctgttgaagcgctctccatcctgtactccagctagcaaaggcagacgtgtaagagacttttgcactttatgtacccatcctgaggccttttacccctctctcatcsttttgcctgtgattgcggaacctgttaatgtttttgtggtatattattacatctattgcatgctttgtgctgctgctcctgctgttgctgtgctgcttttatgtttttgtttatgttttttttttggctttggccgcaaagctttaggaatgttcatataaatcactataaccaaactactaaaatgatatcttttttagtttgatcaaggggaaaagtgatcctaaagtatgccttctaagtagtcaaagtacatgagctcctaagaatcttttgtaagcaagtatgtagattgtttcttagagattttaattatgtagaaagaaaacttgatcattcatgttgtacaacattcaaaaatgatttggaacaaattatacatcttattgactataatttatgtaaatcagttctagagaaatcttgtttttttttttttaatgtagttcagaggaatctcccaaactaattatctagatctgaggaaataatgttaataataaagcctttctattctaagataattccaagatttaaaaaatatcagtaacwttatttatatatgtattattaacaaactgtaaatatcttcctatactaatcctagctctgtgtttctcaacttgaaatgagtcagccactacctctgtgctacaagattctgacatgcccagagatggaatttttctaaaccagccacatcccaacactagtcataaacacacatacatactccctatttgaaaagcgacagggtagctgacagtgttgggattttcatatactatgtaaaatagtaacattcaaaaggaaagtcagtgatggatacaaattcgtaatgttcaccagtcatctccgtggagactgatcaacactttacattccgaattcttagactcggaaagttctagatgagggaattctgtggtttgtggtaggcatgggaagcagtaggggtggcctgctgcttcctgtggtcctgtctttctggtatgttggagggttggttgtaaaataaacatgaataactctaatatagcatatataatattttcggattacagcttaataatgaataagcatttcagatacctgtactatggccagtagaactgcattcaagtgatatctcattaattattgtgtttatgaaasattactagttcaactgattgcttgattattttgaaacttgtagagacttaaaaccattagatatttggatttatcaaatgaatctgaatatatgttgattacattacataacctctagaagggaaaaccaatatgttgtgtgcccagttatattagggtcaaatcaccagcccgtgaattgactaaatttttaactacttgctgttttttcaataaggttataatttaggatttgtttctctcattttattatggattaattatgtctcacttgcsttgcagactttctggggccttggacacctagaacattttttktgaatcttgaaataagaaaaaaawtttggagggaaatagctgttataaggtctctccttaattctatgtctttattctatgagatatgaataaactataattaaccataatctattgacttattattacatatgattattttaaacgtagatataataggcttggttatctgctttcctggcctccttcaatttttctttggttaagtatctcacaaaaaaagtcagccactgaraagtaatagtgcctgtgaagatgcttgaagaattacaaattactcagctgttaaatagaagcatctcagtggtatagtgtagaacctcagtgttccctgggacatcagtstatttcagtaggacacatgcagttaccattcttaacaatggcctctgttgtaacagtagcataagattttatgttatataccatgtttttagacaagaaaatatgcagtattttaataaatttaaaattaaataactatgaaatgtcatatgaatgaggtagtattacaaaataatgtttcttgcattcttgtttctartatgctattaaacctcatttacagtttgaatgattttctttataaatagtattaagwatagtagaagaaaaagtttttattgatagtattgttaatgtccaaatacaaatgatgagagagatttccacagtgctttcattaatagtgagaaacactgaatgtmttatttcagattgttcatttagagtttggagcagagattttatagcccacgtatggcttaactttctcttatgttttcttagaatatgtgtaaattctccagactagatattccaatcagtatattgaaaataacttgagaataaattttcttaaagggaaacaaggtgcattatgtataactagtaagcttacccttactggtcacaacctttagtcatttgttaggatttgttctagmgcaataaaatgtatttactgttttccaaatgatatagtacttctgtaatactgtttttgtatcataagttcaattaacagaaataaatatatcactaaaagatytgagtttatacktgttctcaatacaaaatattaaattaccttctactttgttttcaaaatacttctagctagaggataaagaaaattgatagaaactggattttggccaggcatggtagctcacgcctgtaatcccagcactttgggaggccaaggcgggagaatcgcttgagcccagggtttgagaccatcctgggcaacatagggagaccctgcctctacaaaaaaattttttaaaaattagccaggcatagtggcacatgcctgtgttcacagctactctagaggctgaggtaggaggatcagttcggctcaagaattcaaggctgtagtgacccgtgattgtgccactgccctacatcccagggcaagagagaaagaccttgtctcaaaaaaaaaaaagaaaagaaaagaaaagaaactgggactttttaacttacagtttatgtttaccaataacaaacaacttgttagatgcaagctagtttttagtaggttgaccatatataatccatatcacatcttggtgttttttactttgaagcaaggtttcttatgagaggggttgttacttgtgcaaatctgtaattatttaggcagtagaaaaggcctgttgatacatattcaagatgagtggttttagttatttttattatttataggaaaaccatgctgtccataatttgaggaattcttgataagtgggtcatctaaaaaccagttctgtgatcctgggcggcggggggacctttttaaatgtactactgtaaaaatacatttgaggatcttttagtagaaaaatcctaacagcttcagggaccattatgaacattttgcattaaaatgttttgcagtatggacagtaccactaatattcagcttttcctctttttttttttaacagagcattaagtaaaatgatactgaaatatagtagatgtttctaatgactgttcgtcagagtaacaccttaaagtatgtttacttaggaaaagaaaattagctaacaaaaaaaaattgcatttacttaaagatatttcttatattgaatttataatatctctgctacttatgtatgtttattagcttttgctgcattattatacttaatgctatagtattttagcacataaaaaatgacaaaaagaatattttaacttccatggctaaaatattaataatgattatgtttgtttttaaggttttaaaatactttgtaataaaataactaatggtattaatcagttgctttgctgctatactatatcagagtcattgccaattcataattaaactgaatcataggctgtctttaaatgccagcatgtattcattgaatattctgaaagtttaatagaattaattgctttttagtggatagaataagccattaattataaatgcattggtaggcatttaattgtggttaaaattagtaacttcctgaaaattccagtctggttggcgataattaaaacttgaataaagaaaataagtgatttgtggtgtaacacttttgagatattgtttacactggcggtaaccgagaaatgaaatacttaaatctattaatgttattagcattagtttcatttaaaaggcctggacatttttttttatatttgaaatggtttttgccctgagtttattcacctttaccaagctttgtcctttgtctttaaaagaaacacactttgaaagtaaagtggtaatttttaaattttaattattatattcataggtttttaaaattaaagatatgactatcactataaatggcatagttcaactttttaatatgcctaataccatctcaaaatatttcagtattttcacttatttttaatattttttataggaaaaattacttgattttgtttaaactctgaaattgatttttatttaagagtatatagttctaaaaagctagtatggtaaatttcattattctactttattacaattaaatattttcatttaaattaaatattttctatttctgaataaccaccttttacctcattcagcaaagaaaatcacttttaaatttgtccatatccatattctctttcatttttattgttggagaaaaactagttaggagaataagacttgacagaggagccaagaggtgtgtgttaaaagcctcaagaaaagagttactaatttgtgtagttgcaaattaaattgatagtgtatttttcctttctccaatatcccactgtcataataccacattttcataggaycagcaaacatgctggtaaatgttttaacaaccagctctgggactagagaaagccctgctttttaggttcactgatttcatgatataaccttccattagtccatatactgacaaaatggcttaaggcagtattttctaattttaatgcragaaagtagaagacagtatgcccaacttctgtcagcatgtgtttaaacagctcaaagagcagacctgctgtaaaatttcaaccagtgctattgcaaacagcaaatacttggcctttcccatttttaaagagtttttgaaataatcaaacccagataatacaaagccgttatatcagctattcacatatacacagcattacctttcacacaggaacttcgcattttgtgtctttctgtcaagctgtggggctaaataaagccttttgcaacaggtcagaaactttacarttttcttaagatggctcagtttcttacacatagaaagtcccctacttagataccttaaaacttcttgagatgacatttcagtcagttttaagttcttactggtataaaatgtatcaattctgctttgcttctcasttccattttaactaaagcccctctccatggacacctaattcttgcaatgtgtataatcttaygaaaactaggaggaggagatttttagaaactaaaagacatttctgccatattcccaactcagagtcatatttcatatttataatctaaactgattactttctccatggctgtccctgaataaaattgtaaactgggccaaaatgtgtcttgagtcccattttcttctactttttcttttcctggtcaaaatttactatcaggaaaggaaataatataacttagcctccttgawtattaaattactttgagtaaattactctgctgtggagatgcctctggtaggacaaaaatagtgctgaatttgkacttgagwtgrgatacaggcctggctctccaacttcacaaggcatactagtttmatgaaatcagccacatcacatgtacagagctgatattcagctggtaagctttagttcagtggcccagttttttaaatattgagtatcctagcagttggtaagtggttgctgctccaagacccctaatgccttcacccttcttctccctactcctcccaaatccagtagctgaaagtttatggcctggtggtggctttgtggttaccagaatacctttccatgcccaccacccaggaaggccgtaggtgggcaccaatggagggcacgatagtgtttcccagcctgctagcctattcttcccatacacttgccagatgttttaaattctccacattgaacagaagttgactgtttttaacatatgcaacatatcatacattgctgatagtattctacattaattatcaataggaaaatatccccaacttgagaaaacaatttgtgcccttagagattgaagccacatgcccagagttctgttgagctaaaaacaaatctatgaagttaatttctaggggaaccttcttttccaagtgtttctactctcaattatttatcattcattcaaagtgaaattttgcttttcacttagttttgagtacaagggcattgtattttaattcattgttttaatagttctactttgccagcagtctcaactgcacctgactctttcagcagtggcatttctaagggatacgttatcatcatgtcttccctctaaaatatagccatagtaagaacaaaggaaaataattataagttcatgtttaaattcttaaactgatggtgtttttatgatttgtgatttctgatctaaacattgttttgctgtacaacatattcaaagtaagttcctgaaccacttttccaaattaccttcattgtcctttcattttaaaaactcaatcctagtaactctgaaacttgccatacagactagtatggttcaatcagtatggttcataagatcttttatgctaaattttaacccaaagcatttttaatttctaaaaatacttggtgtaaaaggatgcgactgaatataagtgctggtttttctactgatgcaaaataaagggaagacttactttagtgtcctgcacaaaactgataggttaggttttttttactttcagttaatgagtagtaaaagaccaaacttcattcttatcaaggacaaagttatctttaatctgccgtatgtrtctctattaagtacccggcatttatttcacatgtatgattccttttgtgaaataaaaagttccatgtggaataccaacatagaatgtgcagtaggaccagggctcaaagtaacagatcaacagtgaagatcagggaggagcctttggttaactattctgtcaatccttgtttacattaaaggtagtggttatgcttttgtataatgatgtatccctaacgtgaatattcaaactaaagtttgttatcctcctttctcaagaaatgttgtcataatcatgccttacagaaatttgctaagmctgcacattgttgaaaagtgattttttgggtttttatttttcccgacttattttcctagactgatcccgttgagaacacatatgtatggaacccgagcgtcaagtttcacatccagtcacggtccacatctccttccacatctagtgaagctgagccagttaaggtgccttattggagcatccctgctccccaacttttcacttgtgtcagaaaagagggaattgaataaaacaagtctgtctctctcctcttaaccaaatatgtaataagttacagtctattggagatcattacatttaactgataatgtaggtagaagtaaaaaactaaagagcacattgtcctcaaatagtcaatctgaaatagacaaaactaactagaaagatagtctttattttaattagagaaccatgtagaacagaagattaattatgtaaatttttgaattattagaaactctaggcaaatggcagtgcaggtgccattctcatattttaattcttctaataaatgtaataggtcatgatataactaacctgttacatcataaatagagctgaaaaataaaatagccacttctggcaactgaatagttcattctaactgctaaattggtaacagtcaactaaatcctgacatttaatagtgcaaaaaaaactgtgttgtgtttacacttcatgtcaatcaatggttttaaatagccaataggccaattttcttaacagagatcatttcttccacaagtcaaaagaatgctgtacctcagtccataccatcctaccttaagatcagctctggttcttcattcagcatcaggattcagacaaagctcctttgctttccttttcttaaatctccagagctgtgtctagcattccaatagaagcagatagtccaatctgaagagttgtctgaagtgaagtgtgaggttgtagtcaggttctgacttgatttttccaactctgtgacagactcccccaaattgtttaagttaatgagaccctcttgtgtttttagttataattgttttaatattttgagattatacatttttgttttaatgataaaatatttcaagcattcagagaatataaacacccatgtaaatatcacccacagattaaacagatacgaaaattttgcttgtttttcaggtttttattcaaaaatatttcagaaacagttgaaacatcctcgtgtatacygttccccactcttctttcccagacatatctaaatatcctgaagctgatgtgcatcttccctttcttggttttagatgttcatttcatttgtatccayaaatgatacatagtagtgcttattatgtgtttataatttacataaatattacctgtatccttctgtaatttttttcattcaraagtctgcttttcaggtttattcctacagatatgtgttcatttagttcattcattataactgtggcatataccacaactacttatccattctcctgcagttggatatttaggttgtttccaatttttcattattatcagtgctgaaattaatatcctaatatctrtttttgcaaatgtacagagtttgtttggcatgtatacttagtggaattactgagttgtatgttatatgcattttcaagtttaactggatcttgccaaattgttttccacagtggttggaccaattttcactcccccagcagtgtgtgtgagttccccatttccccacatcctcacctcacagtcacacattaacttttgccagcttgatgggtattaagtgtcatttttgtattacatctgttttctagtgttattcagcatctttttgtatgtttattgaccattgatgatttgcctgtttgtgtcctttgttgttctattgaatcatttttcttatagctttttgtgttcattatatactctagatactaattctttgctagctatatgcattgcaaatattttctcccagtctgtggcttattttaaaattttatttgtggtgtctttttgtcttgcaaaagttttgattttaaaatagtcagatttatcagtctttttctttatgacttctgctttttatgtctttttaaaacagttctctatgcagagattataaagattttcttctatattttcttctaaaagtttttaaattttgcttttacttgtttaggaccttaatcaaactgatatatattgttatgtataatgggaaatgggcttctaatgtctttttcccatgtgaacaagtgaccctgctatatttccccccatcgatttgtaatggctatttctgctttatatgcatggatctgtttggatactctcaattcttttccattgttcttttggtttttcctgcattggcagtaaattgtcttaattacaattactttcactctaaaataattcctgatacctggtatggtgagccatcccacataccttcttccttttcttcttgaccttttagtttttcatattacttttaaggtcagcttgtcaaatttcacatggggcttttgattggaattgcattaatgtatagatctatttgaggagaattgacatctttcatgatactgggtattccatctatgaacatggtatacatattagggattctcttatatccttcaataaagtttcattattttcagtgtatttcatattgcttgttagatttgttcctaggtaccttaaattttttgttgctgtggtgactgggattctttttaaatacattttcttactgtgcattgccttgtctttataaactctagatcttgtatccagcacccttgcttaattttttttaattctaataacctttggactttctatgtaaatttgacgactttgtttcctattgttttttattaacttttgtatagattttcagtgttcctctcttttatctttcatatgtatcttttcaaatgttaaattataagtttggtttaaaactttttcaagctatttaaaagtaaataaaatctaaattagagctaaactcacaaacagaaaactctgagaaactcaactgaattttgttytaaggctgtagtgcttataaaatattctgtttttggaggttgtatggtaacaaagatagattgttgtatagtaacaacaaagatgaggttgtataataacagcaaagaaaggaccatccatttttcttataatattttaaaatattctgttctttatacaaagactagcgttttccttttatttttttgcttggcatcctgaaaggaagttactttccatgtcttttttttttttttttttctcactactttgctgattaagcagtggctcttttttccccataataacatccagtggaatgattggttctttgcattcaaagaaataatattacaataaaaccccataaaagaagaccatattttacatagctacctaagaaagatatggtatgtgactaaatttgtattaaagtcagaattccaataatattaaataattacaataaaattaaataattcccttctttggaaattaatttctgcacaaaaatcccagtgtcagtctctgtctatgtattcacatccagagctgtgttctatatatgtaatatatgttctatgtatgaaagttgagtagttaaaagaatcttctaaatattttattataaatcattttgagatactttttagaatatggcaaattcagatgaatgtaaaaattaatatcctcatatttatgtaggccacatgctatggctttttttatttgaatcatttgatccaaatgatttatttttatatttccagactaaagtaacttactaattgaacaaatatttcattcgtagatattgcaggcagagatttaaattatcaacactatgagaattttagctttattgaggttttctttattattaattagtagaactttttgccttattgatgttttgttttatttattttggcttctttctagttatatttgaaattaatggagtgtttcatgacatttatttccttttttgctcctgggttcagactgtagactccactccactttcagttcacacaccaaccttaaggaaaaaaggatgtcctggttcaactggctttccacctaaggtactcaatctagttataagcatagtgtgttccaaaaaaaatgaattttatctgctctatgcatttgctgtgatttttttgatattatttcttcaaatttacaaacagaaaaacttayaaaataaattatgtgtgaatgcaaataatcaccaataggaaaggtagggagagcgtacagcactttttcatcttcttaaattcaatgttttgaagtctgttataataagaagtagcacttcctctaagcagtatatgcctcagtaaggcattaagttgaggccacttgtggaagaatctgagactgaaatcaataaaccagtgagaaagaaaaacgtttagtgaaaaattcaggtggacttttttttcccattctatttgacataaataygactgaagtattacatatggtagaatgagaagatttagttgcttgtctcaagctcccacaaagaaattccagaaattggaaaactgaatgatctgcctctccagaacataaaccttggataaaccacaaaatgagagagagaggtcaatagacctgaaaaaatatacaaaaaatataactgatatagaagaaagacaaactgaaataacctgtgcccagataaagcaaaattttaaggccagatagaacatgaatttaaaataaacataaaaaatatccttaaagagataagaagtatgttggtaacatgaggcaggataaggtagttaggaagaaaaataaattgggaatacttgacatgaaaacataactgctgaaataactaaatagatgactttaatagtagaaggggtaaaatggatatcacagaaaaacaagttagtaggagggaagataagatgaaaaacaggaaagttaagatatatgacaacccaaccaaaagaaaacactctagtaaactaaaggtttataaataaaaggaaaaatattgggcattcaggcaaaaaatatgtcacttaaaggggaaagaaaatgagattatcatcagattttttcatagtarcagtatgctaaaaacaacagcagtgaaataacacatttaagatacccaaggaaagtacaagtgaaagatttttaaggatttaatattttaaggatagtaaagcatactccaaaaatgaaggccacagaaaactattaagaacatgcaagagctcaggaaatactgttcccataccccttctcaagcaatgtgctagagaacaagcttcagacaaccaaaatgataagacaccaagtactttgaraggcaagagtgaagcaggagtctagagtaaattagagaattgattcaaagtccacataaagtgttataccagttctgaaaaccagacaactaccccaactcagcaatacgttaattttgtgaagtaattaaaccaaagagatcacaaatttaagggcaccaaccaggctcactggttggtgagagaaagaagtgcaaaaccacaaatagttgagatttggcaaaagtccatgtactgaatggcgagacttcaaatcctttcctctgcttagctcccagaatactgactcttgggactgtagcctcctcctccccactctgcttggagaggatatcagtggatcctcgggtccactgaatggcccagaaaagacctatcgataatgtcatttggggctccctaatgagatggctaggtcctttcttaacaagcacatcatatgtttgctctcatgtggacacatagatagacacaaaatctctttagcttttttactgactcttaaaaatgttaagattcccaacagtcagtagacatttcaaaattatctaacaaaggaaaaagatcagggatacgtggtggctcacacctgtaatgccagcattttgggaggcttaggcgggctgattgcttgagcccaggagttcgagacctacctgggcagcatggcamaaccctgtctatatgaaaaatacaaaaattagccaggcgtggtgatgtgcacctatagtgccagctacttgggggttgaggagggaggatcacttgagcctgggaggtcaaggctgcagtgagctgagatcgcaccactaaactccagcctcagtgacatggtgagaccctgtctcaaagaaaaagataaatatttcctgtttttgttgaaggaaaaagggacaatgcaaaaagcagaaagaaacagagcaatatgagaacaagaagtctcaagttaaagaaaatatgataaatattttttaaattcagtagatgagtcacaagataaatttgagaattctcttagaaaatattgcaaaaaatcaggtagaaattaggaaaagaaaatatgagaaatccatatccaacaagtagaagttcctgaaagggaagacagaaaaaagaaaaggaaggaaattatcaagtaagtaaaagactttttcctgtaactaaaagacatgtttccagattgcacagttccatcagtgcctactagcactagtggatgacaaatacctgtccccagtcacatcattgtgtgagttttcaagataccaaagatagaactttttaaacctttaaggagatttaaaaaagatcacatccacatattcaggaattgaaatgacatacttacccaaggcaaaatgaaaagaatagttagaaggtaaaatgatttcaagctagaatttttgattccctgtcaaatgtcccatcgagttgcaggggggaaaaaattgcattttgagaaattccagatctcaaagaaatttttatcacccatgtgctactttctaaggaaacttaattagttctaccagaacaaggaaggggacaaggaaagagagacatgaggtctatagaagaaggaattgtacacagaccggttaagagaaagactgkaataggaaaccagagggcttcagcagggttgtcttcaggtcaatagaaaggggtaagggggctgaaaggcttccagtgtgtttgaccatgtggtaaatagattccaggrgattttacagttccttagaagagtctggaagatttagtgatagagatacagaaaggtaaaagtcgagggtgggaggggaactattrattttagaaaaatcatgaggttatacaagtaagatgataaccatagtgtacttcttattagtgaataatgattctctagtcataataacttagacattacatataaattttaagctaaaactactataacaatattgggaaaaatgaaaaaagggagtagatagtgtaaaagggccatatccttctctaccatagcaggaagtgaacagataacrtctcaaatcaaaaaactgtagtataggctttccaccccagctctgccccgcccatatagatacctattacagaaggagggaaatagcttttaaaaaagragagttaaatgaaattgcctgtaggaagtaggaggaatacttctgattttgtcataagcattgtaataccattttactttttcaaccatgtgtatstattaatttgattttaaaaatttaaaacaaaaatgtagaaaaattttttgtgactgggaataaatataagatctcaaatcacaagcataaggtgaaaatattcgtgggctttayatcaaaattaaaaatgcttttacagtgaaagsattgttaacagatgatgacagactagtggaagatatctgcaatgtttaccactaataagaggcttatttctaaaatacataagaaactcctgcaactccatatgaaaaagactagaaatcccattgaaagattggcaagtgatataaataattcccagaagacgaaatcctgatggtcaacaagcatgtgaagaaatgtcccaacttcattaatcattggagaaatttttaaaatttaattttagaattactatcactttctattcaaaatcaagataaaattaagtaagatgacgtcatggatgtggagaaacaggcagcttcacasgtggatactggaagtataaacgggtacagccattctggagagaacctagacagtgtagagtcatacgtaagctgtatgactcagcaatctcatttcatcagaaaaatctctttcctttacaaaaacctccatacagattcattaggcaacatgatgaagatgtttattactgtattttttatggcagtagggagttggaaataggggaaagattcctaaaatgtaattgatatataacagaaacacatttatataaattaaaaacacatactcagactatctaatttataaagatatatacatgtccaaggtattggatcatcaakgatgaaaaggcaaaataagacaaaataaaactagagtgaggcttctatcaagctgatattattttatgaattaaatattaacttagtttgttgcacctaatatttctccccaagaaataaaatttatttcatgttttttaaaagatagagaagtgaatctataattatctcaaaatagaaattttaaaagggaagaaaaaatatttttaaaaagaaaattaaattttttttttttttttttgagacgaagtctcgttttgtcgccaggccggagtgcagtggcgtgatctcagctcgctgcagcctctgcctaccaggtttaagcagttctcctgcctcagcctcccgagtagctgggactataggcgcatgccaccatgcccagctaatttttgtatttttaatagagacggggtttcaccatgttggctgggatggtctcgatctctggacctcgtgatccgccctccttggcctcccaaagtgcttgggattacgggcataaggtaccgtgcctggccagaaaatttaatttctttaaaacattttaaaattttttgtaaaaaagaaagggttgtgtgagatactctttgacttgtcatttattagtggtaaaagtttaattatctacagtaaatttttaagctttcaccaagagttgtacttggttctacttggctcttacatcttctattaaaaacattttactttctccaatgtgtagcttaaaatctacaacacagaaaaaatcagagtagaaaagaactctttctaatcaccactttgaaatttgaggttatggttaattctttctactccaaatgatcacataatctaaaattctaattttagtccatactttaatacctttcttactagatttttttcttttcatttttttctcttcttccagctgtccacaaagggaagtattagatatcaaatattgaccaggaggcaggaaacagggatattagaagccaaggaatctagactctaagatcgatcattcctgtgtctttctttatacattttcacaccaaaacaaaaacaaaatcctattgtgtattacctaaagattgatggcctcagaataacgatctttaattatgttatgttatactatccttagtggagattagtgaaatataaacccgttaatctttagtagtggattacacaacctctcctataatttaaccagcacctaccagttggatgatttattacctaaaattaatgctcagccaaaacactgggttgttatatttttccctgctgtcatactcagaattgtgacatcctgaatagatctcttgctggagaggaagtgtatgatatatatatatatcatatatgtatatgtgcaattcgggaggtattatggagaattactaataaatttgtcaaccctagagttgtttcattgctactgtttcaggtatgtcttgttactgtttagaagaagaaaaacatgaacctacttagagcagttgattaatttttccttctttgtattcaaagcctctaggactaaccagtaaaataacttcacgtcttttgcattaatgcattttgaacaattgaaaaagttagcactagaaaatttactcataatagtttctcaaagagccaaaaattaaaaagtagtatacaggagaaagagcaaaattttatgattttaatagattccttcatataaggaaataatatctatctttccaaggtggttatttgcatgaaataagatgaattatgtaaagtactggtacagtgtctgtaccctgactgggactcagaagctataggagcagttgcagagttagtaataagatagactgtgttctacttagagtcaaatcctagtgctgctttgaaactgaccaaaagatcgtgaggaacttctagaacacaatgctttgaggttggaccagagctcatgaccactctaaatttgagactctcaccccattctctgactaatgctggtagtcaggtttttctatgtaaaaagataatctacttctatttttttaatttcttttgtagtgtacaaatcatatatcccagttgaaaagaacaagatttatttttaacttgaattttaaagcttcaaatattccctttagttttttgttcatatgttagtgtctactgaaataaatgctacttgataaccttttaaaatcagtattcataatttattagaatatggagtagagttcttagtagtttaaatcaatcacacatttacaagagaaaaaaatagcaaaattcaaataacattgggtacccatggacataaagatggcaacaaaagactctggggactactagagaaggggaaggagggaggggtgccagggctaaaaaattgggtactgtgctcagtacytgggtaatrtggatcggtcatgccctaaacttcagcatcatataatatactcaggtaacaaacctgcacgtgtacccacaaatctaaaataagagttgaaattatttttttttgagtacttagtatgtaccaggtactgtttgaaaggctttgtttatattaatactcatttaaccactccgttaggtagatactattatttatcctgttttgtagataaggaaagtgagacagagaggaatttagtaattttttcctaagttcacacaacagaatgaaaggttatttattatacatcatttattgttaaaacatgctaagagaattaatttggaaaacaaaggaatattccaaagagataaartctacatttgcttaccaccatgtaaatcaggtaagactaagatacctttaactatggtgtattcaataagaaatttcaatctgccatctgtctctggaataatatttgtgtattcttatctgctcaagtgttatactgcctctttccataggaggaaactgattcgtgaagcatattatttgtccttggtcccagaaagagaaatgcatgatttacagtagaaacaataattttaaataactctttttcctaagaaggtataaagcatattaaaatcctatatttgtatcagtataaatatgcaatattttacttaactatttgctgaacaataatttggataatttattaaaattctgaagctaagatttatgagccccccaaaaaagctattgtttattttayatacttttaaaatggcattsaagagcaattatcatttaacttcttaattattttagcttagtccagttcaaattacctaataaaaatgtttaaagaccataaactrtaagaagatgtaatgagaaatggaaataattcattctattcckatttagaaaacattctagaaagtggtatggggcataaggactcacattatggaaatcttttaaacaatctgtgtgtttttttatcaatttgttttgcagcgcaagactcaccagttttttgtaaaatcttttactactcctaccaagtgtcatcagtgtacctccttgatggtgggtttaataagacagggctgttcatgtgaaggtaagaacacaaaggaaagaaaatgtgacttcactatctaaattgtaatcaaataagttgattctctttcaaaggtgtataaatgtttgttktacttaatcatttgcttttttgcataacaggaatggaaataatctgtgttgtctgttgaatgttcgagaaactagacatatttttcaggggcaatatatttaaatatggttcatttgtctttgttttgttattaaatttgtagtccctgccaaaaaacattaacctatctgacagaagaaaattcattgaattttaaccttgtttaatttattagagaaattgttattaaaaagtagacagtgtgggaaccttttcagaaatattaaatgtctgccactatgtctgaaagatattttattcctgtattaatagcagagrtttttttttttcccctaacatccatgatttattcatcacatgtttatggaacacccactgtacttctaggcactggggacataatagtggataggggaaaggcatagatcctaccctcatagagcgcacattctgagtgatgaaggagagagggtcaggggtcatgtgaacagaaaagaaagtatatttgtttgggtattcctttatttttcctaggacctctgaagtgaaaatggtttaaattataatggaacatatatttttttaaatgtttcagaagaatacttttttaaaaaatcaaatgaaatttgtcattacaacactacctyatatgaggggacttcaaaaagcttgtggaaragtagaatttaaaaataaaaataaacaatataaactttttttttagcataagctccattaagttcaagacaactttgtaagcaattataccacccatttagtccatccctgaagaacagagggtcctgagaatgtaaccatgtcagtctagtctcctttacattattaactgaagaaagatgggtgcccttaaagactttttgaaattcagaaacaaaaaagtcagaaggaaccaaatcaggactgtaaggtggatgcctaatgatttcccatggaaacactcacaaaattgctgttgtctgatgagaggactgagcaggaggagcattgtcatggtgaagaaggactctggtgaagcttttcccaggcgtttttctgctaaagctttggctatatttctcaaaacactctcattataaacaggtgctatcatcgtttggctctctaraaagccaacaagcaaaatgcctcaagcatcccaaaaaactattgccatgacctttgctcttgactggtccacttttgctgtgactggaccacttccacctcttggtagccattgctttgattgtgctttgtcttcaggatcatactggtaaagccatgttgcatctcctgctgctgttcttcaaagaaatccttcaggatcttgatcccacttgtttaaaatttccgttgaacattctgtagctgatctgggtgcagtggttttggcacccaacaagtaggaagtttgctcagcattcatttttggtcagaattgtgtaagctgaaccaattgagatgtctgtggtattggctgttgtttgtgctgttattcatcagtcctcttcagacagagcatgaacaagattaattttttccctggcaaattaatgtggaaggtttgctactgcaggtttcatctttgacatcatcttatcccttcttaaawtgagttatccatttgtaaactgctgatttctttaaggcattgtatttgtctcttctcamattgctaataaagatatacccaagactgcataatttataaaggaaagaggtttaattgactcagttccacatgactggggaggcctcacaatcatggtggaaggtgaaagaggagcaaagtcacgtcttacatgtcggcaggcaagagagcatgtgcaggggaactmctcagatttcacgagacttaatcactatcaccagwgcagcacagagagacctgcccccatgattcaattacctcccactgtgtccctcccatgacacatgggaattatgggagctacaattcaagatgagatttgggtaggaacacagccaaaccatatcaggcattgtccccataaactttttgtaaagcatcaatgatttcacccaagcttcattgtaaattttatatttgttcttacttaattttagcagaattcatgttgttctgataggggctcttttcaaattgatgtctcattcttcttagtgcctcaaactagatccttttcagacatattataacaagttagtatgcatttattttggtgcaaaagaaaattttaaatccatgcatagtttttccataatatgcattttccatgaacattctgaagatctctcatattgatgtatcttatgaaaaagacaagaaaatagttgctaactcaaattctaatactagttgccatttcctgtctcttctgctgttagaaygggaagggaccttaaaggaaatgtagcccatccccatcagatgcatgtgtttcctttataatagacttgtagttagcctgtatctgagtactttgagtaagagggaaattaataacatcttaaggcagtgcattctgtttggttagttctcacagctaaagtgaaagatccagattgcagtattttaactaatccattagatatgtgtgtttaaagccaaataaaatgttcagggttaagaaarcagagatttaagagctaggagtgtattaagttataaacatgaatgacatccaggaagtacatgtagattgagaagagagcaagtacatgagtctcttacatagttaagggaaggcaacaggaaaagatagccaagttaacctgagaaggaatcgcctgtattgttgactaggaaggtgtgactgaaggcaaagaaggagaaaatttgtagttttcaagctttgtttcattttggaacttagccagtaatggtatgtcattttaaaatttgtttatcagaaagaatcctggccagctacctggctttaagtcccatgtcattttttatgcaccacaattacttgcaattcatagtaggaatttttgaggtcttctcagactctcttcccttctagagtcttttgctgtgaaattgtgcctatcttttcttcagaccctttgaagcctactttatgaagctatggggactcatgagactgttcctagcctttgtctgccaggcttttgtaaatgttgtaataatgtggttccagcttctaaagattcctgtcatgttcctttccttgtggttggttggaattagatccagtataggatacttattttgttgcttccactgccctttgcttgtaagtaaaacaaatcataacttgctagatactccacttaaaactgaattgaaggccgggygcggtggctcaacgcctgtaatctcagcactttgggaggcccaggcgggcggatcacraggtcaggagatcgagaccatcctggctaacacggtgaaaccccgtctctactaaaaatacagaaaattagccgggcaaggtggcgggcgcctgtagtcccagctgctygggaggctgaggcaggagaatggcgtgaaccccgggrggcggagcctgcagtgagccgagattgcaccacygcactccagcctgggcgacagagcgagactccgtctcaaaaaaaaaaaaaaaaaaaaaaaagtgaattgaagttgtgtgtgatgactcatgcctatagtcccaactactcaggaggctaagacargaggatcattttgaggccagcctgggcaacatagcaagaccttctctttaataaataaataaagtgcattgagatgtttggatgakttttgtcatcttgcctctctgctggtttcacagtatccatcagtgatatgtagtccatttatagagatggtaactgtacctctcttagattgttatagaaaaataaaaagcactccataaagttaactattgttattttagtagtagtttaagtatatgtaataataactcctaaaatttacctttaacttgtacttttttagtcattgaaaaactccattttcaaggattggtagrgtttgccaaaccgaagatgtcaggtagcttaatgcccactagtgacccttgcaacagaaatttcaaggcagataccaagttgcagtgggatgaagagcaaaaaactctagaaaccactcttttagaaaatctaaatcaatcattttattcacaagrttagatgcttcgtctgttgcttctttttttgatcactaatgtcaatacagaacagcagtaatacaagtaattttttaaatatttactatgtctcattaaaattgtcattggtaagcaaatgaatcagctacccaaatgataaaacagttatttaaaataaaattggagataagcattcatytaacatagcatcttgtatgcagtgagtgttaygaattttctttttgttaaaatgaatttttatcaaacgtttcttttttccctctaaaagtgtgtggattctcatgccatataacttgtgtaaacaaagctccaaccacttgtccagttcctcctgaacagacaaaaggtcccctgggtatagatcctcaraaaggaataggaacagcatatgaaggtcatgtcagggtaagtatgattaagttgggtttagattaatcctttaagatttattaatgaattaaaatcaaatccagttagtttaagaggatagttcttgatggaaaattaaatgaataaaattcatctaataattttatttcatctagaataatgatttgcaaacaaaaacctagcttttacatggaaataagttataaaatgtctcaagtttttcyatattgttcctatcttgtgatgaaatcttcataaaggagtttgtggcccctgctcttgcaagagaggtggcatatggttatgaattatgagctattaaggcatagtcttgttatcttgggtagtatttacaatgtaagctgaacttcatcttacaccaagtttgacttttatgctatttagaaagaaacccatgagtgttattttaatgaaatatgagtgaaagttaaaatggtaccattaaaatgtttctcagaataaaaagtcattctgtatttgaagaatgtgttctcacattttctcatagcttaatgatatgtgtctcatctgctactttaccaaccagaatggcagacttataaaacgtgtacattatctgtaggtcttcaccatgcaattacatatgtaatttaagggatattttcatttgagttgttttggctgtttgtttgtctgtctaaaacaaaactaagattcctaagccagctggagtgaagaaagggtggcagagagcactggctatagtgtgtgacttcaaactctttctgtacgatattgctgaaggaaaagcatctcagcccagtgttgtcattagtcaagtgattgacatgaggtaagagtttgaaggtaaaattatttgtatcattgcaacataggaattttaaagtttctgattttcaaaaattgtgttgccatggtttatttraatgaactaatttcgtattttctaatttgctaatattgctatagaaacagaattgaaaataggaagtamggtgtatttataggacaggttggtatgtgtgttgagtgtgaggggctaggagttaaggaaaaagaagtyggtgtcccaaagacctgtgtaaatggggtaatggaggcctaccatgtgaagtttatattatcacatcacctaaaggcttagagtataatttcaatgtgaggaaagaaaataaaaatcagaaaggcttctggaaaacataatcagtaaacatttaagtaagtacagcccttgaacacttctggtctcatttttcagattcttcctgtgttccttagttctctctcctttaccttttctcctaactycaggcactatccttgagtgatcatatttactcacagcttcagccatctcctctgcattgatgactcccagacttgtatctccagttcagatatatccatccattgctcaaaaccggaatttctagctgtgactcaaattggcacttcacattggcatctcaaacrcattatcttcccctacaaatatggaacatgayaggatagatgcaagaaatattggcaagaaaaatctgatagaacctactaagggactgaatatagatagggaaaagaatcacaaataggactaaggtgtcaagcctgtaagactaagggagtcatggtaccaacaacaaaattaagggaatcacaagaaattattgtggaggaaatacgttgtagatgttgaaggaacaataaaatataacatgagctgggttgagggtacttaagatttattatgggaggcaagagggtccactggaggctccagagacctaccagggttcaaatcccagttctacgtgtatacttaactggccttgtgactgtgggtaagccagcaatgatttctagctcttgtataatgtgccactaggaagttattcttgataaattatttggggcactattaattacaatgggggaarattaatttttttaaaaaattaaatttggstgtttggtgcagttaagctttgggtatgtgttatttggatacacaccccaaaccacacacacatagccacatatagtaacttttaatgctttgcttttygttcagggatgaagaattttctgtgagttcagtcttggcttctgatgttatccatgcaagtcggaaagatataccctgtatatttagggtaagtgtgtatgctgtaatttgatcactgaattatgtgtttttaatgagtatattttgcctccctatataaatcataaattcactataagtaaaaccaaatcttatattcttttatatattccatatcatccagtacttgaaggtatagaaaattggtgctaagtatttaattagtgaaagacctggagaaagcatcaatatatggcttataaaatatgcttcctggtagataatattttttagttccaattcaatttttaaataaatactaccacatggaaaattagataagtgtgaggtttctcaagtttttaaaaaaataaaaatgtctgtcttgaaaaattaatgcgtttgttacttactgctttgtaacagccattccaaaacttagtagcttaaaccaacagtgatttactatttttcactattctgtggaccagctgtacagttcttgtggtgtccgctagtgtcactgatgtgactgcattcagctcatttgggaccagaacatctaatgaccttgctcttacatctgggtgctggctgttagctgggtgatctcagttctcctctttgtgaactccctccwtgtggtctctggtcgtcaggtaggctggctgagctcccagtggctggcttctaagagagcaaaataagctgccaggccctttgaggactaggcccaaaacaggtataataacccttctgcattctgttggtcaaagcaagtcatgaggtcagcccagatttaaggggaggggaaatagactccacctcttgatgagaagaatggaattccttaggaggacttgttggtaggcgtctttggaggcccttgccacgatgcaatcttgagtkggtaaattaagacaatagaggttaaaaaaaaaaactactgcccaattgttatgcctatctccctatatttgtctatgaatcttgtatctaaggaaggtcaggcaaagattatacttagtctcttagttcccagactgacaactatttattttcctcccagccaccaagggagcctacagaggcccacttatctataactgattttcatagtgtgagtttattgtcactgctacttaataaggaattctttacttatgataaggaattcatataggtaaaatttaaaactgctctgatagtgttgtttgtrtaatgataaaccttcatttaaatattaatttaaatggtcaaatcttaatgataatgcgagttattgttgtgaagtaacagagaatatatttctgagcacttctgaccttaaaacaagtcacaagtcagtatggtgtggcgcttaagagcatgggcacaagatcccagacttrtagttgtrtgtccttggagaaatgatttaatttctttgcatcaccatttttttcatatataaaataaggatataatgacagtacatcctaaatcatgacgatgttaacagagttaaatgagttaatacttgtaaagtgcttagatctacctggtgctcagtatttactcaataaatgtcagttgttgttgttgttgttatatatttaatgcctctttagtgatagtgttctggcacttttacagaaggaaaatgaaaatgatactaacatttcaaatggtrtctgccacctttgctttgtcatgtattctagtgctaaaggtagttattctgattaggaatagctgaactccagtaatggtatcatttaatgaatgctyattttattrgtgagtgctaagcaaactaacataatcatgaaacyagcataaagggtgtctgttttctaatatcatgaatattgattaaattgttctaggtcacagcttcccagctctcagcatctaataacaaatgttcaatcctgatgctagcagacactgagaatgagaagaataagtgggtgggagtgctgagtgaattgcacaagattttgaagaaaaacaaattcagagaccrctcagtctatgttcccaaagaggcttatgacagcactctacccctcattaaaacaacccaggcagccgcaatcataggtatgaatttataacatttatcatattattatcattgtttactaatctaccttgagaacagggattggctttcatctaggaatccccagtgtccaacatactgtgcatcatatcataaatgctcagtacatgtttactgaatgaatgagacctatatcagatctttgtttttcagtaaacaggagtataaatacactttcaaagtgccttttttttcctgaaaaaacaacagtgctaagcattagcctactaatctattttctgcttgtgtgatttagaacaagttagtttcttagagtttaatatataaaatacagatggtaattaccttgctraggttattgggaagtttaaataagatggaatacataacacagagtgccctgcataagaaagaaatccccttaacaaatggcagtttctgtgtctggaggtttaaatttttgctgtattcctgtgtatgcatctaactcttttgttactktccataaatactgaaaagttcaatgagtatggttcaaatgccattcacaatttttacctcccaaaacaataagtgtagaacaacttaggtttttcattttgtttcatcatttattaaacatttacttctttttgtaagtmttgatatggattattctttaataattgttctattttagaagacatgagagatttaccagtataatctgaaaggaaatagtgtaaactgttattgtaattcattttatttccattttttgcaccaaatgttcttatcatctggtttattagcattacatggtttttttcctaataaaaatctttcacattcatgtcttacatagatcatgaaagaattgctttgggaaacgaagaagggttatttgttgtacatgtcaccaaagatggtaagagaaaactttttttttttggagtaattttaaatcatgtgttaaaaaaatttaaactgtagattctaaattctacaaagagcaggatttgctcttatttatcctgcgactaaaattttccagacctaatttgacgtttataaattaaaagattatttttaaatttctataatccccctgaggtttaaaacttcaaatatgtrttgtctttcttgtatcattttatttaacagttctgtacgaactcagattgcatttctttttttttttttggagacagagtttcactcttgctgcccaggctggagtgcagtggcaygawctcggctcattgcagcctccgcctcctgggttcaagagattctcctgcctcagcctcccartagctgggattacaggcatgcaccaccacgcccggctaattttgtatttttagtagagaygaggtttctccatgttggccaggttggtctcraactcccaacctcaggtgatccacccgccttggcctcccaaagtgctgagattataagcatgagccactgcgcccagcccagattgcatttctaaagatggaacatgaaaaaaaatatatacaacttgattttcacattgttctattagtaccagaagaggcaacagctattaaaatgtgtttgtttggaggtttttcttctagggaaaaactaaatgctgggtgaaataaagagaaaccaatataacttggtattcataaatacagttttatctttatgtcarcttagatcatgggaaaacaatgcattgttagccatataaaaacttctgaaaaataagttctctgtttttaaaaatgggaatcctatggtgacgttccctagaatttagtgccagtagaaaagtttccttgaagatttggcatacttttacacaagaatcctttggggtttgccttggctgccagaaatctcaggactcaaatttaatacgtactataggtgagttaaattatcttatgatgggttggataatctttttttcctgtgacttctgatgtcttattcttccgtatgtgcatctgtaagttgacttacatccttttgagtataattggratatgattaatcaataaaactatattttgatttattattctttctgtgtttagaaattattagagttggtgacaataagaagattcatcagattgaactcattccaaatgatcagcttgttgctgtgatctcaggacgaaatcgtcatgtacgactttttcctatgtcagcattggatgggcgagagaccgatttttacaagctgtcagaaactaaagggtgtcaaaccrtaacttctggaaaggtgcgccatggagctctcacatgcctgtgtgtggctatgaaaaggcaggtcctctgttatgaactatttcagagcaagacccgtcacagaaaatttaargaaattcaagtcccatataatgtccagtggatggcaatcttcagtgaacaactctgtgtgggattccagtcaggatttctaagataccccttgaatggagaaggaaatccatacagtatgctccattcaaatgaccatacactatcatttattgcacatcaaccaatggatgctatctgcgcagttgagatctccagtaaagaatatctgctgtgttttaacagcattgggatatacactgactgccagggccgaagatctagacaacaggaattgatgtggccagcaaatccttcctcttgttgtaagattctctttcttacggctgtcttatctttatatctcttcttccttttcccttctacttcgtctcccaaatgttgtcattgttgataacagttttttaaaaaagtcattcttaatgcttttcctcagtattgattatgttgttgatgtaaaaaccatatgtagttaggcctgggcaaacagggccagcattagcatgcacgtaatttaaacaaaacatctttctgtggaatatttcactaagatggattttttaccccacatcatattttgaaataacccagaattgttatctcatggtcccccaaaatatggtgcttgtaagcatcagtgtttcacagaacttattctggagaagtagttactaagtgagttatttaatcaggtatgtaaaggtataatgtaacatctataagaggtgttttttcagttttccacttttatctagatgggtagatatttataattgcttattttaccccttcaagaaatattaagacataataaattattgaatactttttttttttttttgagagatggagtcttgctctgtcacccaggatagagtacagtggtatcgtcayagcccactgcagcctccaactcttacactgaagcagtcctcctacttcagcctcccgagtagctgggacagcaggtgcacaccaccacacccagcttatgtttttattttttgtttttgtagagatggtctcattagttgttcaggctggtctcaaattcttgtcctcaagcaatcctcccaacttggcttcccaaagcactgagattataggcttgactcaccacacccagrctcattgaatacttttaattatagaatactttggttattgaaaatartccaattattattgaatatgtgccattgaatatgagttaacagcaatgagtaaaatagatacagtcttaaccccacagagcatggggtgcagtggaaaagattcgtgataaagcaagtagttgcagtagagtgtaagtgctatgatagcagaagtagagagttctgtagaagcacatagaagtatttcatccaaactgttttgtttttaatgaaaaatacttgagcatgttaaaatgctgaagggaaaaaaaaccctagggaactacrtggaaaagttgtctatatgggaaatagagtaagaccgccaagaaggccagagaggacaaaattcagaagacaggtgcaagaattacttgggggcaggaggagtaaaacctcttcatttgtaacaaggtaggaggaggagtgatgggtatgggtctagtcaagtttaaaggttcagtgcgagaaagtttgggagggcaacccatgctcattacagaaaaatcagaaagtctgcgtgaacaggacaaaagaaaaatacctctagttctacccatccagacttttttttcccccaccctccatcctgggatgaacgacttaactattttttgttgttattgttgttgttttttgtctttccagcttttcaactgcagatcttgggaattaactatttttaatattttgtttcttctgaaaaatatggtcttaggtgggcacagtggcttacacctgtaatcccagcacttcaggaggctgaggcaggaggatcgcttgaggccagaagttcgaggccaacttgggcaacatagcgagaacctgtctctataaaaaattttctttaattagccaggtgtagtggttgcatgcctgttgtcccaactacccaagaggctgaggtaggaggatcacttgagctatgatcatgccattgcacyccagcctaggcaatacagtgagaccttatctctaaaaacacaaacccacacacactctcatactcatcagtggaataaatgctgtcttgtaactgaatcagataataattatgattattctaatgtagagtcagagttggaatgtctgacttttttgtgtagctctkycaataattccctttgtaaccttagtttaagtaaaccattgaatctttctttgcttgtgtcaccatttgttgatattcattctttcaacaagtgtatattgagcatctaccctattcatgtaactgtgctacagtgctttattatacattcttaacagggactagaacacttacctgaagatttctctgctttctaagtttgattcactgtcaataacttaactacttttaggaatcaaatagttcaaatataatgaaattcctttatagaactcatgttgggcaaagaaatagtatacccctggtgtttacagaatccgtctatattataacggctatataatctgaatcatggtataccagttcctcatttacgatatatgttctgtttgcttcaaaaatgttttgatttggctactatatgatagccmcataggatttgggtgggattccactctacagttatttagtgtagacctttcaaaatatttggggtttaatagttaaaagtaatccgcaagctgcccccccttcccttctcccaggttacaatgcaccatatctctcggtgtacagtgaaaatgcagttgatatctttgatgtgaactccatggaatggattcagactcttcctctcaaaaaggtaatttaacattaaaatgtgggctaagccaactgagtataagtgaaaacactaaattactacatagtaattttttttttattaattcaacattttctggaatgtgtaattggcagtttgggacttagctaagagtgagaaaatagaaacagaaataaagttggttaatttccttatgcctcactaaaaccatactaattttactatatttggtttatgcaaagtatgattgttattattatgaacaactagaatatatcctacaacttaaaatgtcagtgttatcttctacttttggattaaggagctctgagagagtacatgattattatgaattataactgtcattcacccagtgtttaatcctgtgaggacagatttaaaaggctagaaaagtaattaaacttagaaccaaaactgtttaagtgtccataattgaaaaataaatatttcatatattcctaataaaacataatatttttcttaatatataatcctgtttccataacaaagagaatttttacaattatagaactgctagtttgcaaaaatgaagagcaatagtttcatatagatagatgtgatatatatatagcatgtatgattagttgggggacagggtttagagaatatgtgaaagtagcttagatcatatttcaaaattagcacccatttaaaatcataatagcagtttaaaaagctcttgtaaatactgccagattatctaaagcaactaaaatatactctagtttgtaaatttggattggtcattattacttttctgtggatttttttgttttgtttttgtttttgagacagggtctcgctctgtcatccaacctggagtgcagtgacatgatatcagctcactgcagcctccatctcctgggttcaagcaattctcccacctctgcctccagagtagctgggactacaggtgtacaccaccatgccctgctaatttttgtgtttttagtagagacagggtttcaccatgttggccaggctggcctcgaacttcttacctcaagtgatctgcccgcctcggcctcccacggtgctggaattacaggcatgatccactgcrctcagccctatttgatttttatcatgtaatttttgcaatgtatgtgaaagaatagatatatggccttwgtgaaagataataataaactgatcactcatgaacctacctcctaacctgagaatcagaacatcactcatataactgcaaactgcgtcatgttgtgcttatcattcctttgcttttcttaaaatacagaatttttgcatatttaagtatccctaaataatatatctttcagttttgcttggttttgagctttatgaaaatgttataatatatagtcattttctatcttgctttctktactcatccactgagtctcattcgttcatgttgttatatataccatatagtttattgctttcagtactataaaatattctgttgggtgaacttagcactactgtctgttccctgactgggggacattgaattatttactagctttttgcaattgtgatgttgctgcatctgttttttggaatagttttcaggagtttgagtcatatacctaggagcagaattgatgggacatagggagttcagtcagctttatgagatagtgtcatattattttccaaagtaattgtaccaaccaatactcccatcaacagcataaaggaattcttatcaacatcctagtaytttccattgtcaggattcataggttttgtaaatggttacaaagtagtatttcattgaagtttcagtttgcatgttgctaattaactgtgtagttgaaagtcttttgtgtgtttattcatcattcatatttcctcttccataaaatgcctggtcatgctttttgctcattttgctattggattggccatatttttcttatttattgaaattctttatacattgtggatactggctaataatggatatgtaaatctttttcttctttgtgacctattcattcatttgtatttggctgaacagaagttactaattttaatgtagttaaatgtatctttcttttcctttatgtttgtcttttttctcttgtttaagaaactctttcctaccttaaggtcataagatacattctattctcctccaaacattttaccttttttaaaaaatcttttttaaatgtatatacccagcctccaaacattgtaaagcttagcctattacgtttatgtttttaatccaaytggaattcatgcttggttccgtataaccagttgctcaatcactatttattgacagtccctcctttccccagtgatctacccttccatctccatcatatgtatgcatttagtttttgatagtaagaattcataaatcagctgtgttgatatctgcttagtataactgttgggtcattaatggctttaaaaagtctaaggtttaaatgtatttctacttatttgttcatttgcttaggatagccttcctttaaaatattatcattgcaagtttgtttgttcaaattagatagtattatacctttccagtcagaattattgttgatttttctgagagggctgcattttgaagtagataaatgagaagtcttaataaggtgtgctttataagcaggacaaaagttttataatttaatttttaaaggttttgttgaaatactaattttgtcttttattttaggttcgacccttaaacaatgaaggatcattaaatcttttagggttggagaccattagattaatatatttcaaaaataagatggcaggtaagaaaatacatatattcatagggatagcttcattggaaatattatttctaagctaactgcccaaggtcacatwaataataagtgccagagtccagatttcaacacaggtgtatcttactccaagtctatgatgttggccaytatcacattcttaatatattagaataaattactgggcaaaaagtcgttctgtttaagctcacttaagtatttgattctgatgtaccttgttatttttctgtggagtacctgagtaagtagagaaagtgtagctgattatgtcttctgtattttcaatattgtagaacctaaccaaaatttgtaacattaaaattataaacactcatctagagttgaggaatatgtcttcaggaacatatcttctgccagtgtacagggcctagcacttcgaaagtggtgatgtcagcataggaagaagcaggaaagagaggagagtcatgggagtgcctggaatcaggagagggagtagagacccagagtgttacagacaggaggggaggatatttggtcagtgaccaaaatattgaggtcacacatgtcattacataccacacataaaatgccagggagactgttcacatagaattaaatgttgtttgcctgtcagggtgtccaaacagttaaagtctcacttttaacgaacattattatagtgccctcttctatataataaagtcatttttgtgtcatagcagcaaatttctatataatagaagtatttgtaaatttctgatctgttatggcaagtctgttagcgaggatgtatttacagtacattatgtattttaaataattttttttttttgagacgggagtctcactctgttgcccaggctatagtgcagtggcacaatcttggctcactgcatcctccttctcctgggttcaagtgatccttgcacctcagcttgctgagtagctaggattataggtatgcaccaccacacccagctaattttttgtatttttagtagagatggagtttcaccatgttggccaggctggtcttgaactcctgacctcaaatgatccacctgcctcagcctcccaaagtactgggattataggcctgagccatcacgcctggccagtatttaaaataattttaagtagacaaatataagtaaaaatactggcttcaagaaaacacattaraatgtttagacccattattttggggtagttaatttttatttttatttwatttttttttgcgggggagacggagtctcgctctgttgcgaggctggagtgcagtggcaccatctcagctcactgcaacctctgcctcctgggttcaagcgattctcctgcctcagcctcctgagtagctgggattacaggcacrcaccaccatgcccagctaatttttttgtatttttagtaragacggggtttcaccatgttggccaggatgatctccatctcctgacctcgtgtcccacccaccttggcctctcaaagtgctgggattacaggcgtgagccaccgcgcctggccatgaaattattatcttaatggttttctcccacctaccccatattcctctaataaatttgtgttttctactatcaaaaaaaaaatccatcagaagtttttctgtgattatttttgttggttttgttttattttgttggtgtgtttttgtgttattaagtactggaatacacaaaattgcttgatttctggttcagtgcattggtacattgtcttggaaccagaggtttcttggtgaacaggctggtgaatatagcagaagtctatggtaagactccattatgacttaagaaagtatattcaggttttagaagtgattctcatttagagatggataccccgtgaagttaatgaaatgtaagctttagatgcttcacttccaagacccatacttagttttatacaggcatacccccattttattgtgtgccactttatcgtgctccacagatactacattgtttacaagtcrcaggtttatggtaaccctgcctctagtaagtctcrgtgccattttcccaacagcgcgtgttgacttcatgtctctgtttcacattttggtaattcttgcaatatttcaaactttttcactgttattctgtctgttacggtgatctgtgatcagtgatccaaatttgaggttattgtaattgttttggggtgccacaaaccatgcccatataagatgccaaacttaattgataaatgtgtgtgttctgactgttccaccaagcagctgttccctggtctccctccctctcattgggcctctctattctytgagaaccaacaatagtgaaatagsccaattaatagccctrcaatagactcttaagtgttcaactgaagagtcgcacatctcttactttaaatcaaaagctagaaatgattaaacttaatgaggaaggcatattgaaagtcgagataggctgcaagctaggcctcttgcaacagttagccaagtcatgagtgcaaaggaaaagttcttgaaagaaataaagtgctgttacagagaacacatgaatgataagaaagtgaaacaaccttattgctgttacaaagaaagttttagtgatctggagagactgtcagccgcaacattcccttaagccaaagcctaatccagagcaaagctttctcttcaattctgtaaaagctgagagctatcaggaacctgcagaagaaaagaagctagcagagtttggcttatgagatttaaggaaggaagccatctccataacataaaaatgcaaggtgaaacagcaagtattgatgtacaagctcagcaatttatccagaagacatagccaagataattgatgaaggtggctacactgaacaatacgaaattcagtttagctaaaacagacttctgtaggaagaagatgtcatctaggactttcatagctagagagaagtcaatgtctggcttcaaaggacaggctgactcttgttaggaattaatgcagcttgtggctttacgttgaagccagtactcatttaccatttgaaaaaatcctaggcccttaagagttacagtaactcggttgggcatggtggctcacacctgtaatcccagcactttgggaggctgaggcaggcagatcacctgaggtcaggagttcgagaccagcctggccaacatggagaaactctgtctctattaaaaatacaaaattagccagctgtggtggcacatgcctgtaatcccagctacttgggaggctgaggcaggagaatcgcttgaacctgggaggtggaggttgcggtgagctgagattgtgcagttgcactccagcctgggcaacaagggcgaaactccatctcaaaaaaaaaaaagaattatggtaactctactctgcctgtattttataagcagaacaacaaagtctggatggcaacacatctgtttacaggatgtcactgaaaattttaagcccactgttgagatctactgctcagaaaagtaatacttctttcaaaatattactgctcattgacaatgcacctaagtcacccaaaatctctgatggagatgtacaaggagattgatgwtattttcacgtctgctaacacagcatccattctgtagcccatggataaaggagtaattttgactttcaagtctgatcatttaagaaacacatttcataaggccatagctgccacagatagttattcctctgatgaatctgggcaaaatagattgaaaaccttctgaaaaggattcaccattctagatgccattaagaacgtatgtgattcatgggaggaggtcaaaataccatcattcacaggagtttggaagaagcagattccagccctcatagatgacttttagaggttccagaaatcagtgaaggaaataactacagatgtggtgaaaagagcaagagaactactagaattagaagtggagactgaattgctgcaatcgcatgataaatttgattggatgaggtgttgtatctcatgggtaagcaaaaaaaaatggtttcttgaaatggaatctactcatggtgaagatgttaagaacattgttgaaaaaacaagaaaatatttacaatattacatacactaaggtgatagggcagaggcagggtttgagaggattcactccagttttgaaaggaattctactgtgggtaaaatgttaccaaacagcatcattatgctatggagaaccatcttttgtgaaaggaggagttagtgtggcaaactttattgatgtctcactttaagaaattgccacagccattccagccttcagcagccaccaccctgctcagtcagcagcttatccacatcgaggtaagaccctccaactatcaacaagaatatgactcatgaaggtgaagatgattgttagcatttttggcaataaagcatttttaaattatggtatgtattttttttagacacgtactgttgcacacttaacagactacagtataatgtaaacataatgtatatgcactggaagaccaaaaaaatagtgtracttgctttattttgatatttgttttattatgtggtctcaaattgaacctgcactttttccaaggtatgcctgtattctgtttcttagaggawctccacatatttgtrtaagattggctccaccttattctcactgtgtgtgactatgctggtcataaatgtgttcatacccactatgtgtctataagacaaaacctattctgacttgtcttttcccatgctttttcatctttctactctaggctaagagtagaggtagatcttggagaagagggacctgacaaaattttaatgtagttgtctttttctttgacaaaggaaggaaagcccatctcaagaggtcctttctttttctgtgttttgctttctccatcatttcttaagaggtcaaagtgttcctgcarccctctgcctgtccaaaatctcccattgccaccctgagtctccaagacctgctttaccctcataattctcaaattccaaatttgtgtcccacattctcattcacttcaaaaattctgttctttggctgggcatggtggcgcatgtgcctgtaatcccagctctttgggaggccaagacaggaggatcacttgagcccaggaggtcgaggctgcagtgagctatcatggtgccactacacttcagcctgggcaacagagcaagaccctgcctcaaataaataatwataataataataataataataataattctatttttaaaatatttactgttaggaaagcagtctgcctaagccatatgattatgccacgaggatcatgttgcatttctgctaattatcacctttgttttcttctaggctcgtttggcttcttctcacctcctccttctcacttcagctttttgggtgttgaaaatttctaaactttgctctttttccttatcttatttagataatgacaccatttgttgtgttatatggatacagttgtctatttttttcttattttcacacagcccagcatgttttgggagtccctggcagacagttttgtttacttctagatattaaaactgacatyggataagactatcactgggttgctaggtgtatatgattaaacatcatctacccccaagatcagaagaggaraaatagcgacagattcttaccttttataaaggaagggtagtggaagcacagctccttctttttactccgtatctcatagactgaaccttgcaaaggaaatttttttattatgtaaagatagttgtaattgttatttaccacttatggtaaatcaggcttaccatttatgcctgattactgttcagggtaacagtagtagctctttaacaacaccctaagccattgaaatcaatacctggagggagagaaaatatagtattgagatactggggtggggtggctgattagtgacagaacaccaaggcaactgcagttttcttctagtaaaattatgtcctactgtgtttataatcaagtaaaagtgaaagtatattttgtaagctatgtttactttcagcatattatctgtttacatmggttctgttaaatattatttactgggttatcaacacaacatttaaaaaccagaattgcatgtacttgtactatcaatgtttgtactgtcttggaggttaatagataaaaagcattttaacagtttaaagaacatcattatcgtttgtatttttattttaacagaaggggacgaactggtagtacctgaaacatcagataatagtcggaaacaaatggttagaaacattaacaataagcggcgttattccttcagagtcccagaagaggaaaggatgcagcagaggaggtagatacttaacctgtagtatcatccatgcttgcttgtaccatcaaggactactcggtgatgatactatatttgatttggaaggaaaattgggtatctgaaaatctcattgatctgtggtgtcaaaaactgcaataatgaatgtaacttctcagtgtcattttaattaatattctcaaaattgtgagtatgcactggattaaagtaccatatttttattcacttcattcacttctctatgtatatggaatagtcatatttttggattgtgtacctttctacagtataagcataggacatagctgtgcatacagtaaacctgtatatgtctaagaagttcagactaactactctcttcatgagcaaacagaagtaggactgtagtatttacagttayatataagaccgtttctaaagtgttaccaatcatttttaaagagatrcataaaatgttcagaattatatgtaaaacaaagtagagcttctttgatgtcttaagtatttaaaaagatcctctactattccacctaaaatcgtaagatcttttaaaatttaaaacaaaatattctaaggaagtacatttttaattgagtatattctgttactctatattcttattaatgtgatttaacagttgtatttttattaagaaaattaagcttaatttttttcataagctacataaattaactgtggaaaaagtatctaaacagatgccttgtcttacagggaaatgytacgagatccagaaatgagaaataaattaatttctaatccaactaattttaatcacatagcacacatgggtcctggagatggaatacagatcctgaaagatctgcccatggtaagaggaattaagagtgagtgtaaaaaagggcgggtgtggggggagtataaatacataggcttaaatacatgggtagacttcaaaggataygtgaaagtaatgaggaaatgtttctctcagtataccacaatatgtstaagatacatgatgacatacctgatgaacaaaacataaaatttagacatctgtcaaaagccaaacaaatcaggttcttacttagttccatattggagaatttctcccatgcctaggtttactattggtggtggaagaaactaccaaattcggagaggttctataccacatttggaatgtggttaccaaatcactaaaatttcactacgtgttagcaaatcaatacagatatttggcctactctttttttttccttcttcccagagaaccacattagcttggttattaatggtcacatctctccgacagttgtgaaattaaatcgttttcctttgcccatttacaaacatgttacctggtcagttgtacgtgaaaaagtataacataggccaggtgtagtggctcatgcctgtaatcccagcactttgtgaggccaaggcatgaggattgctgaggccaggagttcaagaccagcccaggcaacataagcaagaccccatttcttttttttctttttttgagatggagtctcattctatcacccaggctggagtgcaatggtgtgatctcggctcactgcaacctttgcctcccaggttcaagtgattctcctgcttcagcctcctgagtagctgggattacaggcacccaccaccatgcccagctaattttgtatttttagtagagatggggtttcaccatgttggtcaggctggtctcgaaccctgaccttgcggtccacccaccttggcctctgaaagtgctgggattacaggcgtgagccaccaagactgaccaagaccccatttctataaaaacattgctggtcatggtaatgtgtgcctgtagtcctggttactcgggaggctaaggtgggagggttacttgagcccaggagtttgaggctgcggggagctatgattgccgttgcattgggcaactgagcaagaccctatctcaaaaaaagaaaaaaaagtacaacattggagaactattctgttttaacaatatgaagattaggctctcagaccggtcatgtttaaattaagaatattagtggaattagccaggctctktacatttcagtaccatagttctctcagcatactattaaaactttaaaaatgacccttttgattggtagtgatagctgctaaattttgcgcagaattttaagtataattcatatttcatggccatttgggagatgatttgtgaatcttgacccaaattgctctctaaggaaatctgtcttaattaaccacattatcaacactacagtgatagaagatataaacatctatcactgacagagaaattgattgataatataattcggtgtgcagtcaagtttctttaaattaaaaaaaacgccttttaaagggaggtttgcatttatttcatgggaagaaaacatatctgcattcaagtctgagttcttcattgtaaatatctcagttcatcagttggctctgcttgcttatgaatgaatgtgacattcttattaccattaccaataatatcaaaatattattatatattcatagtaatatacttttctttgtggagttcaaaccagcctcattaatcacttatgtttttggaatagggttggctgtgctgagtaaatatttaaaaagtgcaaaaactagattacagcttatcttgatatagtacttttaaaaattttcaggtcaagcacattaaatattaaaactattatacttttctatcatgtttaaaagctatactatttttttttcaacctttttctgggagtgagatctcagatttctctccatccttttcccattaggaacwtttgcttaaagtcctgagtctggttttcctttaacctcagaagtaaacatagcataactatagagtccaaagcatgttgtttttccttatggaaggtgggatgtcaggcacaaaataccgtaaagaattttttaaattgtgataaacaattgaaatgtgaatatatttatgacttatatttgataagtcaagtgctgtgtagtattttaattaaactttttaaattgagttagtagttttttcaatacataatatgtagttagaattatgtaggggtagcaggatacaaatttcaaatatgtaagttgcaaagcaaaacatcagcaaatataaaattatttcagtagttacaaggttttaatagatagtcttttaaaatttaaattttttacacttttgtttcattttacacagaaaagaatgtttttatctcatacattccaacaatgtagctagaagtagtatagaaaatgtttgtagacattctattctagcccgcatactacagtgtttaacagaatgttactctgcttagtatccttctgccatcaggtgaaaaatcagtttgctaatgttccagagttctttcagaccttcatatccaataagactatgcaccttgatgccaaaatgtcagatttcaaacattataagaactttttttatcagagatccctcctctacattttcttccctcttccttccaccactttaaraaaaaaaaagagataaaaagraaaaatctgtatcttattttttgttcaaaataaggtctatattgataagcaaaasaagtgaagatagcattttccacagaatcattagactgcttggtttttagtgtttgttgtcacctgattttgttaacacatgataatcgttctttttggcattaacacaagtgactttttgccctctcattgcatttcagtttttaatgtacctttcattgctttaatgttttcttatcacgtaagtgcttttgtatttccaggacaagaagttggtgtaaatttttgaaacctgtttcttcacctgtacatgtagtatgcatcaaagattttatctgtctgaattcctcttcttcacaaccagattttattktcacatgacttttttctatttcactaccaaaggacatataacctggggcttttttataggcatccatttaatcatctaacaaatatttattgagcacttactttgtgcccggaaccatctttatctcagagtagacactagtaaatacaataatatgcatgtctgaaaataataataatatgcatgcctgtacttgtgtatgtatctattgaaaagcttgtgatattttaatgtattctcagttgttaatatgttctttccattgaaatggaattattacaaactgtctcataaaataaagatgaattaaatttatctaaagttaacatatatgtttttaaataccaaagccacatgttgtcatctattcagagagcatgtgtcccagacatttttatattttaatttattcaaatcagtattgctttcctgtgaaatacttataagcttagaaagtttattgtatgtctttagaaatttaattctgttgcttttgtgcaagatgttcttgaaacagaattgtttgctttttgaatgtggaaggagaagtgaggctaagggagtcatattcctctatcagatgcaaacctttatttgtatctaagtgagccaagacartataagcattaatataagatggtgtgtgtggcttataaatagatgctatattcattttcttgaatttttaaaataatttaccgttttaatacatggttgctatttgtgataaagaacaaatttttctctaatttggatgcaagaataatactttacctctagaagacttatttttagcacattacatttctcctagctttttatccattactaaaattgttaataaaagtatattttcgagcttagtgacatcctggagctttaagatgtaattttgcttcttaaagtcaaagtttcatgtacgtcagtacaacctcagagggtactgattttattcatatatctagaataaaaacaagaccttacagaagagcctttcttytaaggctaggtaatttatgcaatctttttacaaagcaggttcatctcagctcatgggaacgtgaattccatgctggattcagttagcactctctccaacacgccattcaccctctgcctctaatgaagggatcatgttttctggaaacataactgttcttcaagaactgaatcttgaaaattcccattagagaaggtgactggctactgagtgatagttcctgcgtaatcggaagtagttcttttatctctaaaaatagtccttggattcaaaagcttttttctatatctttgatattacattatttcattttwaaaaaatatacctgaacattgaagggaagatttttaccttgttaagaaaacaaacatgttctttttgggtgtctaaatggagataagcttgggctgcttaaaggtaaaccaataattagtatattccatggttaactgttataaggaaataaaatcagtaaaaacaaacacattatcagggaatgcttttacatggttttagatttctaaagaaacagtttcataacacgtctatttagaagctgttgtaggttcacttgttcatgttcttgcttgtttcttgctttttctatccttaatgtttttgatagatttttgccatattttgattgtgttattacataagaaaatactgaactaaactctgaaagtcttgtatctctgaaagtccaatttctccttacttattttaattaaaraataattttataaaaaagaatgatcttttgcaaatcaactatttaagtaactggcaagagtattacaaaatttaactttctaagacctaaaagtatttcattaaggattcagctctsatatcagatactattccatttgttctgtgtgcatgttttgtgaaatgtgaatccattttcatcaccttattgccttttttcatctttcttttstttttgatagccaggtttcccttatccatcccctcatcatcactccggtctgatctcctctccgatcaactttgaacacatctatcacatgactgttaattctgctgaaaaatttctctctcctgattccataaaccctgaatattccccgtctctgcgctctgtccctggtacaccaagctttatgactctgagggtatgaacagctgagtcaggtgttaactttcactaaccatgtatggatttccttttgcctggcttaataagtaacaccgctgaaatggtgccatcttgtgaaccttttcctttggcctatttctcttctgccaaacttctcctcttcctcttcctccatgtatcttcctcttctttcccatttctattttgtttcttcttttgaggaagaagatggaggaatagggaagatttcaattttcatttttgaaacacagtattaaagatttatctatgtttaataaaagtttttcccattgtaagaaatagctctctattctgttaaaacaaacaggaaagggctcccagaatttctgaattttttagctccttaccctataaccagttcaattcagtgaaatgttttatatttagtgaggttaaagtctgtggtagaacccatccacagacctatctacaataaacccctttttgaaaagcttaaaaatctccaaagtgaaaagttaaaaaattaatattaatgagtaacaaaaattccaaaaataagttagattttactaatctttgagttactgaaatgcatgtaattccaaccaggatccaaggtaagaaaactaaagcaaagaaagaggaaaatttaaaaagcatgctgtattctgaaggattgtggcagctgctgttggtctcttccattcagcttgtatytttgctaccagtggctttgcagtarggtggagagctggtggccattaaagctgaatattcatatgtccatcaagtggtgtatgcttacagtaacttcaagggaacattttctgaagttagttttgcaggtaataaaatgtttatattgtatcatgcaaaccacttcccataatgtcccctaacttacaayaatagtagatcaatttttgtatttatatatgtagaaattttccaattagaaaattagctgtaggatgggaagtttattttttgttgtttgtattataaaattattctaaattataatgttttaaatgttactgacatttaaattattatatcacttaaatatcttatctgacaaaattaaattaaccacgataaaataagcytgagtttgcttagactgcagggagtggattccagaggaattttgtatatgttaatcaggaacttttcactgggcrtgatggctcatacatgtaatcccagcactttgggaggmtgaggcaggaggaccacttgagcctaggagtttgagacaagcctgggcaaccatagcgagaccccatttctacaaaaaataaaaataaaaaaattagttggatgtggtggcacatgcctgtggtcccagctacttgggaggctgaggggagaagatcacttgcgcctgggaggtcgaagttgcagagagccgtgattgcaccactgcactccagcttaggtgatagagaaaggctatgtctcaaaataataataataataacttttcatataaaagaccatggaaatgttgctttagttagtcatctataactagaaatactgtgccatcaaatgaaagtctcaccctaatcttatacatatttgtaccttgaaaggaccagaggcttaggttacttgtcactttataatgaagtttattwaactctagcggactgaatgataaactgttttttaacaaaacttttttttgtcattcctttattacttcagcctaagtaataaagctactaagttgttactaagtttcagatacagtttgtagccttaatttttgctatttattctaggataggtttgttttataggaaaggacaacatcaatgtatcttaaggtttacagaaaaacaataaaaaaatgtatagcctgaaacggatattcccatctcctttgagcttttctttgctgcattgttcacatgctgcttgcgtcttacagggttgctcttgtatatgtgtctgttgaattgctagcattgactatttccattttaatttttttattttcttagagaaaaaaaaagcatttgctttaaataacgcaccaagaattacatggactttgcaaatttggtagatgaaccaaattsatgtagatggcatgtagatggcagcagttaaatttggggccaactagttgccaactttcagtatgtgcgattcttcaaaatgtatgctttggagcttttcaagtggtattaatgcatgttttcctgagtgctggctttggcccttttttagttgttttgccataaccttttctcaggcatttcaggtgcatgtaggaaagctcagtgctgcaaactttctctgagctctaacctctccttggagtgagtttcacaattgcatggcaactgggaactcagtttccagttctrgacttttattataacttaaaaatattttttagccacattagtacatttctttattgcttgtttcttttaacctcaaaagccttaagtatttgtgctgatttcattgtattctgtgttaaattatttaatctataccatattatagcaaagaagatagtcatcktttaagtgtttgcataaaatgttattttgtatctttaaaacacacacaggcctgtaacttcaaatcaatattaactaaacactgttttacagaaaggatcatattttgaaattacattgccaactgaattaatctcaatactcaaattagaaaattaggattgcagatatartctaytcattttccatttatttattcagcaaatatctttcagcacctaactattttaggtgctggagagtttagtgttgttgtaataacagtcagtataagaaattataagatgactraagaactgaggctagggaaccatatgcctrcttataaccaggacaaactgaactgtcagcccaaaagctgaggaccctgaggtggtgagtgtggaggagggtgtgcctaccaacagtgttcccctgggtttctatgtttaaagggcaagtatgaggacgtttagtaaaatatgtaaaatgtagtttaagcatttaggccttttctcttgctgaaacttgtaaaaccatttaggtaagatagatttctattaacgttamatagcataagtcatgaataaacataagtcataccacaaagtttatcaatgtatggcaggtatgtggataaatttccctattgtattctctatgttaagctactagaagaaagagtaatattttctgagcccgaaatgatgagaaaagattgtgtttttgaaacagcaaaattaggcagacagttgtaacatttttttaaaaatacactagttagcttggtgttctgttgcatttgaaaatagcatgatacagtatcatcaactcttaaattatgttggaagaaaagataggaaacacatcaaattgttattagtatctggtgaattcacaggtgacttttttggtctcttataatttcattatatattctacagttcatgagtattacctttataatcagaaaaaaagcaaacaattttaatgaactagttagcactgagagaacaccaggttaataaatatatcttccagtcacatcttgttatgtcttagtggctattactatctgtgtgattttctgatgatgtagaaaagataaaggattaccctatagtaatggtagcctatagcattctatgaagagaacatctgttttcaaaggaaagttgcatgttatagtttaacttggaattaaactatttggctttacttaacaaattgatcctttggaaaagtcacaaaacttgaattttttactgcttttaatgtgtgattttttttcattgcatttccattatagagttaaggtattgtttaacacatgtaaaatttgtgatccccccaccaccaagcagaattgctggggggttgttgttgttgttgttgttgttgttgttgttgttgttgttgagacggagtctcactctgcagagtgagtgcacgcccaggccggagtgcagtggcgtgatcttggctcctccagcaacctccacctcccagattcaagtgattctcctgcctcagactcccgagtagctgggactacaggcatgtgccaccaaacccagctaatttttttgtatttatagtagagacggggtttcaccatattagccaggctggtctcgaattcctgacctcgtgatctgcccacctcagtctcccaaagtgctgggattacaggcctgagccaccgtgcctggccagaatggctgtttcgatgtgactaaaaggaggtttgaaagtgatactgcagatggctgtatgaggttgttactcatactcatgaggaaagaaaggcacatagtgggactgggctacatgcttgctttttgctagtgtaattagcttcatcctcagacaagccccaggaggcagttcttatcctcataatacagctgagggaactggggcacagagtttagcaaccccaagccctgctgtcagtcagctgtgcagcacagatgtgagtagtgggccaaatccctycatagcctgtgctcacagccaccatgctgcctttatggcacaccctcacaaacagccaatgaaggagaggctggctgacaataggctagtaagattaccatcatttttgtagctatgaaagaaaaatcaataaggagtagataaatcttctaagtaaatacatataaatctgtttataaattgtaagaaatcaaatccagaccatttgcatcagaagatgcttacatgaggctgggattatgtgaagaaatggagaaaagccttatgagtgttaaaagatgttaataacatggtatatgtaatttgtcttctccaggatttataaagaatattaaaatatttttccctcctctggacttgtgtcagccccaacatctcatcctcctggtctgaaaaagattggggcctttggggaggcagcatgctttctgttctcaaccgtaatcagacagctcaccctgcacaccacctatgtggctatcctttaggcgtgtgtgatttgcaaaacattctgtggcctattttcctacctcacacactaaaatcattcaataattaaatggaaatatcaataaggagtaggtaaatcttccaagtaaatgtatataaacctgtttataaactctttgaaatcaaatccagaccatttacatcagaaattagttttcaaactaatattcccaaattaactaacttcacctaggttgtgagtattgcagcgtcttatttctaatcccagtactactattggtgtgagtcagtaaagatgcctggtgactggggtgtgaacttataaatggcacatttggtatcacatcaataaaacattttcttgagaagaatataattttagtagaattttctccaaatggacgtatcagctgttaagcaaataaaaatgtcatacatagtaaaagctttcagttatcggcaaatgtccatgtaattctacaattcactgtcacatctaaccatatagcttttacttactgtgtttacaaacaaaaaaatgctgttttttactgataagtatttcagtaagtataagtacttattcctgattaggatgagatttacttcatgttagggttttattacttttgtgggtgggaaagactatataatctgccattccttactctgtgtcattctggtcaagatgattttatttcttggtaattatagtgaaaaatagacatctctgcagaaaaatcagtttctttctggctaaaggatgtctctctcgcttttgtttatagaaccctcggcctcaggaaagtcggacagtattcagtggctcagtcagtattccatctatcrccaaatcccgccctgagccaggccgctccatgagtgctagcagtggcttgtcagcaagtaagtgccggggctacaggaaggtgcctctgagacagggtgacccccagctccctcccctcctgtcccgtgggtgacatgtccttcacttacgtgtgcccattgcattctcaagkggctgcagtgtctcagaccctgctgggtaatgcctaataggcacaaatgcagttgttaagaaaatagtcccagagtccttctagagtgtacaggccatctgrgagacagacaaatatgattacaaattgtgatgataaaggctctgaaggaagtaaacagcatacattaatagagaataacaaggggtagctgttagggatgaatccctacttggcagaataattaggaaaatcactccctagaggtggagtcatgtttgagtaatgtttggttaactgaaagaaggctagtatggctacatggtagtggtgaggaagtaacaaaaattagagcggggtagcaggtaagggtcagaccagcagggacttgaagaccaaggtaagacattttttactttattcaaaaggaaaaggaagacttttaagtagggaagaattttctttcaatttacattcttaaaacaatcctgcgggctgccaagtggagaatggactagaggcaggaagagtggaagccagcatccagataggagactcctagagtggtcccaatggaaaccaatgagggcttgggatgcagcaggggcagaaggagagaagatggtagattctccagatatattttcagagttaaaagcagtaagacttgatgatgaattagtcatggaaaagtaagggagagagttaaagatgactcccagacttcctgctagggccttagtatgatmccatttactcccatttaccaccgtttaagaaggggctgaggcaggacattccacgcatgtccaaaggtcccgaggtagcaaaaaaaaaaaaaaatgtatctgtttgattcactgaaagaaggccaggaatggattcaagaatataccctttactacaataaagataacattcatgcagtacacatgtttgaggttccattagataccaactcttctgctgaggtgctgggggtaaaaatacatacatgacctagtacctgctttcaggtgtctcacagtctttattagtctctctctccgttttttttgtttgtttgttttttgtttttaactgtactcggaactgcagcatctctttttttacactttaaaactagaaccttgagctaagggaccatagagagaaaaaactgtgctccatggtgcacttaggttcagctactgtcgcggagcagctttttggtgggggaggaaaggtgtgtaaaaagatattgtctgcctgaataaaattatacaaagatgctaaaggctacttacctcaaaatgagagaaatgtacagatgggacatctggctgatttaaaaaagtaaattttactcccgtcaaattcactgcgatctaarayatttcctggattataagcagtgcgattgtagattatcaagtgatcattgtagcttcacttggggaagaatgttcttggctgaaggttgcttttctgtaactttctcaagtgtgtgctttcccgggagcatggtacttgcttggagatcagagagagtgtcgatcgagtgtgccagcgtaagtgcagtccccaagtgtaccaggtgcaacttagygaaaccttttttcacctccatgcaaatgaactttaagagaaagtaactgcactaaatccaatttcacatttaaaagtcattgagtcagaaaacttacttgttcccttctattctcgaatgttacatattttgaattcaagtcttctgatgcagattgagtttcctccattcatttgctcttcattcagcaaatactgattttggcacccaatttgtgcccaggtattttttttttagattctgacgacataaagatgaatgatgctgtattagttatctcttgctgcataagaaattatcccacaaattaggagctttaaaatagcaaacatttattatctcatagcttaaaatagcaaacatttattatctcacactgcctcagggtcaggaatctgggaacatcatagactggatggctctggttcagggtttctcatcagattgcagttgagctgtctgctggggccacagtcacctcaagactcagctgtgactagggaatcagtttccyggctcacccatgtggttgtggacacgtctgagttcctcacygactgttggttggaggcttcccgtttttgccaatgtgggcctctccatacccagtgcctgagtgtccttatggcctggctgcaggcttcctccagggcaagtgatcagagagacagaagcagcagtgttctacctaacctcaggagtgctgtatcaccacttcttcagtatgctgttgatcacacagaccagccctggtactgtgtgggaagggactacataygagtgaatactagaagggacgatcatcttggagcctggctrcagacatagagcatgctttcaaggagctttcaattgacaagaagatgttgaaatgtacagtttgcaactttcttgccattatctcctaacatcatctgtacccagtatgtagccctgaccacaatgaaaaaatcttgccaagtgggaaaatgacaaccacttttattaattatctttttattagcgatagctagatttgatgattgatgtaagctgttactaactrtaagttatctagaagtcagttacaaaggttttacaactttaggaattaagtgatggtccataattccttacctgaaacccttgaggccagaatgtttttatgttttagaaagggatctaccatatattatgttatattcccagcaagatccatgacaaacaaacacattaagttcccacgaacacattaatacttacacagcaaaagttatgactgtttacactgtaaatataggaataaatgtagtctttataaataaagcctaaaatcggcctccaggatttttttgggttttgttgttgttttgttttttgttttggttttgcktttttgttttttgttttttgtttttgttttttttgagacagagtctcactctgttggccaagctcgagtgcagtggcacgatcttggctcactgaaacctctgcctcccaggttcaagcaattctcctgcctcagcctcccgagtagctgggactacaggtgggtgccatcacacccagccaatttctgtatttttagtagagacggggtttcaccatgttggccaggctgctsttgaactcccgacctcaggtaatctgcccgcctcagcctcccaaagtgctgggattacaggcgtgacccaccgcgcccagcccagttcacattaggttttgtcatcacatgaatttgcatcaagcttgtgaaaaaacttttggttttcagcacttttggatttgtggaattgcagataaagataggccctaaactgcaaagatttaaagagccaagacagcccatctccttagaagtgctgaagtgaggctcccatatcactgctgatggcatgcaaacgacagactggagctggcctggcrttcttgtcaaggcccttaacgcattcattgagtttggccttttttatgtccctggttaccagctgcttgtccagtaaagatataagaggaaagaccctctcgggaatgccaaggggcatctggtgtttagagtgcctcctgctggcttcaagactagcccagctcatataaaatgtttccagaaggacagccagccaagagaggaacaggccaactatgttcagtctctacagcaagaagcacaggatcttccacagccagactcaacgatttcatgatgcaaagtcagattgaaacagcggtgctcaccatgcttccttccctccttcctagttcacctgaggaatgagaccygctcctgtcagcagtaggggctcactgggagcctcccagaccctcctggaagtcatgcagaggttggatattgctcatccccaagagatttagggcccagtccccagagtcaccacttaaaactctctggaaggggctgtatcctgagtacagtatgtggtctcaggccagagggtccccaggctccttttgctgttcaatcaaaacagccctgccttgatttttttttttttttaaaggttgtagtgtttgaatgtaacctttctttgaaaagaaaaattcctgaagtttaaaagtgaaaaaaacatactggaaatcactggggtgggattcagttcagttatctgctctataaatgatcactaggaaggagggaggcaktgaaaagaccagaagcacagtgtgggccagcacacaccttctgtcttgcatgttactctccatgcattgagtggtgagttgttcccacaaagtcctgtaaggtagaatttatttttttacctaaaggtgaagaaaatggaaactcaggaaggtaaaataacttgcttaaggtcacaccattagtaagcagagcagtggaagtctctggcagtttgactttctgtgcagaataacaaaatgttaaagtaattttttcattattttttgaactgagcactaaactagacaaggaattggaagaaaactcaaaaaatattttatggcgttcaattagctcgtaatctaaggagacacacgttccacatcaaaaaagtaaagagtatatttcccaagaaatatgtcaacaaatgaagaccagtgcatgtggagaaacccagtggtggggatggagtgttaggggaaacgtgtctcctgrggagtgaggttgtcagtgattctcagtccgaggggccttctggaatcatcaggagagmttattattattattattattattattattattattattattatactttaagttctgggatacatgtgtagaacatgcaggtttgttacataggtatacatgtgccatggtagtttgctgcacccatcaacccgtcatctacattaggtatttctcttaatgctatccctcccctaaccccccaccccmcaacaggccccagtgtgtgatattcccctccctgtgtctgggtattctcattgttcaactcccacttatgaatgagaacatgcggtgtttggttttctgttcctgtgttagtttgctgagaatgattgtttccagcttcatccatgtccctgtaaaggacatgaactcatccttttttatggttgcatagtattccatggtgtatatgtrccacattttctttatccagtctatcattgatgggtatttgggttggttccaaatctttgctatggtgaatagtgctgcaataaacatacgtgtgcatgtgtctttatagtagaatgatttataatcctttgagtatatacccaataatgggattgctgggtcaaatggtatttctggttctagatccttgaggaatcgccacactgtcttccacaatggttgaactaacttatactcccaccaacagtgtaaaagcattcctaggctgggcgcggtggctcaggcctataatcccagcactttgggaggctgaggtgggtggatcacgaggtcaggagatcgagaccatccttgctaagatggtgaaaacctgtctctactaaaaattcaaaaaattagctgggcatggtggcgggcgcctgtagtcccagcyactygagaggctgaggcaggagaatggcgtgaatctgggaggcagagcttgcagtgagctgagatcacgccactgcactccagcctgggcaacagaacaaggstgtgtctcaaaaaaaaaaaaaaagtgttcctatttctccacatcctctccagaatctgttgtttcctgattttttaatgatcaccattctaactggcatgagatgctatctcattgtggttttgatttgcatttctctaatgaccagtgatgatgagcttttttttgtatgtttcttggccgcataaatgtcttcttttgagaagtgtctgttcatattcttcacccactttttgatggggttggttttttttcttgtaaatttgtttaagttccttgtagattctggatattagccctttgtcagatggatagatggcaaaacttttctcccattctgtaggttgcctgttctctctgatggtagtttcttttgctgtgcagaagctctttagtttaattagatcccatttgccaattttggcttttgttgccattgcttttggtgttgtagtcatgaagtccttgcccatgcctgtgtcctcgatggtattgcctaggttttcttctaggatttttatggttttagatcttatgtttaaatctttaatccatcttgagttaatttttgcataaggtgtaaggaaggggtccaatttcagttttctgcatatggctagccagttttcccaacaccatttattaaatagggaatcctttccccgttgcttgtttttgtcaggtttgtcaaagatcagatggttgtagatacrtggcattacttctgaggcctctattgtgttccattggtctatatctctgttttggtaccagtaccttgttgttttggttactgtagccttgtagtatagtttgaaatcaggtagtatcatgcctccagctttgttctttttgcttaggattgtcttggctatacaggctattttttggttccatatgaaatttaaagtagttttttctaattctgtgaagaaaatcattggtagcttgatggggataacattaaatctataaattactttgggcattatggccattttcatgatattgattcttcctatccataagcatggaatgtttttccatttgtttgtgtcctctcttrtttccttgaccagtggtttgtagttttccttgaagaggtccttcacatcccttgtaagttggattcctaggtattttattctgtttgtagcaattgtaatgggagttcactcatgatttggctctctattattggtgtgtaggawtgcttgtgatttttgcacactggttcaagcggacctaatacacacctacagaactctccaccccaaatccacggaatatacattcttctcagcaccacatcacacttattctaaaactgaccacataattggaagtaaaacactcctcaccaaatgcaaaggaatggaaattataagtctctcagaccacagtgcaatcaaattagaactcaggattaagaaactcactcaaaaccgcacaactacttggaaactgaacaacctgctcttgaatgactactgggtaaataacgaaatgaaggcagaaayaaataagttmtttaagaccaatgagaacaaagacacaacataccagaatctcttgagacacagctaaagcaatgtttagagggaaatttatagcacwaaatgcccacaggagaaagcgggaaagatctaaaatcgacaccctaacatcacaattaaaagaactagagaagcaagagcaaacacattcaaaagctagcataagacaagaaataactaagatcagagcagaactgaaggagatagagacacgaaaaacccttcaaaaaatcagtgattccaggagctggttttttgaaaagattaacaaaataggmcgctagccagactaataagaaaaragagaagaatcaaatagacataataaaaaaatgataaaggggagatcaccactgatcccacagaaatagaaactaccatcaaagaatactataaacacctctacagaaataaaatagaaaatctagaagaaatggataaattcctggacacatacaccttcccaagtctaaaccaggaagaagttgaatccctgaatataccaataacaagttctgaaattgaggcagtaattaatagcctaccagctaaaaaaaggcaggaccaggcagattcacagccgaattctaccagaggtacaaagaggagctgataccattccttctgaaactattccaaacaatagaaaaagagggactcctccctaactcattttatgaggccagcatcatcctgataccaaaacctagcaaagacacagcaaaaaaagaaaatttcaagccaatatccctgatgaacattgatgcraaaatcctcaattaaatactagcaaacattccagcagcacatcaaaaagcttatccaccacgatcaagtcggcttcatccctgagatgcaagactggttccacatacgcaagtcaataaacgtaatccatcacataaacagaaccagtgacaaaaaccacatgattatctcaatagatgcagaaaaggccttygataaaattcaacacctttatactaaaaactcaataaactaggtattgatggaacgtatctcaaaataatagctatttatgacaaacccacagccaatatcataccgaatgggcaaaagctggaagcattccctttgaaaactgcaaccagacaaggatgccctctctcaccactcctattcaacatagtattggaagttctggccagggcaaccagacaagagaaggaaataaagggtattcagataggaagagaggaagtcaaattgtctctgtctgcaggtgacatgattgtattagaaaaccccttcatytcagtccaaaatctccttaagctgacaagcaacttcagcaaagtctcaggttacaaaatcaatgtgcaaaaatgacaggaggacttttaaagttaagtcagaaactctgcaaattgttctgggatagggctgggcattggtgtttgtcaagctccatcatacgctaaacagtaaaccaccagtgttgctgatctgcagtcagtcagttmcagtgtcgaggaaatgccagcgagcctgtgactgcagcccaggggcttcgcaaagaagctgaggaagggaggtggaagggggattaccaaggacagagtctgcccaggcaggctcttgttcagtttatttatgaacgcttgtgtattttggtggtcattagataaatgtgctgctttaaactatcattttttgacatttttcactgaattcttaatgtgaaaaacaattgagacatgttaaacccgcaaaaagttgaaacaagcacaacctgtaccttagagttgtgctaaaacctcaacacagtcttttggaccaatcatcctaatactgaaactcagcacgatgaaggcatgtttaagcaaaaaccttgtcatagtagggaatgctaagagctttaaataggtactgacaatagccccgagattccccrgggtgttctgggtcttcccttttcttcctgtgaatgctgctggtccactgttacctaccccaactctgagaacamaatagagagtgagtttgaagaaaacctcacttttattttacatctcaggctctttgccctgtgaagtaaaagtacttttatgttttctttatggttttatgaaaattttctagaagataagcgatatttcttcattgagtggcatggcctctctcgggatggtacaaccgagcttcctcatttagcgcatctgttttgagcctgccgtgtgccatgttctgtgctaggccctgragaggcaaagacacctcatctattgggagaatgacaggcacatgatgataacatgacttcataaatgccatgaaagagatgtgtgaaagatggctgggagccrtcagtggctgggaaagatgtgcaaggcagcaccaggcaggtggagacttgagggattctggggarttgttaacaagcagggcattggggcagatggcacagcctagagagtgctcgctcaccgggagtccccgtggctggggtggacaggaacagcgagtgagattgctggattcggggttgagctcagggcaaaggtactacagttggacttactgcgcttcaggggaggagtggtctggggcctgcaaaggatggcctgtcagctyagcagtctgtgtgctttctagagtattgtcccctctgcatatgtaaaattttgcctgcatgatgtactgtagggtcatccgcacagaatggcagcgcattaaagagggaattctctggaggaagctacagtgccaagcggcagcccatgccctccccgtcagagggctctttgtcctcyggaggcatggaccaaggaagtgatgccccagcgagggactttgacggagaggtgagtgggcagggttccggagacgtcatgtatcagaaagactagggcwtcttcccaggcaatcccaccaccttgggattggcctcagctgcagcagggttcggggtcaggggccagcattcactcttggccagcgggcagctaggccagtcactcgggctgcaaactgcagttttcccagaggcattcagacttctggcttttgtgtgaaaataccatcatctgtaaaggcctacagaaaggacggagcttgtatgttccgtgcctcttcctcagctcatagaaggggctttataccgacagtgaggccgccccatggggttatttggtcagggtggctggagrgggcggtggtaatctgagccccttctgcctccctttctccccctccttctcattaatgttttactttgggccttacaggactctgactctccgaggcattccacagcttccaacagttccaacctaagcagccccccaagcccagyttcaccccgaaaaaccaagagcctctccctggagagcactgaccgcgggagctgggacccgtgagctgcctcagcactgggacctcycgctctccgctccctgccactcrcctcctctcactttcatctcttccctccacctcgcctgctcggcctgaaagccaccaggggcyggcagcagtagcaggacagggmttcaggagttctgacgacacgactctcagatccacgcccccagcctaacagcaacaacaaagacagactttccgtagcagcttagattaacgttgatttcattccatgcacttagagttgctttcagtaacattttacccctactcccaaaggtagcttaaatagacagattacacaaatgtaagtgataagaataagattagacagattttgctttcacagtagagtctcattatagtcctaaaatagctcatgggcttctccgcatccagaagggagaatysgtccctggagtggctcamtaagctcttaatcagcaaacgcagtgagtatcaacctgattgttgccaggaaatcctyatgaattaaaacaatgcatattttactacagtacagagwttaaatgaatacataaatgtagaagtactgaatgtatatatttaaaaggagcctcttgtattcaacaaaagatggatgcatatataagagagatgatttaatttaaagaaatatgttgtttcttgtctgtaatgtaatgtaaagggtggaaaggcctcaagctcacatttgtagagagagagcgagagaaatcagagttccctttattgccctgtcctcaaactggtcataggctctagtcacctggggagctgtagaaaacacttgcagagccaggttttgctggtttggggcatgccctgggcaccagagctttaacatttgaagccacttcagcagcagcagcaaaaggcgaactcatctctacccaagatgtttcttttcctagtggtggaatttgaacacttctcactttttattgtattttatcttccgcagataaatgtagaaatacacgrttctgtcacctctgatcccttccatctgaaaggktacaaggagtgttgtagcttctgaaggtgcagaaaacaatttctaaaaatgcttttattcctgggctaatcctgtccctccctaagtcrcagcgaggtgtctgtcccagggctggagatgcttcccaaggaggagtctgttttgttgagagtgggcgtgggcttcttcacataagcctggggaaggaagaaaaaacggctttcattaccaaataatgtaaaacctcaaaagcaagggcttcaacagccttaaccaaatattattccccatagccagtggaaaatggatgtgacaaccccagtgcgcaggccagagtgagtgagcccagcacggcgctccgactggcttcctctctcaggtgctggattgtggggttagtggcatttccagctggattcctcctgttgtagttgccataaggaaatgagatgcagaatcagaaggatctatttctacagaatcatttcaccagttaagcacatgagtagagaaagagataaaaataaaagtatctcatgaaggaaagagattttgcctctcttttacttttcacctaagtttctctgagaaatagagacaggattctctctttaaaattcagtgaaaatgaagaaagttttcctgcagttgctaacctgagttgcagtgtttaaggccatcatttcactgctgctgtctgtgactccacgtctgtgtcactgaggtgacctgcgtgtcactgaggtggccaccatgctggcctgcggcatgtgcagggagctgaggctgtttccaggtgatgctgctgtgtggagaaggttctgagatgcagtgagggaagaaaggatcctgctggggattccattgtaagcacctataatcgggaattttcatgtaacagctttgacatttaaacattctgagtttggtgccagctcagatttgattatattttattttggatgggtgtaattcacagcacagttctaatctcccaaatctttctgctttttagaatgaagtataaaaatacttttctcacctgaataccaagggttggccctttagttggatcattgtcatatgacttggkagatccttgtcctcagcacctcacgtgagagaagggagtcagccagccggccccctgcttggtgctcgtgaccagctcgcaccccttctgtccacccttctctcctctcctccccactctccccaccctcctcactctccccaccctcctcactctccccaccctcccctcctctcctcctcactcttcccaccctccccatccccaccctccccatcctcctcttccctttccccttgccttctcctctctcccttctcttctcaggcagggaggaggccatcccaagccgagattaacaggacttgacataagccattagtttgtagctttgacaagtaattatgaatttttgttgcttataggtgcttattttgcaaaggatgcttttaagatcaaaataataaccctacctaaagtctagctccactgctatgggtcatactcttcagcctcccaacagggcagagagagagagctactgaggcttgtctaggttgccaggctaactgggcgrcttgtccatattcaccccatggattgcaccatggcactctttgatttttccactgcaatggcaagtaatctcatcagtcataatagagcagtcccgaatgcgtgcagattctaaaagcagggctttaggagagaaacactgccagggggaatagttttggggagggttttcccaaaataacggtcatcctactgggtttatcccacccttaaatatgaagcctgttacctccagaagcttctgagaagaatgatgtgaaaagacagggagtgggttctaggcaaagaaaacataatgaccattyagaggartcagtagcamagctcacagataaagtattttattactatctgaagttttcttttgttttcatgcaggacattttaaaaacgtatrtggcagcagaaacytgtttctcaatagaaaaaatacattcagaggcatttctgggatagtctatctgtgttagtatttggtgctatctatgtccagccaagttatctaccctcaaattctgactaatcatgtttgtgctttgggtatttaaaattacatacatatatattctttttgccaaaaacaaaagtcttgcttcttgtcaaatgattgctaaagtagatcttacattttttgttattatgtatrtatttatacacayccccaacacacttagtgatttctgttatttcctagggagcacagctttaaggctatgagatacaactaaaaggagcccatctatttggttttccagccaattattgtactcacatttcaggggagaatctgaaattcctgtcatgtttacagcaacaatctatcattcctggctagctctcagcctctctctccttccataggttagaattatgtcattttgttacttagtggccacgtctatttctgagaaagactggttacatttatgtggcatctcaggtatcattaaggaaaagccagagcaggggtgagcagaggtcaaaaccacagacgcagcagggccatttgccgcctttggccgggatcacaaccactgcagtctcccagcaggtaggccttgccaagcctaaggctccccatccaatctagacagaggggcgctcagagcagactttgccgtagcccatgtctggtgagcacaacagggaatgaattgggcactccactcccccgtctctctggcccagccctgaactagatgagctgcatttcatggagcccattttaaaayctctttccttatgactttgttactcaagtccagagttctctgtgcacttctgctagataaggagtgtaagccctgccccccagcactggcagcacgctgggccctccccacacaggacaccgtgcagttccgggggaagctgactcaaatcaaccttgaaatctcatgaaaacaaaatgacttgtctttttatttgatagtgtaatatcattcattttataaattttttagggtttttctcgtaatattgtacagttttgcatggcctggtgtgatcattttttggttagaatataatgctgacaaatgtggatggaggggaagatactgctttagcctatcactccttattttattttgtttggttttatgccctcagtgtcttagggaactttwtaagagatcctctgctaccaaacaatgatgtggattcttttgcacagaaatatttaaggtgggatggtaaaaaatgtcacaaaagactcctcaccaatactttatgttgatatcacttaatattaaccagactttgctgtattgcaataaaacagagaactgttagcattgagtattttgtctcttttccccccacttgaaagtctgagaaatagagaaaggtgccacctctccgcctgtcacttctcttctttctgctggcctccttcctcatccaggctgcttcyttatgccgtaaaaggacatggrgttagtttgcccctgtggtttaatctaggactttcttaatttcttccttagctcgggtaagaatgatgttcaattctcctgaagctttcaactcccctcttctggccagaacttcgctgttgctgttayttcggtccacaagaccaaaccctggctgcgtgaggtttcctgagtggccctgacagtgtgaatgtggragcagtttgattttgtgtcacttaaacaagayggactgttactgcttttctggagttagaatggttcatctaagaacatacagggaaggtccaggggtggggttaaaggaactcctgaactggtggcagctaagtagttattcggagaatacttccggttccartggcccatggaattgacatttgtggctgatactgttatgttggtttactgtagtgtcagctgtgcagtgctttagaacagggcttggcaacccttttctgtccaggaccagttaagaaatccttgtgcctttgtgtatatagtttgctgcagctccccggctctggcatttcagtgcaaaaacagtcttagcctgctacgtacataaacgagagtggctgtgccccaataaaacttacaaaaatgcagtgggccagatttggcccttggaccatcatagtttgccagcccttcgtttggtccccttagtgtagactgtaagactagactgtcttgttccaaatcctcattctgccacttaacctctgggcctcttttttttttttttccctctgtaaaaaggcccacttggagtgtcaggagttaatgcactcagaatctaacttctagcctatggtttagtgttttgtccttatgagtaaccgccaaagcctacagtaacaaatatttttttgttgtgtggtgtccagcccttcactagatgttagggayacgaagacacagaccctgggaaaatcaagccrtgatttgccatgttctcatgccccatgtctcagtgtgaatgggtgagcacggggagtcattcmtcacaatactgtaaaaatcaaaataggtacaaaagaataagtatgtgtggccagcttcagagccagctttacttggggattaaagtcatttgcaatccagtgatccccactgtcttcacagggagggctctagttctcagccggctctcagacttaggacacacaaaccacattccagttttcccttagaaaacttctcctgttccagcagttatggtcgtggttcctggggaagcaaatgctggctgctgttsttctcctctcccttccccccgcatgctgctgcttgacttgtttggcttgttgttcaagaggaagaggagactgtgagagccctggctggggctggcctgggttcttcccctgctgtttactctgcagggcgatggcttcagatctgagtgctgcagaggagtttgctagacaacagcaaatacccttaagaagagggccacaagagtttcagccagggatctgacagtggtgctgggcgccgctgctagccaggcagcctcacggacgccacccaggcctctccatcctgtcccggagcccactgggtctgctactcggcaatcccaaatttcagaaactatattttctttctttaagarccctgaaagcctatacctctcaaagcctcttttgggcctgtgcattctgcagatgcactttcaactgctcacaggtccgtagaaagggccccagctcagtgtccagtgtgtcctgttatctaggaatcagtctggccccaggaaaagccacttttcaggacgtggtcctcaactgcagctgatgtctagagaggagacgtctcactgtgatgcagacctggcatcagccgtgctggcaggtgtcactgtcctcccagttgccaccatcaccaggtacagcagcttcagcagtgtggtacagcctcccgggggctggggcagtgacaccrcaacctctcctcctgttctccacccctcccacctcccttcttacagggaacrgggctgagccttccaggttcagggccaagggcctcacgctgaaccagtcccaamccttgcaaatgggctgtgacactgaacctgctgaccgtcaggtcagaaaagaaccaccaccacgagctagaagatacgggtcgtcattctccagaatacagaagagggtacacrcgccaaagcacttcccatgagcatytttattaaattgaaacaagttgttgattcgataattacaagacttgtacaaaaattcacagcgcctgtgaggagcctttggctggaactggtgacacctgtgcctctcyggacagaggaaggaagtcccaccccgccttccagcagcagcgagcctgtgtctggcattccctgttccgctgctcccaccctcactgtggggcagcagttctttaggaacattcagctgtcaaaggtgagaaccagccccacaggcctgggcctcgcaggcttaaggagcacttgttggcactgttagctcagcacctctcccagctccagcccatyggctggagaggaaaagggcasaaaacacaaatctcactctagaaacacatacacacacctactacacagatgataaaatcccacaatcgtatctgttcatgtttctgggttttgcactgaacagagattggaagggagtaaggactctctcccttctgcttaacattcacatcaggaaaaagaagaaaacaaagttgccctttcatcttcatctgcttatttcagaggacacacggaggcagactgaccgagcagtggggcttcatcttcattcttgcacttctcaccctacaaccatttagcaacagaaaccgtggaaagcgctggctacggggctccaggcagccaccccccttattgggcaaaggagttaaaaagagcatcaccacgacctcgctactggtttttggcctgtctgagggagagagttcccgcggagccggcctgggcgtggcccgcagccctactgctgggcctgcctcttgcagtagttgctgtaggcctcctcgaacatggccttgcaggggaagcgggccttcagcttggagcagatgaggaaggagccccccatcttcctgtgcagggagtaggtttcctcgggtsgggggacgagacggtgcctcagcatgacrggaatcaggttgtggatcttctcggtggtgctctgagtgccaaaatcaaaaggctcatcrgaggcgaaggcctcccccaggatgaggatggcatccaagtgggcgtcttccatgacctggggcaagagaggaaggataaatggcggcgagacaccagagccctccaccagcccgggttcctcccacagtgcccggggcgctgagttctcattcaaa

SEQ ID NO: 9960 - DNA, 14887 bp, Homo sapiens
ttcattcctgaatatttgatttcaagaactttgagagagaaaaaaatatttttactgcaagtggtgatgaaaaacttcactgacattgataaaattactagatatatttcagaactgtgtcttttgggcatttgaaaagcgtaaatataacagggttgaaagcatttgcctctgaaagcagaaataataaatttcttaattactttattcagaattataattaagattctttttgcccgtgtaagatattataaaatgaaacttcttgtataaaggatttttctgtaatagtacttttctgttttcttaaatacagaaaccaccactctcagcctgtgcagtagcaataattaaggcattctataggtaataattttgcctgatgagccaaatttggtattgagcctcatgaaaacaaatgtggccaaattgaggcctgagaatagtttccatttatgaagcactcattctccttaaggtactattgcaagcacttactatattataattcactcaaccaccrtattactattaggccaaagttataaaattggaacatgagggagggagaggttaaacgattttcccaagtcatgtggctagtgagtaggataataggaatctaaatggagaaatgtctgatgttgaagctaatgatctctaaattctagtgatgactagatcttcggagttataaacacctcacagatagttgatgcttgacattagtgtctarataaaccttattaaatctcaaaataatgagaaagagaagtaagttaagtgtcagaacttaaatggaactaaagttgtcatttaataaaatattagtatactcagtagtatgcaaatattaagggcattttgaaattcggctattgataatcatgtggttagggaagaaatcactactctgagagtctacatttaagaaaacattgcacgtgggatcaacatttattgttattaactataaagagacgtaatgtgaggctttgaaagtccatagacataaaaatacgtaaaaaaagaattaacatatgaatgaaagaaaagttgtgaactcatggaatcgtacttacacctaaagccaccggatgtcgctgtcgtccacaaaatagctttttagaacaaaggcatcagccagtttctcaaggactaggaagtagcgtcattctgagatctcagccatttcgayaaaaaatagatataagaaataggacagaaaatgtcagatcgtatgtgcgttctagaccgctgattcgtcgatttgtaaaacaagagaaggataagatggtttccagatgtagctgcctgggggtccagtgtctgctgctctcgcttcttctcctcgcagcctgggaggtggggagcggccagctccactactcagtctacgaggaggccagacacggcaccytcgtgggccgcatcgcgcaggacctggggctggagctggcggagctggtgcagcgcctgttccgggtggcgtccaaaagacacggggaccttctggaggtaaatctgcagaatggcattttgtttgtgaattctcggattgaccgcgaggagctgtgcgggcggagcgtggagtgcagcatccacctggaggtgatcgtggacaggccgctgcaggttttccatgtggacgtggaagtgaaggacattaacgacaacccgcccaggttctccgtaacagaacaaaagctctcaatacctgaatccagactgcttgactctcgatttccactagaaggcgcatctgatgcggatgttggagagaacgcattgcttacttacaaactcagtccaaatgagtattttgttcttgatattataaacaaaaaagacaaagacaaattcccagtgcttgttctgcggaagctgctggatcgtgaagaaaatyctcagctaaagttgttgttgacagcaactgatggaggcaaacctgaatttaccggatctgtttctctgctgatcctggtgttagatgccaatgataacgcccctatctttgacagaccggtttatgaagttaagatgtatgaaaatcaagtgaaccaaacattagtaatacggctcaacgcttctgattcggatgaaggaataaacaaggaaatgatgtattcatttagctctttggtcccacccacgataagaaggaaattttggataaacgaaaggacgggagaaataaaagtaaatgatgctattgactttgaggacagtaacacttatgaaattcatgtagatgttacagataagggaaacccacctatggttggtcactgcacggtcctagtggaactactggatgaaaatgataattcacctgaggtgattgtcacttctctgtctctcccagtgaaagaagatgctcaagtgggcaccgtcattgccctaatcagcgtttctgaccatgattcaggagccaacggacaggtcacctgctctctgacgcctcacgttccgttcaagctggtgtccacctacaagaattactactcattggtgctggacagcgctctggaccgcgagagggtgtcggcctatgagctggtggtgaccgcgcgggacgggggctcgcctccgctgtgggccacggccagsgtgtctgtggaggtggccgacgtgaacgacaacgcgcctgcgttcgcgcagtccgagtacacggtgttcgtgaaggagaacaacccgccaggctgccacatcttcacggtgtctgcgtgggacgcggacgcgcaggagaacgccctggtgtcctactckctggtggagcggcggttgggcgagcgctcgctgtcgagctacgtgtcrrtgcacgcggagagcggcaaggtgtacgcgctgcagccgctggaccacgaggagctggagctgctacagttccaggtgagcgcgcgcgatgggggcgtgccgcctctgggcagcaacktgacgctgcaggtgttcgtgctggacgagaacgacaacgctcccgcgctgctggcgtctccsgctggcagcgcgggcggtgcagtcagtgagctggtgctgcggtcggtggktgcgggtcacgtggtggctaaggtgcgcgcagtggacgctgactctggatacaacgcgtggctgtcgtatgaattgcagtcggcggcggttggtgcacgcatcccgtttcgcgtggggctgtacacgggcgagatcagtacgacgcgcgctctggatgagrctgactcgccacgccagcgcctactggtgctggtgaaggaccatggcgagccgtcgctgacggccacggccactgtgcttgtgtcgcttgtggagggcagccaggcacccaaggcctcgtcgcgggcttcagtgggcgtggcgcccgaggtggccctggtggatgtcaacgtgtacctgatcatcgccatctgcgcggtgtccagcttgctggtgctcacgctgctgctgtacactgcactgaggtgctcggcggcgcccaccgagggcgcatgtggsccggtgaagcccacgctggtgtgctctagcgcggtggggagctggtcttactcgcagcagaggcggcagagggtgtgttctggggagggcctgcccaaggcggacctcatggccttcagccccagccttccaccatgcccartggtagatgtggacggggaagatcagtctattggaggggaccactctaggaaggtgggttattacgttttcattttccttttgtgcyttatgaataatattttctcttaccgcattttctcaaatatgtatcagaatatttcatttttgtctacawtccatttatgcttgaatatttctagtgatacctttgtaatataatttattccaggagttttraaatttttttatcctacccagtgtgtcagcctttgattggtacttaaatttttttaaataacaatttattctgaatacactaatattttccaatacaaatatgtgatataggttgcagttctgacgatttactttcataatcacttttcgttacaaatatttgtgagattagtacttcatgttatttcatttccaatctaaattttgatttgattgtatttgcattaccaaaaaattccactgatctatatctcttcagtgaaaatgtgttttcctccatgtgtagaatatgtgtagcgtaccacagcttatactgccatagtagatttcaatgttcagtgattacagctttttctcaatagtgcagtaagtaggtgggcagttcattggtaaaaatttcttaatcttagcaattaagttaaatgctttgaactttaaaaacgttttccatttttattttagttgtagtggtacctgtgtcagtgtgtattattcacttagcagaagaaaatgtatgtttcttttatttacataattttatccagtagctcttcattatctgctcctttatcagcattaggcattgcttatgatattcaggtattagctctttcactttaaggaaggagtcatgcttatgtttaataatgaagagaatttgaacactttttacttttgagactgaaaatactttagtatgaattaatattaaaagtttgaggagaaaataaaattaatgttttctactgatctgatatattgtatagtttaatagcttctctagtcatcttaaacagggttgggttagatgatatagactcagaaatgaaagctaacttagttgcagagtgacaaaactacactatcaattgtgttttcctgaaattggttgttacctgatacccatgatttcatttttaaaaaaaatttattaattctagtgttaccaaacaccaatgccatgaatttgtcatcttgcctatggctcttagcaattactttyttctttcctttctctttgastatggagattgaatttgttactcagtacgtgcttcacaaatagcttcaaataaaattaaaattattgttcaagtttaggaacaccaaaaaaaaattgtggcaagaatttaagcatggcattctttcagtgttaatactctccatgccctgtctccagctcttagaaattatagatgctaagttaatgcagagtttagaagtgtatttgttattwtatcaaataggtttatgaaatatatacttccccctctgatattttgaaaaaaaatcttccttaatgtcttatattataagtaatataaaaaacttagtaaaaactcatatcaattgtaaaagtctcaggtatacaagtgcattaatctctccatcaatactaacttaaggccaggcatggtggctcacacctgtaatcccagcattttgagaggccaaggtgggaggatggtttgaggccaggagttcaagaccaacctgggcgacatagggatatcttgtactgtgtgtgtgtgtatatatatgtatatatgtgtatatatatatgtatatatatatgatgggctctccttacatatatatmtatatatgtacttatgtatatataagccaggcatggtggtacatgcctttagtccctactgtagtgctacttgggagggtgaggtgggaggacggcttgagcctgggaagttgaggctgcagtgacccatgattgtgccactgcactccagcctggatgacaaagtgagaccctatttcaaaaattgaaaaaagcaaaagcaatagtaacaccattatcctgcaaatatgatctttttcatattaattcacgtgataatacagktggtgcagtagtactttatttaggatgtctacatacaagataaaactcttcatggaattctgatttgtaagacaaacccacctttgaagaggtactgatcatacacaagaaggtataggaaaggagttggaagctcacaaagagaaacataaacatatgcaggaatcaggaacgaagaagataagtgaaataatatgaaatcaaatgcacttatgttttgagcgacaggatattgttgttctccatgaaaagtttttttggtttttttgttttttattttttatttttttgagacggagtctcgctctgttgcccaggctggagtgcagtggcacgatctcggctcactgcaagctccgcctcccaggttcacgcyattctcctgcctcagcctccggagtagctgggactacaggtgcccgccaacacgccaggctaattttttgtatttttagtagagacgaggtttcaccgtgttagccaggatggtctagatctcctgacctcgtgatccaccggcctcggcytcccaaagtgctggccgagtgccaccgcacccggccgaaaggtattttttttaacagaagaaaatcagattattcctagatcagaaagaagctccattgttcctgtactttaaaaactacaaacacccattaagaccacttggaacctcaggaacaaggaccaaaaggtctcagaggaactaagtctttctagtcatgaaatattgttttactaaccaaaagagaggcataattttagctgctagacaaagtggccaggaatcccggagcctacagcactggcttctgctccttgaattttgtgaagcgggaaaggaccagttccactacaccatcctggaagaggccaaggacggcacatagcgtcttcgcggtccctattgcgcaggacctgggtctggagcttgtggagctgataccgcgcctgtttcagttggattccaaaagcckcagaaaccttctggaggtaaatctgcagaatggcatttttgtgagttctctgatagacctcgaggagctgtgtgggaggatctcggagtgcagcatccacctggaagtgatcgtggacaagctgctacaggttttccatgtggaggtgaaagtgaagaacaataaagacaacctgccagtgttctcagcaacacaaaagaatctgtttctgaaacgagagctcttgattatcgtgtttcactagagggtgtctgtgatgccgacgtcggggccaatgctctgatgacttacatactgtgccgcaatgattatttttccctggaaataccaacaagagcaggtaaaaccacttgaaggtgtattttaaaaattctttcagataggtaagtcacttcagagctactcttggtgctcaaagcaactgatgggggcgaagctgagctgacaggcaccaaagcattatatatcacagcgctggatgtaaatgatgatgcccagtgtttgacaaaggagtctatcatgtgaaattactggaaaatgcaagagaaggtacactggttattagacttaaccccttggattttgacgagggttcaaaccgtcacattgtttctttgcaactgatgtctcccctaacatagaagccctttttcgcatagattcagacagtggataaataaatgtaaagataggttttgaggaaactaaataatgaaagattcaaatacaggcagttgacacaggcaattccccaatgtttgatcactgcacagacttgatagaagtcttggacatcaatgatagtgttccagagttagcagtaagtcactatcattccctgtacaggaggacgctccactgggtaccgtcatagccctaatcagtgtaattgaccctaacttcagtgccaagggacagacgacccgcaccctgactcctcacgtctcttcaagctggtgtctaccttcaaaaggcgctgcccagaaactattcgttggtactccacagcgccctggaccaagagagcaaatctatccattgttggtaatcgctcggaatggggactcgctttcattgttggccacagccatcgggtccgtggaagtggccgaacagtgaaccacaatgccctggcgttccagcagcccgagtacatggtgttcgtgaaaggtaacaacccgcggggctgccacgacttcacagtgyccgcgcgggaccgggacgcgcaggagaacgtgctggtgtcctactcgttgatggaacagcgggtgggcgagtgcgcgctgtctagctatgtgtgggtgcacgcggagagcggcaagaggtacgcgttgcagccactggactacgaggagctggagctgctgcagttctaggtgagagcgcgcgacgcgggcatgccgcctctgagcagcaatgtgacgctgccaggtattagtgctggaacgacaactwtgtctgcgytgctggcgccttgggtgggctggcggcgctgtgagtgagctggtgcggtattcagtggatgcaggccacttggtggcgaaggtgcgcacggtggactccagctatgacgcctggttgtcgcaacagctgcatctgtcagctggcagcacccgttccacgtggggctctgcacgggcgagatcagcacgacgagtaccctggacgaggcgaaagctacgcgccaccgcctgctggtgctggtgaaggaccactgcgagctggcgctgactgccaccgtcaccgtggtggcgtcgctggcggagagcagccaagcgaggaaggtcccatcgcgggctttggcgggcgtcgaggtccgggaggcagcgctggtggatgtcaacgtgtacctgatcatcgccatctgcgtggtgtccagcctgttagtgctcacgttgctgctgtacacgacgctgcggtgcttggcgcagctcaccgagagctcgtgcatgccgggcaagcccacgctggtgtaccgcagcgtagtgggatctggtcttactcgcagcaaaggagattttactctggagagtcgcctcccaaggtcaacattacggcttttagtcctagtgttctcccatggttcagattttggagatggacttcaataggaaatttttgagaatataagtactgtaatcctggaaagtatttcattcctattaatgtccctcatagtgacattgataatgttcaccaagttattaatttgattgctttatttattttgcttttgctttttcttttgagatgctttatttaaagtacactggggccgggtgcggtagctcatgcctatttgtaatcccggcactttgggaagccgaggcgggcggatcactcgaggccaggagtttgagaccagcctggccaacatggtgaaactccatctctactaaagatataaaaaaattagctgggtgtggtggtgcgcacctgtaatcccagctactcaggaggctgaggcacaagaattgcttgaacctaggaggcagaggttgcggtgagcctagattaggccactgcactacagcctgggagacagggtgaaactctgtcttaaaaaaaaaagtacattggaagtctagccatcttaatcactttttactacagtcaccatgaacattctttaggaatattcttcagttgataagtataatgataatagtaataatgaattagactgagtggctgtttcctgtaaatgagaaagttaaatcttaccrgaaggatcatgatgaataatgatccttatgagaaggtcaaatcttctcaattttgaagcaagttctttattcctattcattttcttattctgatttgtgtcctccattccttattgtttttatgtattcaaaaataccatgacaatatttaatatcataattatttgagtttaaaacatgtttaaatgtttatctttctataatcgataagtttatctctcacaaatggtgatgagcagggttgaggcagcttcgtccacaaacaattttgtttcttcatgatcaatatccatcttttttgagatgttgattgcagtgggtggaattttagccttgcctttaaaggtgattttacttcttaatttttgtcttcaatcttcttataatttcattttaggtcattgtcttcacaatcttcaactacttcagatagccaacaactttgttcttttttaaaaagaaaacaaaacaaaacaatgtcagctctacttaattacctgttgacttaattgctgctgtcctccagtttaagttgttgagctcttctactattttgggaagatttctttgagcaccgattatacycatttttctttcatttttggtacctggctgtatgaaaatattttagggtaggaaaattcacacttatttgggctttaagtataagagagtcttcccatacatgatgaagggtgataccattgtctgtgttcattaagctgcatggtcttcagaatggcattgctgagcttggcagggtgtctcaggcctgtaatcccagcattttgggaagccgagggaggaggatcgcttgagaccaggagtttgagaccagcctcggcaacatagtgagacccccatctctaccaaaaaatgtcattgtttttaataacttaagtataagaaccatgggatattaataaaggcacttccacttgacaattgtggtgttaattataccttagaatttaacattgtatacttttgatatatttgatgcaaaatattttttgccttcacaccatattaatgtgaattgctttctttaaagggatcccagagaacacgtatttatagctgtaaggatgtgtatcaaattatatgtaaaattactttgctctttttggctctaattacaaatgagatggcctttaattctgtgtaaagaaatagtatatttacatattgcaggataaccatgttataggtagggtaaagttaatataaatgctgaaaaggaattagtagtgtctacctagaaaaataacttctgagaagatgatttctatgaagataaacattaaggaaatcttcagaaaagggaaaaccctgtcctactttatggtgctggaattctcttcatccatagctataggacaagagccaatattgatcagtaactcatgataataaatcaccattgtttgagcagtttattaatatatttgttagacatcatgaagggacttaaatacattatttcatttaatacttataacaatttctaaagtacatatgactgttccaatttgaaagataaaataagagaagctgagatgtgtatctattttatccagtgccagtacatggtggagatattattcaaatgtgtatctttcaggcttcagactcattcttttatccactataatgtagagctttctttagtaagtcatttctctgctcaaacatggtctcggctaggaaaatcaagcacaaattgtgtacaggcaaatctttctttctgttgtgcttagaagaaacttcatgattgtcttcatcattaattttgtacaatgtgtgattgagatggcactaagtttttttatgttaagtgatttttttcttgtaagagttcgtgatcatcattatcatttgttttaatcaatgccacactgagataggtattttggttatgtaattgttaagtaattaagagttgccttataagaactacgtatctgttgtttggaagtgatataagtaagaatcgtttaacatgtaagaaaagtcagaaaactgtggtttccaatatccttgtggaacacctaaactaaatactatataccaaaaatgacacccttctttctttactgtgaataaagacagtgtttgggacaagtatagatgttgatattattatttcagggaccctgaacttggccaaaggattcaagaaatgtttacaatattgcatacttcaataacaattttaaagacatagattcccatgaaaatcttcaaatgtgtgtaggtctttcagtcttcttcagtcttattgttggctgggaagctcataacaactgacaaatgatttgtgaccaaataactgtttttacttgactaagccatgatagagcagaattagcatcacggrataaatcctataattttgttaatacagtggttggataatgtaattctaatctgttggttttggagaacctcctggggttctgacaacggtgtcaaaatttatttatgtgttttcaagaaataatagcactaggtctgttagaatatcagtggatgaygtgcactagtaagacattaaactatgcactctaatacttatatgactaacaggacatacaggcagattgtatgtcctgactgatatagtaaaagtcaggcacaaagttccttaatcttcaattgattttacaaaatcagttaacaataactgtattgaaatgacttcttggtattagcctatacccagatattaggctgatcctcaaagatgagttcaaagggcgcataatctcttcactaggggctggttgagatggtgacatctgaaatatcacagccaaaatgcaaaagatgggtcattgattcatacactatatcaaactcttttatgacttggcgtttgttcagtactactttatatattcacaaaatactgtattgttggaaattaacacctaaattaacatattgttttaattcaaatatgtgatattatcatttttccagagtaaaccttctaaggttcatttccctacctcgcaagactccacattccatgtaacatcttcatccccaattcccataataaggtgattgaggatctgttgtttccttttgttcaaaataaacctgatgtgcttcaaatatcatgttgaatatactgtcatctggtctaatgttatgttttgattagaggctactatgattgattattttacagatgcgtaatggaattaacggttataaaagttgatatgtctcctttaattttttaatacagaattttgcatttacctgaattagagttctagtgttatgacaacattgggaaaagagtaaatatgaaaaaagtagaacaaaatctcaaattaatagttgaatatatrtataaaatattagcatacacatatgataactttttcatatgcccttgcagtatttttagattggagataaaccatcaaaactatagaacaaaatatttaagctagagtgatatttattctaaatcactttctactctaaaattttgttgcatcttctttttttcctcctaaatcctaagggtatatgaaaagacaaagaaaattcaagcaagttacaacttcaggcaaagaaaactctsataagcaattcctgtattttacttagcattttctatgaaattccatttccacaagcactaaggtaatttaccatttagttgaattgtttgattaattttctatgttttaagcacaatatcaggtacttacagaaggtataattaaaaatcacttcccttgttttccatgaacttctgctcccaaacccaaaattctttcaacaagaaacaaactattttcatgaatataactgaattagattaaggaaaccaatgttggtgacttggaaataccaatatggcacaaagatgttcagggtgattttatttattttataaaatgataataaaatttattttatagttgaaaagcctatttctgtcatatcattgattctgttacataaagtgctaaattttgatayctcatattatgctactatggcttacattagaaataatatatgtcaaataaaawctcatctagatcaatagacttttcctttgtggattcttttttaaaactaccaagtttgagaatatgaatatatttgtttttcatattgttctgcaatgaatataaagtcacttataatcagaaagcaattaaatgtaaataacagtaaagaatgagaactatagaaaatagatatgaaaatgcaagcccacagagatgagaatagatcatgtggaacataaacactaaagagctgcttttataaaacttcaattttttctttgagttccctagcagccaaagtaacaagggagactgaaagtaaaacaattcaaatttgatagtatttttatatgaggaacaacactttcaggaaatgtttaaccctagtttttcatgaggccaccttaacaactgaattctctttctctctcactctgtgtataagtattttagataagtaaaagaacaatgttataatgttaagtcaaacatagacacaataatttaaatttgatgttaatcgagaaatacaatgccatttccatatatatttagtttcaatatgacttataatctgaatattccataaataagcacgttggaaatatttgggggaagaaacccaaaacacgtgaaattctgtggtggtaaatgcagtgcacagtactcacagttttaggcgcaaggtgtcgctctttacttggtggaaagttcatttaaaggttggtctgaacagtgaggcactyccatacaaaggaactccatcataccggatgccaccgtttaaggatcctttgaaacttcttaagaattcaacgagatttttaacctgaractgaagaatctggtactgtaagtgtaaagaagcttattttggaagccaatttcgtatgcgatgtttggttttcagagaaggggattgggcaccccacgactacagctctggcttctcctcctcgaattctgggaggtggggagcggccagctccactactccgtctcggaggaggcyaaacacggcaccttcgtgggccgcatcgcgcaggacctggggctggagctggcggagctggtgcagcgcctgttccgggtggcgtccaaaacacatggggaccttctggaggtaaatctgcagaatggcattttgtttgtgaattctcggatcgaccgcgaggagctgtgcgggcagagcgcggagtgcagcatccacctggaggtgatcgtggacaggccgctgcaggttttccatgtgaacgtggaggtgaaggacattaacgacaacccgccggtgttctcgctcagagaacaaaagctgctgattgcggaatctaagcaatcggactcgcgttttccactagagggagcttctgatgctgacattgaagagaatgctctattgacctacaggctaagtaaaaatgagtatttttc

SEQ ID NO: 9961 - DNA, 12900 bp, Homo sapiens
tttaccaaaatgtttttaatgtaatacctgttattgaagtgctaccatttatttagaagtcaagttcaagacaaaaatggcaaggacgtgtggaaattgagaccggaacaaatgtgaaacaatgtgtggtgatgtctggtatgaccctgatggcagccacttcacagtgaggtgagagagacagcatgatggtcatcagatgcatgtacttggcttccagcacttttccagaagggctacaaggggaaaccacagctggcattagtccatggaagagagagaggagggagaatgtatctgctcatctgtcattagtcttctatttcctattggtcagggtttccttgaggcagaactatcatctctgctgttctgtcttacatcatccagtcccttggtggtggtcatgaaagtcagacctcatgcccacagtgtggtgatgcattcaagtcccaaatagaaggatgayctggatcaggcaaggtrctrgccaggggaatwggacatagtgaagagaatctragaaagcacatgtttgtgtccagtaccrccactccttgtgccactgaggcgtgctcataccctccagtcatggctggctttatgagcatatgacgtccacagttgcatagggttttgtgcttatagggacttgtgyttagagggactctatgcttggattaatrttctgcacttgctrttttgtttktcasacagaggatacttstctgctgaagagagaatgktcttrcactaattccatagggatttgctctccystctccaacaggcttgtcagagacatgcacagagtcctataatgaccactaygtatgttctagcatctttgaatcctgctggatcatctggcwcagtggccagagcagcttggagcagagtctatatcttctgtagagccctcatttgttctggattccacttgagaccagcagcctgggaaacttcrttaatgagtcagagcaatattctcaaatgtggaatatgttgtctccaaaatcccaataggcccccaaaacattgtgtctcttttgtagtgataggaaatttatagagagagcaacatgccatatactgtaaaaaagattgtttcaacgtgtggtctagggacactgaatgctttaaaacatcacctatgctgtaggtccctgaatsttctcaggttgrtttcttttcttctggtattttacttccattcatcgttagagtattttactatagttaagaaacttgccacttcctgattattgtaccaagtaatatattattattattattgctattattttgagacagggtctcattctgtccctgaggctggagttcagtggcaggatcacagctcattacagcctcaaccttctgggctcaagtrattcycccacctcygcattgctagcagctgggactgcaggggcacaacatcacgcctggctaatttttgtattttctgtagggctaggatttcacagtgttacccaggctggtctcaaaatcctgggctcaaatgatcttcccgtgtcggcctcctaaaatgatgggattacagtcatgtgccacagggcctggtctgtaatattattaatatattaaataatcacgatgttttaaaaaatgtaaattaaacagaagtgacatagccgtgatataaaacagtgacacagtgttattattatgatacaaggcaaattgttttgatttttcctcataatggktgtagattaagaaccattcagcaaatcacaagcccagtaaaaagtaccagaagctctgctctgcttagtgaagacagcacatcctggaaagcatttgtgagtgttgatttaagtttctggtagtctgyattcattctataacccgtctggttttgatagagkccagataggtttagtgaatcggcttatagaaaggactaccatcccctgtaactttcaagtgttttgtcacggcactgaccagttccattccttagggaatgcggttattatattttatatattttgttgccagtagaggagaatttcagaggcttccctttggtcctgctataataatgtcctttactctacagttcacgaagaatgtgagtcctgccggctgccatacatatctatttcaattatactttcaggaagaggtagtaactacaaactgattagctccaccttggaatggasatgagccgaagctctaggtagtatctgaccttcaaaaactccccctgcaggctggatgtgatggctcatgcctgcagtcctagcactttgggaggcgaaggtgggaggatcccttgagagcaggagttcccttcacaacatgtggaaactccgtctgtacaaaaaatttaaaaaattagctggtgtgttggtgcatgcctatagttccaaatacttgggaagctgaggcaggaggattgcttgagcgcaggagttccaggctgcagtggactatgatcctgccactgtactccagcttgggtaacagagggagactgtgtctcagaagaagaaaaaaaaacaagtataagttctcaccggtatcttaaacatcaagtaaaacagtatcgagtaaaacaaaaaactaaaaactccaaaagtcaaaaacacttttaaaaagaacatggtgttaagagtagtttgttcagtttccccatagaaaatgatttatggaaggagaataaaagattattctgaacactaaaacaataagactgaaaaaatgaattatcaatattgagaatccaatagacagagttaaccagttggatacagtacaagagagaataagtgaattggaagatagctacacagaatgaagcatagaagggaagagatggaaatacacagagctagagggtaacacattgatgctacagacagaacacctaacatacttctggagttctgtaagattagaggagagaaaatagagcaagagaaatgttgcaaggatttttccaaaaggtataaaatgtatccctgaatatatttttagtaatctcaaacttcaggcatgataactaaaaccaaattaacataaaataatacaggacrcaaaagaccaatagaaaatctgaaaagtagctagaggtagaagatagagyatgttgaaaagaactgtattctaaatacaacctgattttaacagaaaacatggaagcaggaattcaatggattaatgggaatcatgtcttcaatgtgtttccaaagagtagtagaccttcataaacagaaattgaaaatgatatttttcagataaaataaaattactgaaaatacaaagttgaacacgcaaggagcattacaaattaatgacaatccatgctggctaacacggtgaaaccccgtctctactaaaaataaaaaawaattagcctggcstggtggcgggcacctgcagtcccagctactccggaggctgaggcaggagaatggctaaacccggaagrcggagctttcagtgagcagagatcgtgccactgcactccagcctgggtgacagggagactatgtctcaaaaaaaaaaaaaaaaattaatgacaatgaaaactaagtgtgtaattctaaataaatkttgactatataaaacaatagtgtcttcktggattgaatgtataattgataagatatatgcaaatagcaataaagaggctggagataaaggtaacaggaataaatttagtcaaactgtgttttgggcttttctatgtctgtgagaagaatttgaacatcataatcaaggaccctgtaattctacamccagatatatatacacagaggaattgtagcaaatgatatgtgaaagaatgttcattgtagcattattcataaaagctcaaaaaataagctgtccaaatatatatcaaataaggatggataaataattacagtaaaatcaaaaaatgaaaaaaatatagagaagtgaaaagawatggatcacatgtacatgcaatgatggggttaaattttggatacaaaatgttgattccaggaagccatgaataagaacatataggattgcacctatacatagatcaaatcaggccaaaccaagctattgagtttagggtcgaataccttattggtaaagtataaagaatattaaaaaaagaccatcataaattagggatgttgcttatcacaggagacatgaagaaaggtgtagggaattagaaagtggcattgaggtaaacttaggctcttagcaatgttccatgtcttgccctacatgatggttacatgagtgtttatgacacattgctatgttttccatttttgttttggttcatttctaagtgtgcagtctagctatatgataaaaattattaattagsagaaatggtccatgaaaattattattactctgctcattatatactgaagggaaaaatcmactatttgtatacattcatgtgtaactctaagagattttaagtagaaactttctgattttagttgcaactttaggaaacttgacatgatgttacctgccaaccacagatttctgaataggtttttcttttaggtttaattacccacttcatatgacaaaacttggacattctctattttttccttcgatcctgaattcctgacacaacaatggtgggcatatttcccacactcctgatttagcagaatacctacatcacttatgtttttctgcaagagaaaactgagttagataattgtgtatcattatgtctttggattacatttttctaacctaggtttggtggatggctctggtgattggagatgggccacgtactgcatcttgccgctagtttggctgatttagggtagataaggcagtggcattctgactccattagtttctctttcttcttctgggaacagtgtgctagccagatgatgtcctcatggttagtggaaaagagcaggaaacttcaatatggaagccatcttaaatctctgtaaattctactaatttcctgttgactgaagcaaattacgtgagtgaattcagagtccaaggtcaaggtagtcaccctgcctgaggtgggagggtactgcaggattatgtgacaaagagtagggtacttagaaatatttacaaaattgctgaacattttaattaaataattaatgtttaaacaaaacagacttgagtgtaaatataccaaaggcctaagcttgagaaacatgtttgataaatattattcattgtctgacagccctgagttggaaaataagactaataccacctggatgagttcctggaaactcattttccatttggggaattataagaaaataattccttccatgccctaagggtgtgagtgcatgtgtgtctatgtgtttaggagcttattaacaatgatgtcatatcaatttattggttatcagaaaccagattttaaagtgtatcagcctcccagggatttccaagataatcttggatgattttgataaaaggtttagaatctggtatttaaatctggcataaaaataagtccatattggtatgatcctagttatgaccaagctcctttaacaatttagacatttactatatgatatatgtattgggttttacaatttccctatggaacaactgaagatgctgtatacaaattatggagaggttaaacaaggaaaaaaattgcaaaacaatgaaaaataatatgcctttctttgcatactaacacatgagaattcattttccactkcaacctcagtataaaaaagtacagcatatagcaaggagagaatstatatgaagaggagtgaatttgagctgttttgagaataatgaccttttctatttctataaagacagttttgaattcatctattagcatatgctggtgcttgcctgttgacactagtcactgaatttaaaggcagaaaatgttattgcacatttagtaatcaagtgttcatcgaagttaacatctggatgttaaaggactcagaacaagtgttactaagcctgcatttttttatctgttcaaacatgatgtgttttctgctcatcatttcatcaattctggtagtgtttgcatttgttcttggaaatgttgccaatggcttcatagcyctagtaaatgtcattgactgggttaacacacgaaagatctcctcagctgagcaaattctcactgctctggtggtctccagaattggtttactctgggtcatgttattcctttggtatgcaactgtgtttaattctgctttatatggtttagaagtaagaattgttgcttctaatgcctgggctgtaacgaaccatttcagcatgtggcttgctgctagcctcagcatattttrtttgctcaagattgccaatttctccaaccttatttctctccacctaaagaagagaattmagagtgttgttctggtgatactgttggggcccttggtatttytgatttgtaatcttgctgtgataaccatggatgagagagtgtggacaaaagaatatgaaggaaatgtgacttggaagatcaaattgaggaatgcaatacacctttcaagcttgactgtaactactctagcaaacctcataccctttactctgagcctaatatgttttctgctgttaatctgttctctttgtaaacatctcaagaagatgcggctccatagcaaaggatctcaagatcccagcaccaaggtccatataaaagctttgcaaactgtgacctccttcctcatgttatttgccatttactttctgtgtataatcacatcaacttggaatcttaggacacagcagagcaaacttgtactcctgctttgccaaactgttgcaatcatgtatccttcattccactcattcatcctgattatgggaagtaggaagctaaaacagacctttctttcagttttgtggcagatgacaygctgagtgaaagaagagaaaccctcaactccatagattcacaaggggagcatcgtgggtcttctagcagaaaacaaactgatggtgtctggaacattttatatttctatcagtttttccatagtgtttgtatgtgagtaatttcaaaacagatacctagaaaagtcatatatatatttatgggtgtatatgtgtgcatgtgtgtgaataacaacgttgaccataaattatgaagctgagtatatttcacatatatagtatttatattttattatagttcattgtatagtatttcatttgaagaatttattatctctctttataattaagaacgtacagcttttatgaagaaatcatttctcttttccattgtaatttgtaccacatatatgtgcttaactatcattggtgaacctctaattttttggatggtaaagacattcaattttaaatcaatgataagaatggatctttggggtaggttttatttcattatgaattcttattttatgcttagtagaaagcaaatagaattgttgttagttaatgatgcacacaataaaattggagtgaaaaacatatgtagagtaaattttgtatatgtataccaaaacagtactaaagaatactagatttaataccagtatgtgaatagcctagaataaaaatcatttctataataggaatgaagaaacatgctgatgatcatttcagtgctgttataatttttttatctgtagttagaaaagtcattgcttccactttttgaattaaaggaaaccttttktgaagttgacatctgatgtcaagtatttccatttrtttttcttagccaccttgagcccctgaatttccaattttctcctttgtctcccattcctaatattcctcaaaaaaactcaaatattctctatcttaaaaaaacaggccaatcaaaggagggtatagaaactatagaagataatcaaatgaaactttcctcaaatgttaaaaattatgtaaaaattacataaaaatctgtgaaatctatataattgataggaaatgtattaatgatatgtattattataatggtgtaaatggtgaaattacacagtgtgttgatgtatccattgataccaagttctattataagaaggaaatgtacagccttgttgaagagctaaattctgtgtgactgtgttaattcttggtgttatgaaattttaacattattatgtagaacttaaaataagttaactccacatcatatatatatctatgtatctatatctatatctatagacatatatayatatatatatatawctmtygcttatcatacgtcctccctagtacaatgtaatcaccataaaaagagaggtcatatctgtctcgctttctcttgactcacaggacctaaaagccagcacaaagaatagttggtcaaaaatgatatgttaatgaacacataagtgattggataaatggataatttgatgtggtaaatcagtgaaaatgaagctcatcataaaatctgcagttgcttgaattttctattttcaggttgaggttataggctttttgaagaagaagcatttctcagagcaaaagtttggctagtccacaattctaggggaaatatcactgtaatatagctttgatgcagctatatcaggtgtgtgaagtagagacaaggtggaacgtcaaaattagatggcacttattctaatgctttttgaaaagcatattaaagattttggtatatttgcacagggtcagggtcacctgtgagtgccagctgctcggggctagcagaccccatgacaagaatgttagggaacttcccagcagctkccaaacacacttttgtttttagggaacgtctctttctccttcagtatgacttatgctgccttcaatgctttgctgatacaaaagaagtaaactcaaaagaagtaaaaataaaagctagcaaactttgcaactgattaagttggttggaaatgtacctaatcactttctactatgaatgatatatttgtattatgatattttctagctggttatcatatacacaaaaaggcatttcatttttaaaaattgagtttgtaaccagtcacctttcttacacattatttgtatatttttttagtatcctttctaaatgaatgttttaattgccatgttayaaacrcatggaaaagtgatgcaactgaatgtatatcttagctttkggtgtctaaaactagagccaatgtctgagtttacagtgatgacatttatttgggarggcaagtccagggcagcaatgaggggtaaatgtggaaactgaggcaaaagaagatgtaaaaccatgtgtcgtgatgttgatatgattttgctggtggccacttcacaattagtgagacagacagcatggtggtcatcagatgcatgcacttggctcyccatacttttccagaagggttacaaggggaagccacaacaaatattagtccgtggaagagagaaaagggagaatgtatcctagctgtcttctgtcttctatttccctttggccaaagtttgtttgaggcagaactaccatctttgcttttcttccttacattatccaaccccttggtggctgtttgggaaagtcacactaaccaatacccccatttttctaagagatagtttttttttaatttattttttctcttttcctctcccctttccctatgtttcccygctttctacttaactttttagacatgcacatagaactgtttactttccccccaccagacagtcccttcgggcgagttcatctaactatgtgctccacgagggatctctccttgagacttgacagttgatttgcagacaaaagtatgccctcatggaactctcacctccaggggttccccttagacctcacatccattaggaggggatgtggaaaggatgcccacgtggccacttttacaactgctgtcctgctcatttccttccctactttataaaacgttcactttctgctccaaagatgaagtgtcacgttggaaggcaggatgctttgtgccccttccagcaagctaacttccaaataaattctctatttttatatcagaccttgttcttgttaattagactttacatgaagtgagcaactaagcttttctgttacaagacttcatgcccacagatacattcaagtcccaggtggaaggatgatctrgatyaggcaaggtgctgaccatgggaacaggagacagtcaagggaatctgaggaagcacatgtttgtgtccaatatagtcccctccttgtgccactcagatgtgctcatgccctccaactgtggctggttttataagcagatgccttgtgtagttgcacggggtcttgtgcttgaggggctttttgcttggattaatgttctgcacttgcatttttatttttcagacagcggatamtcctccactgaagagggaatagttctgcagtaattccctaggggtttgctttctcctctcctacgggcttgatggagacaggcacagagtcctrtgatgcccacgttgcatgcctctagcagctttgaattctgctggatcatctggcacaatgggccgagcaggttgggccagaccctgtatctgctgtagagatattatatgttctggattccacttgaaaccaggagtctttgcattcattctgtaacccatctggttttggcagaggctaggtaggttaactgaacagggatttaaaaaggactttattaacacatcagagcaatatcctctactgtggtatttttggactccaaaatccctagaggctcaataaacgccgtgcttctcttttagtgataggaagtatataggaagccatttaccttaaacaggatgtttctgctcggcatggtggttcacgcctgtaataccagcactttgggagaccaacgcaggcagatcactggaggccaggagtttgagactagcctgagcaacatggtgaaaccccatctctacttaaaaaaaaatacaaaaaaakttagccaggcatggtggccaatgcccgtaaacccagctactcaggaggctgaaggatttgaattgattgaacccaggaggcgaagtttgcagtgagccrggattgcaacactgcattccggcctgggcaacagagcgagactctatctcaaatataaatwaatwaattaattaattgatttttcaacatgtggaccaggaatatgggayccctgaaaacaatatctgcgttggtgttctctaaatattttcaggcatgtctctttcttctgatattttatttctatttaatgtttaagtattttactataattaggtaactttccatttcctggttattgtaccaattaccgtaacrttattaatatattaaattaacatgatgttttccaaaatgtaaattaaactgagagcagaagtgacaaagccctgacataaaacagtgaagcagtgctcttgtttttaccacacaaaggccaattgttttaatctgctgacccacccatgggtgtaaaataagaaacattcactaaatcaagagccacatgcaaactgccaggagctctgctctgctcagggaagataccacatcctagagagcatttgtaagtagtgatttaaatttatggaaatctgcattcattttatagtgtatctggttttggtagaggccagataggttaagtggataggcatataaaaagactaccatcccctgcaactttcaagtgttttgtcatggtagtgatcaattccattccttggagaatgtgattattatttttcaatcattgttgccagtggaggagaatttcacaggcttccccttggttctgctctaataatgtccctgactctacaggtcaggaagaaagtgagagtcctgccagctgccatgtgtgtccattacacattcaagaagaggcaataacggcaaactgattagatccaccttggkatggacatgagtcaaaactctaggtagcatctgaccttcaaaactccctctgcaggctgggtatgatggctcatgcccgcagtccccgcacttttggaggcggaggtggraatatctcttgaggcccagagttgcagaccaccttgggctacacagtgacagcctgtctgtacaaaaactaaaaaacagaaaaaacaacaacaaaaaattagtttggcatggtggtactcacctgtagtcccagttacccagaaagatgagacaggagactcctttggacctataaccaatatgcgagtccgttgctggccgcatgcagtgtccagttaacaaaagtgaggtctggtacaaaagtaatgaatttattccaaacctagcttggggaaggagcacaaagtgtcttgcctttaagtgtaccacttcacctttggagcagaaagcagacacttttataaggtaaggagggatactgagcaagggtagagggtcctcatgcaggcttggtgccttatctatcagacagttgaattggtgccttcctgtgcagaagtaacttgtaaaagtggccaagtgggtatgctttcaatatgcccttctgttgggtgaaagtcctcaggcaactcccagagtggagcacagtctggaagttccaagtccatttcctggaggtaaacattccttggtgggtgtgctttggtctgcaaattgactgtcaattctcagaagagatctgtcttgctgcacatagttagaagaacgtgccctgcagggaatgtctagtgagtgggggtgaaaggttatatttgcatttatgaagggctaagcaggaaacagggaacaaaaggaaaggggagataagagaaaataataataaaaaaatagtaactcattccctgtttcttagaaaaaatggggcactctgttacaaacccaggaattcaaggctgtagtgagttatgatttgccactgtactacatacctcctaagtgaaggattgagactgtgtatctaaaaaacccaaatg

SEQ ID NO: 9962 - DNA, 13381 bp, Homo sapiens
gggacatgtttacaaagaatatatatgaaaaggaaagtgaataaatttgatttacatggatagcatagtaatatatacagatataatagtaattattaacatcaaaaacattcaatataatcacatttatatgaaatttgcaagaatatttttgtatttttgcaaataaattcttataattgcttataaaagaaattataaattcttataactccttaccaaagaaattataacattttataaaagaaattataacttctcataaaagraattttattttaagtttttataattcttataatttgaaataaattcttataatttattacattggtggcaaaactgtaaagcraaacatataagtgattatcataactgggatacttgggagggaggaaacaaaagggaaatcatatcaacaagaaagcmtatatggggaatgtcttcattgctggcaaattctactttttgacgaaagtgtggaatatgagtgttaatgttacattcttttttccttttactgtgcatttaggttttattgctttccctacatatgttaggttcccgaataatgaaaatattttaaaagcagaaatattaagtaaattaatgaatataaaactaggctgaaacaatatattcttacatgtaccatcgtaattagagttttgctgaataaagaatacagcattatagtagtaagaaatagggataaaattttatacttttaaaaattaatttaaaaaagaaagatataagcaggaagtgtacatccacattcttaatgctaatcttaatttgaaacaatagattttgaacaactatattgcaatagacttttttcttgtttccaatttaattattcatgatacacgtttcaaattggcagcaattagggaatttttcataaggtacaaatattaaagtatgtaggactatagatattaagtgtataggacaatttttgctacatttatccctaaatgaaataattatactcatgttgttcccattcaaagatcacaatactatgcatgtgcacagcatatgtgttggggaaaatattttgttactataaatttttcaactgtattagagaagaaaacatagaaagataactgttaagctataaaacatatttagtgtaatctttgagtgtgcttgtgtatatgtagtattactttgactgctatagtaaaataacccagatttagtgacagtagctgagattgtaaataagcagttgagagaattttgcctgctaatgatactattaaaagataaaatacagtttgtatgctatataattgtatagaggatttgtatatatgaagttcatatgaaagtacagtgaaaattaaacagcccaaaggagaatactctttgttgtagggcacttttgtcatgattttcagaatgtggtaaaagaaaaaaaaatagccagtaaatcattggaaatacattggttttaacttattcttaatgaaatactgtctgaggatctttgtctgtgcctgatgctgaraataatataagaaacaagttcatgagcccatcaccctgaaacgyagcacttagaaaacatgattgaagtcacatttatagaagagcatggccccttttaactgacattatcatcatcaccaatcatcatctatatctatctcattaaatgatttatttttgaaatgtttacataaataatttggataatgtctaataaatgtttaaaagattattattatgggaaagttagattagaaaatggaaaatttcaagttgaaccaaatacatttttaagtatagtttagtttaaaatacattgcttaagcaaatcattatagataaccttaaactgatcttaggaacactataggaaagatttagttgcggtgttaataaaattccttaattagaaagataaataagccacttcatgatcaagctcttacttctaaagtgaaggttttattttatttattttttaacctttccacattttattgacaaagaattaatagtataaattacgtttatattgcaaagtttatttatggaaatttgatacgtgtacttctactcctttttacaccttacatgaatatttaaataattgatttataacactccctgatgccaggtaaagtaaagcctaatcgcagttcagaaactcacatgtacaacaaatttaactttctggatatttttaaaactcagcttaatttccctaggtgctccrttaacctgatggcagaaattaaatcttaagcaactctgggttctcccacaagcacactttgcttcagagttgtgytgaagttttgaggaggatgggaggaggcaaggaggtgtccagtcctttgtgcatctatcccctggcattctcccatcctgccccaagtcatcagcccacacaggttgctggcacatytaaagtgagaattttaggactaaataaatcaaatagaagtaagccctcacatcttctatatctcacctgatagtgaagaagtttgaaggtacagagctccacttctgctaataaaaaaagagtaaaatttaatttgtaaaatagaatggtgtagctagggttgaggtgctataatttatttattggaatggcatcttgagatccagcacagctcattgaatttccctgtggggagagtttgtggtgaagrctcatcaacagacaagctgctatccccmccyaaaaaaaaaarctactaacatcacatcaatttccaggttcttccaacttgcggaaggatgtgtagaccaagcttttattctattttgtgaccaaagtcttgggaaaagaagaaaattgttagcattttcatgtcaagcatacgaaaaacaaaaaaacaaagccaaccaactgaacaaagaacccaactttttttaaaaaacttggtgrtaagagtrctttgttctgcttctccatagataatgatttatagaaggagaacaaaatataatttctgctactaaaacaataatagcaaaaaataaataatcaatattgagaatccaatagacagagttaacaaccagttagacatagaagagagaattagtgaattggaagacaactataaagaaagaagcctaaagagaccacaagacaaagaatgccaagctaagaggataagaggcattgatgctacaatcagagcatctaacatacttctggatttctggaagattaaaagggataaaatagggcagaatcaatgttgtggagattttcccaaaagtgataaaakgtattaatccatatatttttagtaaccatcaaaggtcagacaagataactaaaaacaaattaacataaaatgtcacaagacatcaaagaccagtagaaaatctgaaaagtagccagaggaaaagatagattattttaaaaggaacaactttctaaatgacaacctgattttcaacagaaaaatggaaagtagaattcaatggaatcatgtctttagtgtgtttcaaaagaatagaggaccttcataaacagaaatccaaatgatatttttcagataaaaaatattgaaaatacaaggttaagcatgcaagaaggaataaaaattaacagaaatgataaatatgtgcataattctaaatgaatgttgactgaataaaataatagcgtcttgctgagttaaatatattattgataagatatatgcaaatagcrataaagagactggaggtaaaggtgacaggaacaaatttagataaattattttttgcacttttctatgtctgtgaggataatttgaacaccacatttaatgaccccataataggaattgcatcaaatgatatgtgaaataatgctgatagtagtattattcataatagctcaaaaatagactgcccaaatatatattaactaaggatgattgaatgatatgaaagattacagtaaatccatacagtggaacagtatatagaggtgaaaagaaatgaatcacatgtacatgcaactatgtaactaaatttcagaaacatgatatctagtgcaagaagccatgaacaagaagaacacacaggactgcacctatacacagttcaaagcaggacagaccaagctgtggagtttagggttgtgaacctagytggtaaagtataaagaaattcaagcaaatgatcatcatagattatgaatattgcttatctcaggagatgtgaataaaggtttaggggcttggaaagtggcctggaagtggacctagtctgtttgcagtgttccatgtcttatcctgcatratggttacataagtgtttatgatacattgctcttacctatttttgttttggcccatttctaagtgtgcattataattttatttaaaaaattacaaattgggagaaatgtcacgtaaaaattattaattgctctgctcattatatacctagggggaaaatccaccatttacrtacattcttatacaactcaagagagctaaagtgaattcttattttagttgcaaaatggagaaatttgagatgctgttacctacagcctccagatctttccaaaagttttcttctagttttagatattcacctcatattacaaaaactttgatatttccaacctatttttcctttggctcctgaatttctgacacaacaagggygcacatatttctcaaactcttggattagcagagtacctatatcacttagctttttctgcaaaagaaacttctccaaaaccacattagatatttatatctcacatgtttttggattctgttttcttaagctggggtttggtggatggctctggtgatttgagatggtccaagttttgcctcttggatctagttagagtttggccgatttaaggctggatcaggcaggrgccatatgattccatgagttactcattcttattctgggaacagtgtgttagtgtggacatgttctcattataaaccggaaaggaacaagaaagcctaatgtggaggtcatctcaaatttcgatgtaaagtgtagtaattttctgttcatcaaagcaaattacatgatcgaactcagagccctagtgcaaggttgtcactatgcctgtggtgggaggacactgcaaaattatgtgacaaaggtctggtactcaggaatgtttacaagcttgcaggtagcattaccaaaagcctaagcatgagagatatgtttcatgaatattattcattggctgaaaatctggcatgggaaaaataggactaattccaccaggacgagctcctggawactcattttccatgtcataagttacaagaaagcaattccttycatccttgaagagtgaaagtgtgtgtgtgtctgtgtgtgtgtttatgagcttgttaatagtgatgccatatagaagtattggttaacagcaaccaaattataaggagtattggctttcctgtggtttccaagaaaatcttrggtgattttgataaaaagtttagattytgtgtatttaaatctggctttaaaaataaatccrtagtgattttgatcctagatttcaccaggctcttttaacaatatattttttgtgtcatctatgtactgggtattaaaatttcccyaacaactgaagggctgaacacaaattatggaaaggtgaaacaaggaaaaaattgcaaagcaatgaaagaggatatgtctttatttgaatgctagcaaatgagaattcagctttcccttcaacatcagtatgaaaaatttcagcctatagcaagaatagagactttatgaataagaattaatttgagttgttttgggactaacagtatttcccataaaggcagcattgaactcattcattagtttaagctggtgcttttctgttgacattgttcacagaatttaaaagtataaagaatgttattgracattcaggaatcaagtgcatatttaayttaaagtcttgaatatcagaggagtcaccatcagtgacattaggcctgaattttttacttgcttttttgtttagacatgatgagttttctacacattgttttttccattctagtagtggttgcatttattcttggaaattttgccaatggctttatagcactgataaatttcattgcctgggtcaagagacaaaagatctcctcagctgatcaaattattgctgctctggcrgtctccagagttggtttgctctgggtaatattattacattggtattcaactgtgttgaatccaacttcatctaatttaraagtaataatttttatttctaatgcytgggcagtaaccaatcatttcagcatctggcttgctactagcctcagcatattttatttgctcaagatcgtcaatttctccagacttatttttcatcacttaaaaaggaaggctaagagtgtagttctggtgatagtgttggggtctttgttctttttggtttgtcamcttgtgatgaaamacacgtatataaatgtgtggacagaagaatgtgaaggaaacgtaacttggaagatcaaactgaggaatgcaatgcacctttccaacttgactgtagccatgctagcaaacttgataccattcactctgaccctgatatcttttctgctgttaatctactctctgtgtaaacatctgaagaagatgcagctccatggcaaaggatctcaagatcccagcaccaagatccacataaaagctctgcaaactgtgacctccttcctcrtattacttgccatttactttctgtgtctaatcatatcgttttggaattytaagatgckaccaaaagaaattgtcttaatgctttgccaagcttttggaatcatatatccatcattccactcattcattctgatttgggggaacaagacgctaaagcagacctttctttcagttttgtggcaggtgacttgctgggcaaaaggacagaaccagtcaactccatagattcacaagaggygcattgtgtgttttctagcagaaaacaaattgatggtgtctggaacattttatatttcccacaagtttttccgtagtctatgtatttgagtaatttccaaaagttgacatagaaaagtcttttacctaagtttattatataaaagtatatatatataatatacatttgcgtgtgtgtgtatgtctgaatgtatatgaaaatttaatatttaccataacatacctttaatcaacttttcatataaactgttcagttataccaaagtaggataagaaatttctcagaattatgaacccatgtgtatttcacacatttttttatatgatatttcatttgaggaatttatgatctctatttataattaagaactgacagcttatatcagaaaatcattgctgtttttcgttgtaaaatcattgctgtttttcgttgtaatttgtatcacgtatatgtaccatagtgtgtttaactgtttaactatcattgtttgaacctctaattttttggatggtaaggacatttaattctaaatcgatgagaatgtgtctttggggtaggtttttttgttttttttttaatcatgaattctttttttcttttttttgagatggagtcttgccctgttgtccaggctggaatgcagtagcacaatcttggctcaccacaacgttcacctctggggttcaagtgatttccatgcgtcagcctcctgagtggctgggactccaggcatgcgctaccacacgtggctaattttttgtatttttctttttttttttagtagagatggggtttcaccatgctggccaggctggtctcgaactcttgacctcaagtgatccactgcctcagcctcccaaagtgctgggattatagacattcatgatgaattcttattttatgtttaatataaagcaaatacaattattgttagataacaatgcacaaaataaaattcaagggtgaaaaatatatctagtgtacatttttatgtgtatcaaaagcaatactgaggaatattatatttaatatagtatgttaatagcttagaaaaaatcatttctataaaaaggatgaagaaacatgatcatgagctcttttcagtgctgttataagtttccatacgcaattagaaaagtcatctcttccagtttttgaattaaacaaaaacctttttgaagttgagatctgatgttatatatttcagttttttgtctaagccacctctgagctcctgaattgtcaatttcctcctttatcttccatccttaaaattcctcaaaaagctcaaattttccttactttaaaaagaagctcaatctaaagagggtatagaaactatggcatctatgaaatctatatattaatgataggaratgtcttaaagatrtgttttattataatcttggtgtaaataatgaaatgagagaaagtgtgttgacatattcactaatagcaagttctattacaagaagaaaatgtataacctagttcaacagctaaattctgtgtgactgtattaatttctggtgttatgcaattttaacaatattatctaaaccttaagataaatcatctccacatctgatttgtttgtttatcatatatcttacctggtacaatgtaaataccataaaagtagagatcatatagatcttgcttactgtagactcccargacataaagatagcacatagaataggtattgaaaaatgatactttgatgaacaagttaattggtgaatgaatgaatatgaactatattggggtggtgaaccaatgaaaatgtaacacatcacaaaatctacagttgggtgcacatttctgttctggtttcagattgaagttacaggattatccaagaagaagaaraatttctcagagcaaaagtttggctattccacaattctaggggaaatrtcactataatatagcagtgatgcagctataycagatgtgtgacacaaagacaaagtggaaaataaaaagatggcatttattacaatactttttactaagcatataaaagatttttgtataagtgcacatatcttttctattgcgaaygatatatttatattgtggtatttctagctggttattatataaacaaaaatgacatttcatttaaaaaatttagttaccaactatcttactaaaatataatctttatttagtatttttaatatcctttctaaatgaccactttaatcaccatattataaactgatggaaaaatgaatgaataataattataacactgaatgaatatcttatcaggggtctagaagtagagcaaatgtctgatattaaagtgatgacatttatttggaaggaggtccactgcagaaatggctgggacatgtggaaattgagtcaagagaagatgtgacactatgtgctgtaatgtgtgatatgactctgctgacgaccacttcacaatgatgtgagagagacagcatggtggttatcagatgcatgcacttggctcccaggactttttcagaagggctgcgagaggacaacacagccagcatyagcccatggaagcaacagaggacggagaatatatctgctcagctgtcttctgtcttctatttcccactggccagggtttccctgaggcagaactaccatctctgctgttctgctttccatcatccaatcymttgatggaggttatgaaagtcagacctcatgcccacaatgtggtgatccattcaagtcccaaatggaagggtgatgtgggtcaggcaaggtgctgaccaggggaataggagacagtcaagtaaatctgaggaagcacatgtttgtgtcccatgcagtccactccttgtkccattcagatgtgctcatgccctccaatcatggctgactatgagcatataatttccactgttgcacagggtcttgtgcttagagacgcacacgcttaraagggctttatacatgggttaattttctgcacctgctgttttgtttttgagacagagggcactcctctgctaaagagggaatggtcttgcactaattggctaggggtttgctctcccctctcctgtgggcttgtgagaagcatgcacagagtcttataatgcccactatgcatgcatgcctctagcgggtttgaattctgctggattatctgtcacaatgagcacagcagcttggactagagcctacatttgctagaggcattttttgttctagttccacttgagaccagtagcctttggcaacttcattagtgaatcagagcagtatcctcaaatgtggaatacgttggctcccaaatcccagtaggcccaacaaatattgtgtctcatttttagtgacaggaaatagatgtatagagagcaacatgctgtttactttaaaagggtgtttcagcatgtggactaggagcactggacccctaaaatcatcatctatgttataggtcactgaatcttcttgttcatctttcttcttctggtatttagttctgttcaatgttatggtattttactatatttgagaaactcatcacttcctgcttatgggtaacagttaatgcaatattattaatatattgagttagcatgatgttttgcaaaatgccaattaaaytgaaaacagaagtgasrtagccatgacataaaacagtgaagcagtgcttttgttcttacctcaccaaaacaaatcattttgattttctctcccaaysgatgtagattaaaaagcattcaccaaatcaaacgcctcatacaaagaaccagaaaccatgttttctcagtgaaggtaccacatcctagagagcatctgcaagtgtgatttaagtttatgctaatgtgcattcatctgataatccatctggctttggcagaagccagataggttaacwgaatagggatcaaaaatggacaaccacctcctggaacttttgagttttttgtcatgtcggtgaccaattctattccttggacaatgcggttagtatgttttactcattttcttgccagaagaggagaattwccgaggactctttttggtcctacttacagtaatgtcccttaatatacaggtctgraagcaatgtgagagttctgctagctgttgaaactgttaatttcatttaacattctggaagagataataaatataaacccattacatccaccttaggttgaacatgagccaaagctttatgcagcatctgactttcaaaaactcatactccaggmctggtgaggtggctcacacctgtaatccaaacaatttgggaggctgaggtgggaggagcacttgaggccaggagttscagatcagcctgggcaagacagcaagaccctgtttgttaawgaaaataaactgattgtagtactgcgtgcctgtagttccaactacccaggaagttctggcagggggatcagtttagcccaggaatttgagtctgcagtaagctatgattgtgccatttcactmcagcctgggctgcactctagcctgggcaaccaaacaagactctgtctctaaaaacaaaaaaaaacgaacaaccraaaacaaagcctcccactccattctgtgaaacacagtgtctttttttagttctcaaatattattagtgttagttcaggccccatgtttaaaattctgagagtatggatatatgtcctttcctctgggtactgttatggctacaggtgaaatggctacaggtgcttgagaaagggtcaagtgaatatttcctgaatatttttgtggtgaatcttcagtgttgtttaccgagggcatgtaagctttccttcaatcattgaactctgcttctctgaactggctcagtccagagaactggctaagggtttttgattttcaatgtcaaaggctgacctcaggagtcagcttttgcaactcttgtcccctcttggtttataattatttagcaaagtatgaggcctcttcaactatyggtcyatcaacccatttaaatgaggctgttactgtcaccactccattaaatctgacatttgcaagatcaccgataagtctgtgttgccaatggttagttttcatgttgcatgctctatgagcagcactgaacstrgtttatttgcatttcaggatgctgccctctcctgattttatccttgttcactggcacaatttcttagtctcctttgctagttcttcctcttgtctgtaaactgaaaatatcagattgcccaaggtctaaattcttcaatctctaatcaattatgtctggtttttttggtgatctcatgcagtctccttacagataatgtagccacatggttcaatagagaggaataaggctgattattcatatatgttatttatttatatacatatagttacatatatcaaattatrtaaccctttttttcaaatgtcaaagttacatttaaaagtmacaatactaaaaatctrtggagaaggtyggagcatcaataatgtttttacttgaatttctgctaaatcagagtgatggtgaccagatagctaattaagttttatttaaaatagccatgtagattgataggcaggggattatcattatagaaaaaaatgatataagtaaggaaatatacagatagaataatgattgattaacccattttgacttattgtacttggtacagttaatgtcttagtatctcagtaatctstttttatatttttctctatgatcaattaattatgagttaatttttatatatggtatgaaataatrgtctacactcatgtttttatcattctgtttttactcccacttcttaggtaagttcatctagtcataaccttagttactttctgtgtgctgttgatgccaatatttaattcttcagctcagaagtcaaycctggtctctagaatcctttctctaagaagtcatttgacatcttcatttggatgtcktaacaagaacttgaactaacatgtccaaatcaaaatagtgatcttccctctagtctccagmgttgtttcttctatagcctttccctcttctgttaatgaccacttcagtctttcagatgcttagaccaaaaacacggagttaacattttctctctttcagaactcatctctaaggcatcagcaaattttgttggttctaccctcttgttggttctaccctcaaaaacatacagaatccaatcccttgtcatcacttttgccatactcatctaaactgctgccatacctagccaagataattgccatcaactcctaattattctttctagttctgcacatcattttctcctgatgtactctcaagrtagcagccaaagagagcctatgaagatkcaaatttgatcatgccattcttcagctttagatttttcagtggcttctcatctcattagagtaaggccaaaatccttacaaagtcctataatcatttgaatgatcggattttgtctgcctgtctgtcct

SEQ ID NO: 9963 - DNA, 12903 bp, Homo sapiens
aggatctatccatagtgaaaaacattcattttaattccatttatataaagttttcaaaaatatatctttaatacattgcaatttattacattggtgacaaaactctaaagtgaaacatatgagtgactattacaacaatatggatagtagggaggaggaaaacaagaggagaatgggatcaacagaaggcatatatggggagtgtctggatggctggaaaattcyattttttgaccaagatgtggtaaacacggggagtaaagttataaytttttctcttactgtgcttttaggttttgttgctttctgtctgtatgctrtgttccacaataataaaaatatttaaaaggcaaaaaaagtaaaataatgaatataaaattacactgaaactacatattctcatagatagaaytgtaattattagagtttttgctgaataaagtcaaatagactattatagtagttataaacrcaagttaaaattttagggccgggcaaagtggctcacgcctgtaatcccagcactttgggtggctgagcgggtggatcacctgaggtcaggtgttcaagaccagcctggccaacatggtgaaagcccgtatctactagaaaatayaaaaaattagctgrttrtggtggcgggctcctgtaatcccaactactagggaggctgaggcaggagaatcgcttcaacctgggaggcggaggttgtagtgggctgagattgtgccattgcactccagcctgggcaacaagaatgaaactccatctcaaaaaygaaaaaaaaaaacaaaaaaacttttctttaattttaaaaataatatataagcaagaactataaattcaaattcttaatgctaatcttaatttgaaacatcaaattttgaatattgatacattgctggacaccttttgttcttatttccaatttatttacaatgcacaaagtgacagaaattactgaattttcaataaattatggtactgtagatattaaattatacrgatgattatccctaaatttatccttaaataaaataatttcagtcatattgttaccattcaaaaatcayagtatgtgcacacatatrtsttggaaaaaatattttgttgctataattttttggctctctattagagaaaaaaccagaaagttaaatgtgttaaagtgtaaaacttacttagtataatctttgggtatgtttttgtatgtgtagtgctgcattgcttgctataataaaatactccaagggaccaggtgcagtggctcaygtctgtaatcccaacactttgggaggccgatacaggcagatcacctgaggtcaggagttcaagactagcctggccaacatggcaaaaccccatctctgctwaaaaatacaaaaattagccgggtgtggtggtggatgcctttaatcccagctactcaggaggctgatgcaaggagaattgcttgaacctgggagtcagaggttgcagtgagccgagattgtaccatggcactctagcctgrgcaacagagtgagactccatctcaaaataaaataaaataaaatactccatatttcatcacagtagctgagaatgyaaataaccatttgaaagaatttggcttgctaatgatgctattgatacatatgataaattttaygtactgtataattgcacagagtatttgtacatgttcatatgaaaatgcaaaaaaacaaaaaamcaraaaaaccaaagagcaggtgctatttgctggaagwcatgtttgctatgatttttagaatttaataaaagaaaaaaaatagctagcaaacttttggaaatatgttggtttaaagttgtcattgatgaaatactatgtgaaggtgataggagcaggaggctgggaaattctagacagaaaagggcgggtcctcagctaaagccccactctcaagccaaatagactgagactgtggcccaaagggagtacttctatccctgttttcccactcaaatgttgcctttttkggcctgccccacccctcatcctatgcccataaaaccccaggctccaccggtagtgagaagtggctgaagatcgagaggagaagcagctcaatgttgtagactatggtgggacgttggagagaagtggcttgacttcagagggacaggttgaaggcgtgactttcgagaagagtctggctggagacagccggacttcaggggaagattaccttcctgcttcacattccctttccagctccccttcctgctgagagtcacttccatcaaaataaaatctccctcatttmccattctccaattcggttgtgcaacctcatttttcttggaagctggacaagagctcaggagccaggaatgcagatacgaaaagttgttamactgaacctctgcccttgctggcaagaggcagccgcctcaagcgaaaaggcaaagggcccactgagctactaacacttaagacgtctgcagatagcagagctaaaagagcactgtaacaccctccccctcgaggtttcaggggtgcgggcaccccccyagatgctgctgcggggcctgcacagaatttgttcctgctggcatccaaaagtgctcctgcacctgttcacctgtgtgctccctcccatgagggctgggcgcagtgggtcccagcgagtggatttcacccctgccagccctaaagcagctggctggttctagcgtcagtgagccccagttccctcccatgaaggggtaagggaaatgtcctccatcaaaggtattattycagtctaagccctgatgctgagaataatatgagaatcataaagccaggagaaagaataattgkgttatcccattaycctgaattgtagcacttagaaaaatgaatggtcacatttattagcyagcagtctaccttgtagctatcatcatcatctctatctacatctatcccattaaataatttactttttgaaatatrtacattcataaattggataatgcctacgtaatttaaawaaasaatatcattatgggcaagttacrttagtaaacggtaaagttcaagtcaagctaaatacatttagatttagaaattaagtttagtttagtttaaaatacattgcttaagaaaatagttatttatggatgaccttaaactaatccaaggaacactataataaasatttagtttttaacgtaaatacaattcttcaatcagagagataaaccatttcatgatcaatctattatttttgtttattatttttattatttatttatttttcttttgagacggagtctygctctctagcccaggctggagtgcagtggckccatctcagctcaytgcaacctccgcctcttgggttcaaacgattctcctgcctcagcctcctgagtagctgagatgacaggcacgtgccaccacaccctaatctcttatttttaaaaagaggattttaggactaaacaaatcaaatgtaagtttcccctcacctctttgatctctcacttgrgtaatgatgcagtttgaaggcaaagagccccatttctacattataagcaaaataaaagttaattcatggaatacaatggtgtatttgtaattgaggtactatattttatttattggaatggcattttgagatccagtgctgttcattgmatttccctgtaaggagagtttgtggtttggactcatcaagctgctatgccaaaaacaaaacaaaacaaaacaaaacaaaaagctaatcacatgaaatcaatttcctgtttcttccaacttgcaggataaggcctagacgaagcttttattgtattgtgtgacccmagtgttgggaaaagtagaaaattgttaccagatgtgaagaaacatttaggggcttgaaaagcagcatggaggtggacctaggctctttgcaatgttccacgtcttgccttatttgatggttacatgagtgtttataatacattgctgtgtttaccatttttattttgactcatttctaagtgtgcattataattttatttgaaaattatttattaggagaagtgcaccataaaaattattgattactctgctcattatatacctaggaaaaaattcaccatttatatatctttacatacaactctaagagagttgaagtgggaactttattttagttacaacatgtagaaataagagaagacgctacctgaagtacccagatctttccaaaggtttttttctacttttttttttttttttttttgagacggagtcttgctctgtcgcccaggctggagtgcggtggcgccatctccgctcactgcaagctccgcctccggggttcacaccattctcctgcctcagcctcccragtagctgggactacaggtgcccgccaccasgcctggctaattttttgtattttttgtagagacggggtttcaccgtgttagccaggatggtctcgatcccctgatctcttgatctgcccacctcagcctcccaaagtgctgggattacaggcgtgagccaccgcgcccagcctctacctttaattatctaccttgcatgacaaaactttgccrttccttatctatttttcttttggctcctctattcctgacacaacaagggtggacatatttcccacacgcttggtttwgcagagtacctatatcagttaggtttttctgccagagaaacctctccaacactacattacatattgatatctcacatgtctttggattcagtttttctaagctgggtttgctggatggctctggtgatatgagatgggccaagttctgcatcttggaattagttagagtttggacaawgtaggctggatcaggcarggacaaactgactccattattttctcattctccttctgggaacagagtagtagccaggcaatgttctcataataaacagaaaaggaaaagaaactccartgtggaaaccatctcaaacctctgtgtgaagtctaccaattttctgttaatcaaagcaagctatgtgagtgtactcagagtccaggggcaaggtagtcaccctgtgtgtggtgggaaaatactgcaagattatatgtcaaataatgggatactcaggaatatttacaaaaatgttgaatattttaatgaaataacaaatatttagacattcaatagacttgagagtaactttaccaagggtctaagtatgagagatatgtttaatatatttttatgggctgaaaaccctgagtgggaaaataggactaatttcaccaggatgacctcctggaaatgcattttccattttggaaattattttaaaagttcattttttctggatgggtatgtgtatgtgtgtgtgtctgtctatgtgtgtatgttttatgagcttgttaacactaatgtcatacaaaagtactggttagcaggaataagattttaaggtgtattggcattcccatggttcccaagaaaattttcgatgactttgattaaaaagtttggattttgtctatttaaatctagcataaaaattggtcatggtgatgatcctagttatractaatctccctttaagatttaggcatttactgtgtgaaatatgtggcacattttccataacaaacagctaaagttactgaacacaaattatggaaaggtgaaatgaggaaaacattgcaaaacactgaaagagaatatgtctttatttgcatgctggcaaatgaaaattccggtttcacttctacttcagtatctaacaagtctctaacaagaacagacattgaatgaatgaattaagttgagctgtttgaaaattagaatgttttccataaatacattattgaactatcaattagcataaactgctactttcttgtttgacactggtcacagtatttgaaagtaaaaagaatgttactgcacattcagaaatcaggtscacataaaatttaaggtcaggatattaaaggatcacagccagtgctgttaggccttcrtttattctatctttttgtctgttcagacatgataacttttctacccatcattttttccattctagtagtggttacatttgttcttgggaattttgctaatggcttcatagtgttggtaaattscattgagtgggtcaagagacaaaagatctcctttgctgaccaaattctcactgctctggcrgtctccagagttggtttgctctgggtaatattattacattggtatgcaactgttttgaatccaggttcatatagtttaggagtaagaattactactattaatgcctgggctgtaaccaaccatttcagcatctgggttgctactagcctcagcatattttatttsctcaagattgccaatttctccaactttatttttcttcacttaaaaaggagaattaagagtgtcattccagtgatactattggggtctttgttatttttggtttgtcatcttgttgtggtaaacatggatgagagtatgtggacaaaagaatatgaaggaaacgtgagttgggagatcaaattgagtgatccgacgcacctttcagatatgactgtaaccacgcttgcaaacttaataccctttactctgtccctgttatcttttctgctcttaatctgttctttgtgtaaacatctcaagaagatgcagytccatggcaaaggatctccagattccaayaccaaggtccacataaaagctttgcaaacggtgacctccttcctcttgttatttgctgtttactttctgtccctaatsacatcgatttggaattttaggaggaggctgtagaacgaacctgtcctcatgctcrgccaaactactgcaattatatacccttcatttcattcattcatcctaatttggggaagcaagaagctgaaacagacctttcttttgattttgtgtcagattaagtgctgagtaaaagacctgaaactctcaaatttctagattcacaagtgggacatcgtgtgtctccaagagaaaacaaactgatgttgtctggaacattttatactttccactggtttttctgtattgtatgtttttgagtaatttccaaaagtatatctagaaaagtcttttacctaaagttagtctaaaaagtatctatatatgcatgtgtatgtgtatatgaaacacttaagagagagtggcaataacataatcattttttacaaactgccaaattatagaaaatattgtaagaaatttttcagaatcatgaagccatgtgtattcacaatacagttcatattatcatgtttcatttgaaaaatttatgatctctatttataattgttaagaacttacagcttatttcacaaaatcattgctcttttccactgttatttgtaccatacgtatgtaccatastgtgcttaaacgtgattatttgaacgtctagttttttggatggtatgmgcattctaatctaaatcaataatgaagttttatctttggggtagtttttgttkcataatgaattctaattttatgtttaatttaaagcaaacaattattgttagaaaactatgcacaaaataaaattcaaggatgaaaaatatatttggaatacattttgtatatgtctaccatcatcagtactgaggaatattagattttatacaaatatgtgaacaactgagaaaaaagtcatatctgtaatagggatgaagaaagaaacacaatgctgacctcttaastgctgtcataagtctccatatacaggtagaaaagtcatttcttccagtttttgaggtaaagaaaaccttttttgaaattgagatcggataccaaatatttccgtttctttcctaaactgcttcagagcccctaaattgccgattctctccactatcttccacatttaaaaatctttttaaamatcacataaatgaactcaaatctttattacttgaaaaaatactccatgtaaaaatagtatagaaattatgaaaatcatttgaattatactttctgcaaattctaaaatgacgtctatgacatctatgtattgatgataggaaatgacttaaatatatgttttattataatctagttgcaaataatgcagtgagagaaagtgtgttgacatattcagtgatagcaagttctattataggaaaaaatgtataacgtcattaaacaagtaaattctacagactgtatcaattctcggagttatgaaattttaacaatgttatctaaaccttgagataaatcatttgatttagttatttgtttgtttattatatatctttcctggtacaacgtaagcaccataaaagcagagaccctggtcggggtcggtggctcacgcctataatcccagcactttgagaggccgaggtgggcggatcacgaggtcaggagatcaagaccgtcctggctaacgctgtgaaacccggtctctgctaaaaatacaaaaaaattagcagggygtggtggcgggagcctgtagtcccagctactcgggaggctgaggcaggagaatggcatgaacccaggaggcggagcttgcagkgagcsgagatsgcgccactgcactccagcctgggcgacagagcgagactccgtctcaaaaaacaacaacaacaaaaaacagagatcctgcagaccttgcttattgttgactgccaggacctaaaagatcacataaaaaatagatagccaaaaatattttgaagaacaaatgagttagtgaatagagtaataaattacatgtcttggggtggtgaaccagtgaaaatgaarcatcacaaaatctacagttgcatgaatttgcctattctggtttctggttgagatgacagaattatctaagaagaagcatttttcagagtaaaagtgtggttattccatacttgcaggggaaatatcgctatatatagccttgatgcagctatatcagactaaaaacatggagataaggtggaacatcaaaatcacatggcacccactacaataccttcaaaacagcatataaaagacttttggatatttgtatatattttctcgattgtgaatgatatatttgtattctgatatttctagctggttattatgtaaaaaatgcatttcaattttaaaaattgagttagttatgaattaccttactaaaatgtgatttttatataatatttttaatatcctttctaaatgaacattttaattgccatattataaaatcacagaaaagtgagtgaaaaataaattataccactgaatgaatatcttagctttggaggtctagaactagagccagtgtctgatattaaagtgataacatttctttggaaggtaagtccagggcagcaatggcagggacgcgtggaaattgaggcaagagcacgtggaaagtgaggcaagagcagatgtgaaagaacgtgttgggatgtattgtaacaatgtgttgtgtgtatgtgactctgttgtggcaacttcattataaggtgagagagacagcatggtggtcatcagatgcatgcacytggaccccagtacttttccggaaaggctacaaggggaataccacagccagcattagtccatggaagcgagagaggagggagaatgtatctgttcagctgtcttctgtcttccattttccattggccagggtttccctgaggcggaactaccatctctgctgttctgctttccatcatccagtccgttggtggctgttatgaaagacagacctcaggcccacagtgtggtgttccattcaaggaaggatggtaggatgatctggatcaggcaaggtgctggcctagagaataagtgacagttaagggaatctgaggaagcacatgtttaagtccaatactgtctactccttgtaccactcaratttgctcatgtcttccaatcatggctggctttatgggcatatgatttccactgttgcacagggtcttgtgcttagaggcgctcatgcttagaggggcaatcattagtcttcctgttgcatgctgtattagcagcaatgaacctggtttatttgggggatgctgccatcttctgattttatcattgttcgctgggcacctcttctcaatctcctttgctggttctttctcttgtctctaatcttctgcaactgctgttttgtttttgagacagagggcactcctctgctgaagagggaatggtcttgcactaattccctaggagttttctctcccctctcctgtggatttgtcagagacttggacagagtcctgtaatgcccactatgcatgcctctagcatgtttgaattctgctggatcatctggcacaacgggcagagcagcttaggccagaccctatagctgttatggaacccttttttgttctggtttccacttgagaccaatggcctttggaaactccattagtgagtcagagcaatatcctcaaatgaggaatatgttgactccaaaatcccaataggcccaaaaaacactgtgcctcttttttagtgagaagaattatgtatcaggaaacatgccgtttactttaaaaaggatgttttgacacaaggaccaggagcatggacctgtaaaaacaccatctatgttataagttcctgaatctgctgaggtttatgtctctcttcttctgatattttacttctgttcaaagtaatactattttactatatttaaggaacttgccacttcctgcttatgaataccaattaaagtaatattattaatatattgagttagcatgatgttttgcaaaatgccaattaaactgaaaacagaagtgacacagctctgacataaaacagtgaagcagtgcttttgttcttaccccaacaaacaaattgttttgattttctctcacaaagggtgtagatttaaaaacattcgccaaatcaaaagccacatacaaagtaccagaaaccacgttctgctcagtgaaggtaccacatcctagagagcatctgcaagtgcgatttaagtttatgctaatgtgcattcatctgataatccatctggttttggcagaggccagataggttaactgaatagggatataaaatgtactaccacccccagtgttcattatcaagaggacttaagcttcctttcagtcgtttatctctgcttctgtgaattggctcagtcctgagaactggctgagggtctttgatttgtcatatcagtgcctgacctcaggactcagctttttcaactctgttttcctcttgatttatagttatttagcaaagtatgaagcctcttcaactattggcctatcagcccaatccaatgaggctgttgctgtcaccacttcattaaatctgacatttgttaagatcaccagtgagtgcgtgttgccaatggttagtcttcatgttgcatgctctattagcaacattggacatggtttactggggggatgctgccctcttctgattttattgttgttcactgggcacctcttctcaatctcctttgctagttctttctcttgcctctaaactgaaaatgtcacactgccgaaggtctcaattcttcaatctttaatcaatcagacttgttttgttggtgatctcatgcagtctccttactgataatgtagccaaatggttcaatagagaggaataaggctgattattcatctatatattcatatatatcattttaatatagcattgcagatattggcagattgatatgtggggaattttaattatatgatgatctatatataattagataatgatataagtgaagaaatacatagatagaattatggtttactaacccatttttgatttcttgcgttttgtacaatgtctcagtatctgttagtatcttatttcttaagtttttttctctatgatcaattacttatgagttaatttttgtgtacagtataaaataagggtctaaatttacgtttttttccttctcttttaactcccacttcttaggtaagttcatctactcatggccttacttattttctgtgtgctgatgatgccaacatttaatctttcagctgagatctcaacgctggtctccggaatcctttctctratagactatttgacatcttcatttggatgcctaacaggaacttgaactaacatgtccaaatcaaaatactgctcttcccccaattgtcagatttgtttcttctacagtctttccctcttctgctaatgaccacttcagactttcagatgcttagactaaaaaaaaatggagtcaatattttctctctttcagaacctatctttaaggcatcagcaaattttgttgactctaccctcaaaaacmtacagaatccaatcccttgtcatcactctgccatactagtctaaactgctgcatatcttgccaggatatttgccatgagtttctaattattctttctagttctgcacatccttttatcctgatgtaytctcaaggtggcagccagagagaacctgtaaaaacgcaaatttgatcatgccattcttctcctccagatttttcagtggctttcatctaattcagagtaaaggccaaatccttacraagtcttataatcatttgaatgatctgattttgtctgcctgtgtgccctaaaacacctggctcatcccatgctaacaacactggcctttgtgtcacttcttgaatatgccaagcattgcctcagggacttcatacttgtgtcccttcttcttggattgctctttctcagatatcaacactgaacgttatcactcctcagatatcattgaatcattgaggcctccaatactaccttatttaaagataaatctcatttcactttgcagtttttttttctttttttagcttttattttagattctggggtacatgtgcaggtttgttatgtaactaaattgcatgtctcaggcactttgtgtacagattattttgtcactcgggtgggaagcagagta

SEQ ID NO: 9964 - DNA, 12828 bp, Homo sapiens
gtcttttgcccagcttctatagccttatgcacttacagattgcaggttttatattagactgtgcggttcaacctacaagccagtagatggcacttataggtaagagccagttktggacaatgtgatggttatatatttgatccttgtttactggaagaaactctctgttgctgcagataatggtctgactcatggagtacacagtggtgtgaactccctgctcagccttgggggttgtggggagcaaggtgggtggggccagacaaggcaggtccacctataggtcttccaatggcagacacaagcaccaacactgagggagaatctactgagtggctaccaagtgaccagagttctgtctaggggtggagctaggtaaccccctcggctccaagttctttgcacagggatattggagagattggcctaaactcttaatccaggagagtgggggctctgaatacctggaaatctgcctgcttgtggagcagaacccacccccaccaaccaagatttctgcacagggtaaatggggtgactcaggcttcttaactaggcaggcaggtgctcttaawgcttggatatttgcctgggcataaaacagagaggatcagcccwgtacatggatctgtgaacgggaagggtgaggcagcacaggttgccagtctgtgtgagcaggtgctttgaatgctagggtatgcagcagagaggacctccctgcatcaaaatctctgcacaggaagggtaggggaggataggctgctgagccaggtgaatgggtgcttcagatatctagagttctgcctggctgtggagcagagagggccccattgcaccatgacctacgtcaaggaaggttaggtggttcagggtgctgaaccttgctagcaggtgctccaaaatcctgggatctgcctaggcatgaagcagagagggcctccctattctaggatctctgcacaagaagggtggagcagatgaagctgctgaaccaggtgaatgagtgatccaaatgcccagatttctgcctaraggtagagtggaggagagtctgctgcaccacaatcacaggggaacagggtggggtacccagcaatgacacacacagactagttccaagtagctaagctgcctggttgcaagtctcatcacataggataaactggctgtagcagctcccctcctgccccaggcctgtgatgggggatagcacagtttcagtgtttgctgctaaggttttttttccccacaattctggccatggaggtccccaccctgctctaaagcaggtgctccaatatctggcccaagactaaaatgcctgcacagctacgctgctkagttaccaaagaatgattgactttgtggcatctgaattaaaaatggtatcctgctctcagtcctgggtctgagaaaaggcctgaaccttttcccagtgtctttcccttacaatgtctctaagcctttctccaagttatctccagggctttggagaaacaaggtactcttccctctgagcactgggttgctcagatccccagtggaaaggtgagtcacagagggaggctctctgcctctctcacctactggagcttcattcacttttttaactgggtgccatcatgggkgctgtttgcccatgttcccctccctgggatctgtgtgtccttatgattctggtagattcccactttccttcttgaaataaagctcacagagttaacctttatgagactttgttgaaaaatttrtgtaggttggtatttttttcttcttaaatatgtgatgaaaataaacattcaggtcatcccttgctttgtgtgaaagttttaaattaagaattcaatttttaaaaatagacactaagattttctattyctttgtgtgcctgattcagtaatttctttcagggaatttgtccattttatctaatttaattcactgaaataattttataaatattattcctcaatttcttggtctgtttgtgttgstataaaggaatacctgaagctgagtaatttataaataaaagaggtttatttagttcatggttccgcaggctgtacaagaagcatggcattagcatctgcttagtttctgctgagagcttttgtgctgggtcaaaccatggtggagaaggtcaaagcagaagcgggcacatgtgaagagagaataaaccaaaggggcatcctggctttataacaattcactctcatgaaaaacaactcattcccctagaacaaattcagtcttgtgagagtgagaactcactcactacaytgaaaatggtaccaaggcattcatgagggaaccaaccctatgactcaaacacttctcactaagctcaacctcccaacaccactactttggggatcaaatcccaatatgagttctgatggggacaaacaaaccgtgtacaaaccatagcattctgacttggtcccctgaaaactcgtgtccttctcacataaaaaaaaatgtaatctttccatcccaacaatagtcccccaattcttaacacgttgctgcatcaattcaaatgtctgaagtccaaagtctcatttgagactggaagtcaagttccttccagctatgagcctgtgaaatamaaaacaatttatttccttccaagatacagttgttgtacaggcattggatagacattctcattccaaaagggagaaatcagccacaagagaggrgcagtaggcaccacgmaagtacaaaacacagcagggcaggcgttaaatattaacgttctaaaataatctcttttgactgtatgtgctgccttctgggcacatgcctcttctttctgagacttcactcttagtggtctcactctctcatctccgcaacagtcacactgctttccttgttcttcctcagacacactaggtacatccaatgttagcacactgataatgctgttccgtgtgtctggaatgtactttacccagacaaaacatggataatttctttacctactttaggtctttgttcagacatcaccttctcaatgagtccttccctaagcaccttatttaaaatttcaacccctcttctgacatgctttctattgaccctctctacttatatttgcaacttcttataaactatattttatatctgtatgatatatattttattagttatatgtttagagttcatcttttcagaatgtcaacttattaagggcatttaaaaatagttgtatttaatgcttcatcccacctcctagagggctggaacaaagaagatattcaataagacaaataaaataaccctttttcagcatataatattttcctgaatttccctttgtttatttcagtttcagttttgtttgcatttcatgtttgcctatcacaattagcctttcttttagtcatggagttttctttgtgaatttacctagggtgtatcttttggtgggctgtccaactcattcatttctttgactcctcttaggcctatattatatctccattggttttgaatgtcactaaattttggactagctactttgggagggaaatgcagcagttgcattacacaaagaacatgactaattggcctttcctggtttgacctcatcagaattaagattaagttcagctcaacgtatgaaaaaattatagaaaatttatacaagttccccttacactgaggaaaataaagatgctatggatacctttatttgggatagaagagaaaaacagacatggaaattagaaatracaaaatattgataccattcatatgctaaataattctattctgatgctctattgctgcataataaaatcacccagaaacttcatggtgtaaaataacagccattttattgtgcttgttgatatggtttgaatttctgtcctcgcccaaatctcatattgaattgtaacccctaatgttggaggtggggcctggtgggaggtgattggattatggggggcagtttcccccttggtggtggtgtggcaatagtgagtgagtgagttatcacaagatttggttgtttgaaagtgtaaggcacctcccccatctttctcttcctcctgctccaaccatgtgaagatgtatctgatttccccattgccttccrccatctttatacatttcctgaggcctccccagaaacagatgccgccatgcttcctgtacagcctgtgaagccatgagccaattaaacctcttacagaaacccagtttcaggtgtttctttatagcaatgcaagaatagactaattcacttaaagattctgtaggttagggttttgttcaagacatagcagggatggcttctttttgttccagaatgtctaagcctttagccagaaagttatgaacaactgggggcaattcaagtgaccaggggctgaacttatctaaggcggagctgagaaatacatagaaatgtcaatgataggcaatgatagaaatatcccctatgtatgttggctataaaatagtcacacgtggctagtgagcatttgaaatatggttagtaatactgaggctctgtacttttaatcttatttaatttttattaatgtgaatttaaaaagccacgtgtgacatgtggctagtatctaccgtatcagacaggtcaaatatcgctttcttggctcataggtttagtacctggggtaaaaggacgtaaaagctgggctcacgtgggataatgagccagagggcctgcayatggcctctgcatgtgggtttggacattgtgacctcagagtagttggactacttacatgtggcttaggactccaagagtaaatattgcagtgattaagaaaaaactgcatggcttttcatgatttagctttagaattattatagcatttttattagttgaattagtcacaaaccattctagatttaaggacagagtacacagactcctaagatatcaatagaagaagtgccaaagtatgtatcgtatgttttaaaacttgcatactctctctctcttttttttttttttttgagacggatctcactctgtcacccaggctggagtgcagtagtgtgatctcggctcactgcaacatctgcctcctgggttcaagcgattctcctgcctcagcctcccgagtaactgggattacaggagcatgccaccaagcccagctaatttttgtatttttagtagagacagggtttcaccatgttggccaggctggtctcgaactcctgacctcaggtgatccacctgccttggccttccaaagtgctgggattacaggcgtgagccacygtgcctggccaaaaacttccatactctctaaaagatttggtattatatcagagagcagttttctccattttcttaaactttgcatattttataaataatctgcattagtgaggttgataatgaagaaatatgctgatcataaactctaaatatatactgcatttttctatatgggggcttagaatttctagcccagggtggtagatgaatcaaagggatacatcatacaaatgaataacytttaagcaaaagatggcattgtaaaactataaaggagaatctacttcaattttgcatgttaacaaatgagggttcaaatttgaatgcagaactttccatgtaaaatacaaccagagtcaatagtagcagggaatataatatttgccttgaaaatcactagctgataccctcaagggaaaaaaacttgtatattttacaatttagttgaaatctaattttagaacacaccttggatctctccagactacaccaatggccatcaataaaacagaaagaagtcactcctttggatatataaatctataacagtgcagctaggatcaatcagccaatggtgtattgaaggcagagattcactatgtagaggcatgtcaagcatttgggagacactgtttataagaattcttgtagtgtaattcataatggggactgtgggaaattgattcattgtattggttaatatcattgaytgaatcaggaactgaaaggtctccctgattgattttattctcaactgcttggccatctccaggatatgtttcctgtagataacaattttagctacctctttcaatataggctatgagaaaatgcctgattctaagaatcttgcagtaagttttgacattctctggacaggatccagctatttctgcctgtcctgtaccacttgcctcagtgtcttctatttcctcaaggtagccaacttctccaatcccattttcctctggatgaaatggaaaattcacaaggtgcttctctttattgtactagaggcaacgatctctttctgcacaacttccattctgaaggaaataataattaatagtttaatctaagaacgggtaacaataaaaggcaacttgacatttaattatatggataccatgcatgatttcacttctctgtttctccttcagatgatgttcatccttccttttgtggaaacactggcttccattcttctcttaatcctctccttatggagccacaccaggcagatgaagctacatggtatttattccagggatcccagcacagaagcccatgtaaaacctataaaagctataatttcatttctactcctctttattgtgcattatttcatcagtatcatactaacattggcctgtcctcttctagacttcgttgcggcaaggacttttagtagtgtgctggtatttttccatccatctggccattcatttcttctaattttacgggacwgcaaactgaagcaagcttctctctgtgtcctgaagaagatgaagtatgccaaaaaggacataatctctcatttttataaacatgcctgatatgagtgatgatattctcagaaagaaaaaaaggaagaagaacaggagggctacacatttgtttctttcacctacctcttattttctcattatgttctatgatatattgagcattattgaaaatacttgctgatttaaattaagcagaacagattgctaccttgtttgcaccatatatggagattatgtatttartagtaaaattctaatatattgaaaatgcatttttcattaggcactgtgatcaatataatagattactctatctttaaattttattawtatgttgcataagcattagaatagaatagaaatacatcaagaattataatatctatgtatgtgtatagagtgtatataaaatcagatttatatgtacaaacacatagggatttagttcctatcctaaaaatgatgatcaattgataatttaaaactagaaaggaaaactcaaatgaaaatagttagtagagtctacagcttagtgaaaactttgaggatatgaaacaaagtcaattgaaatgtacatcactaagagttatttccaaatataagccctattctgttaatattttcagtcattttcagttaaaaacactaagcaactttgaccatcaaaaatgttacaatcttgaccatctacaacagacttgtactgtagaatctgaatctttggactaacaataaaattttactcaattggttaactgtgtaaggaaggcaaggacacgtattaaaaaatcagtaagattttaagtaagcaaaattggaggactgctgctggcatctagtgtagagttaccaggtttagtaaataaaaatatagaagrccaagacgatagtaacaaatacaggatctcatttgatgaaagtcactgtgtaaagaaagaaaaataaataaagttttgaaaagaaaaacaaatcagggataaccaatcagtttacagaattgaatttaataagaacgtctcctcttaaaaatgtaatgagaaagcatgtaaaaatagcaggttaaataaaagaacacaatcgcaagtttaaggtaacartaataaatatttaaaatgaaataattggaagcagattttgaagaacaattacgttctctctaagaaaaaaaagaacatattgcaagcaaataatataattttcagcagtaaagacaaaagacaaattttcaacattgcagaaagtattttaaaaagttaattatatggtaatcgatagaacaaaaagtaaaccctagaaaaataacctggacattgcaggcctaaaacgaaattttaaatgtgtgaataaaattaaaatatccagagaatagaccacgagatttccatgtgcaaaggatgaaatccctttaggacagtggttctccacacagggcaattttgcccccctaggggacatttaataatgcctggagacatttcagttaaaattggacggatgctgctggcatctattgtaatgttaacagattaagcaaataaaaatataggaggcctagttaaatttacatttcagacaaaagaaaaaacaacaagaataaatttataaataagtattacttgtgataaccataatatgagtttacatcataatgtaagtgtgctatggaggaccaattacagacctgcagcattgataattggatacacagacaatgacaattatttgttgcttatttgaaattcaaattgaactgacacactctgtattttacctgataactgtacgaggacaaggatgctgctcaatatctcacaatgcacatgacagtccctcacaacagaattatccagcataaaatgtaaattgttctaaagttaaaaatcatgctttgtgaagatgtaataatgaaaagcacaaattccataatagcaattaggactgaaaaaataaaatcagttattgatataagatttcacacacaccagctgccttccttatctctgaaatgtccagcttaccatacttaggctctgatttctgcacatacatccccagttcacacttgcttmcaagcaggccttactttgagacaggaatgatttgggctgctttagtccttcaccaattgctgattaatgagctgtgatggcttccagttaaaataatttgtgggtgaaaaattcacaaaatatacttcatttttaaaaattagagtatagaaattctcaaagctgtgttcttgtttatagggtactgtgaattcctaagccccataattctgtagatagcttgtttatggcagtcttctatttacctccataacaattttagattttacttctttttcttcctcctatcatgatatgggatattctgataatgattttagcaattttgctaagtgataatcacagacttaatttgaatcataaaatgacataccccttatgaaataagattattcactttcctttcaatcctttctaactgctccagtgctctcaaagggtagtgtcatccctgatgtcacagttctcctgtcccccttacctctggactcatctcttaatctaaaataaaaacaaattgtatgcaaaagaaagaaacattttttwaaaaagttacttctgatggatttagttctgtccaggaagaaaatagatgatatattcagaatactctacaatctttggcaactgtgtaaccttgatcttgggratggatgttgggaaaaaaattctccatgaatgtattgcacttctgcatggtctagctcttatcttgtgagcaaacagtatgtttgatgagcaaacagaagggcctcaactaggatcaggtgagcaaggcatgcagggtgcaaagtttgaggagccacttggttttagggccctgcaacctattgaatgcctttttacgttttgtgccctaggagtctcgttcactttgcccaagaccaggtcatggcaaagagccttgggatttagaaatagggtatccctcttggtcaraaggcagatttgtttaaagataaagactcttctcttcttcttcttctctccagagatatttgcttacattccagtgtaaagcttcttcttcagaaggcaagatggacaggttactcacagtgatcaaagtttttaagactggagtttcctaattttgagatttctcttttgatagacaccactacttgcacatgtaacatcagtttctcatcttatccctgtgaggggaytgaagcttgaagaaatagtacgatgatattcctctgactactgctagtacttcagtgaataataaaccatcttttgccttctgcaagtacaagtgacaagctaagttgttagcttataataattttggcaacgaggatggaacacagcccaaagacctggccttctgaggagaaagtgaaggatcctacaagctgattaataggatttgctgaaagtccatgggaactggtagctaacatgttgactaaaatgtttgtaattggtaaataaatattcttctattatgttgctcattaatgaggaggattgggaagtggttgaaaattgagtaccactggtagaactgaaacagacttccaaatgacacttttagatttwgctgtcttctccagataacattaggtagacagaytaaagatctcccaaagttgttacaggcctttggtggaaaggtgaaaagattaaggatctcccaaagttgttacattcagatgcttattcagttaaccaccgagtagtggcaataatgcttatttgaaagtaaatgtgtcttgcatactggcctgaagacactttctctatatttccctgataacttctttacctctattctgatgtcaattgctttagggattcgggctgggcctgagatcttcctgacccaagggacaccaaagaccctacagaaccatcccaacatattgcaaagcttcaaggagagtagggactcaaattagtatagccctgttggatatatgtgcacaaatcaccattctacttggttctgggggttgggggaaggggtgctgagggatggaggacaatagcatgtgaggaaatacaaaagagaccctactgggaggtgcactagaaagaagggcaagaagccaagaggaaaaaaaaaaagccaaccctcccctcccctcccatcccctcctctttccttcccttcttttcctcccacctcagccacccaaatgactaggacaacaggcacacaccatcatgcctggataattttttagtgttttgtaaagacagaggagtctcactatgtcacccaggctggtctagaactcctggccttaagcagtcctcccacctctgcctctccaagtactgatattacaggcatgagccactgcaccggggaggcctacagtcgttctttatagtttaccctcttttttcctgcattctataaatactcaaatagaagatagcagggccttctggctactgtgacagcctctaacaagcaggtttagaaagaaaaaggaaaaagaagtgcctgagttcaactgatgaggaytgaacaaacagtgcacacacacacacacaaacacacacacacacacaccaaagttaggaagactttgtggatagggccctttggacccattcgatgcactgctttttattgtctttatatctgtatgtakggtgtgatattaaatacttaaaatattatctcataagtgccagagagattgacccagggaaaaccaccaaaaatgttagtgggacaaactccctggccatttgagccagttggtggagcataatttaccatgagtgccttcaccctccaatgtccgaacctacccttattgggctttttgtgtattgcaaaaagagaaaatccctctgtgcaagataaaacagaaaattactcaatgtactcaaaacaactcacaaaaaatcgaccatttctcaaggaatgaaacaatcaagaaattacaaccttgaaattacttagatattaaaatgaccaaagactttacaggagctgttgtacccatccttcatgaggtcaaggtagacactcwaaatgaatggaaaggaaaaacttgtcagcagaaaaataggaattataaattataaattaagaaaacagatattttagaaatgaaaaatataatgtcttaaaaaacctttattgggcatgataaatagcataaagaaaatgatggaggaaagacagtgttcttgaggttggatcaatagaaattatatactctaaacaatacagggtaaaataattgaaaaaattatacatcatatcatgaatatgaaaggctataacaaatgrtgtactattcatgcattctgagtttcagaaaagcagaagaggttgatgttgaaaaaggactcagagaaataatgatcaaaaattttccaaacacagcaaagagcataaacctacrgattcaagaagctgagcaaatcccaaccagaatacaaccaatgaaatccattccaggaaaattcattgtccaatwtctgaaaattaaagacaaaatattgaaagcagaaagaaggaaatgacatcatagttatagggaaaatgcaatataaataatagtggttattatcaccagaaaccagaaataacagtagaaaggagcacaaatatttaaagtgctcaaaagtagaaatggtctaccagatgtttatgttcaataaaaatatccttcattaatgtaaaggaaatccaggcattctaagaaaaaaagaaaagctagaaacctaggagaatttctttccaacaaacctatctttaaataatagccaaatgaagttctctaaacataaaggaaagaatagaagagaaatttgtggaacatcaagaatgaagtaaaaataasagaaagggggaaagtgggcaaacacaatatatcttcctttttcacttgagttttcttcatatgttttaaccagccattgctagcattgaagatggaagagagacaggaaatgtggaaaaatgacattcttctctagagcctctaggaggaaactcagcctt

SEQ ID NO: 9965 - DNA, 12906 bp, Homo sapiens
caaggcacctttacgtcagcagaagggtgctgcttgcacctgttacaatcccaagagaagagcatacctaacaaaggagggaaggagtttttaatcctaacacagttcctgtttctgtgtccttcccttattggctggggttggattgcacaatmtaagctgatcctgaatggcttagacttaaacttttccaaatagggtaaacgcacattttgcaaaaagaaagaggggtgggaggtaggattcatttacaacatttacaacttatggctggraagttgagtctttaaagaggaatttagttgtcctaacggaaccagctagagtgacatgtttacaaagaatataaataaaaagaaaaatgaagaaatttgaactacatagatatgagaggaattaagtttgaaaaaatgattcagtataattccatttatataaagtttacaaaaatgtatttttaataaattgaaatttattacactggtggtgaaattctaaggtgagacatatgagtgattatcctaacaattgggatggtagggatggaggaaacaaaagggaaatgttatcagtaagatggcatatatggagagtgtctggattgctggtgaaatctactttatgaccatgatgtggaatcatgactcttaatgctataatttttttctttactgtacattagrcctcattactttatatactttatatatatatgttatgtttcacaatattaaatatttcacaataatgaaaatatttaaaaagtagaaacatacactaaatgaatgaatataaaataggctgaacaaacatattcttatagacatcattgtaattagagtttttgctgaataaagaatagagcattatgatagtaataaatccaagataaaattttaaacttttttttaaattaattagaaaaaggaagagataagcaggaagactacctccacattcctaatgttattcttactttgaaacatcagattttgagcacttatattttrctggacacmtttttttcttatttccaatttaawtatttatgataacatttcaaagtggcagaaattagtgaatttccaataaattatagtagtatagatattaaatgtataggacaatttttctaartttatctttaaatgaaataattatacacatatttttaccattcaaagattataataccatgcatgtgtacacatgtgtaaggaaaaatattttgatactgcaaatttttttaatattagagaaaaattagtagaaagataattttattaaggcataaaacatatttagwgtagttactttgactgctataataaaaacacccagattttstgacagtagctgagaatgtaaataagcagtcaagagaatttaacttggtaatgatgctattaaaagatgaaatgaagcttattcartctataattgcacagagtatttgtgtaagttcatatgaaactggaccaaaactaaacagccaaaaaaagagtattatttgctttaggtcacttttgccataatttttagaatgtggtgaaagaaaaaaaatagcaagtaaatcattggaaatgtgttggctttgcgttattcctgatgaaatactatatgagggtatttgtctaggcctgattctgagaataatataagaatggtgccaagcacagtggctcatkcctgtaatcccagcactctaggaggccaaggcagtggattccctgaggtcaggagttccagaccagcctggccaacatagtgaaaccctgtctctactaaaaatacaaaaattgacgggtggggtggtgggcacctgtaatcataggtacttgggaggctgaggcaggagaattgattgaatcagggaggcagaggtttytgcaagccgagattgtgccattgcactccagcctgggtgacaagggagaaacttcatctgagaaaaaaaaaaaaattgtaaatccatgaggaagaataagagtgttctcccatcacccttaactccagtactttgaaaagaagacccaaatcacagttatttggtaacattctcccttttagttgacatcatcatcattattatcatcatctmtatttacatctgttttatgaaatgatttatttttgaaatatttacatacataatttcgtaacatctatgtaatttctaagagatatcattgtgggaaagttacattagtaaacagcaaagttcaagtaacaataaatacatttagatttagaaagttaagtgtagtgtagtttaacatacattgcttaagaaaacaattgtagatgacattaaactaaaccaagaaacactataaaaaagattttgattttagtataaataaaattccttaataagaaaaataaaccatttcatgatcaagctctgatttacaaagagaggattttagggctraataaatcaaagagaagtaagccttcccccacatcttctctatttcatttaggtaatgatggggttcagaggcacagagccccatttctacaacataagcaaagtgaaaattaattcattgaatacagcaatgtagctgtggtagatgaactatattttatctattgccatgatattttgagatccagtgctgctcattgagttcccctgtgggcagagtttgtggtgaggasccagcaacagacaagctaatatccaaaaacatctactcacatcaacttaatttccagtttctttcaaattgaaggtaagttccaagacaaactttttattctattctctgaccaagtgttgggaaaagaaaactgttaccattttcatttctagcatactaaaacaaaaaacataaaaaccccaaaatctaaaacacttttaaaaataacatggtgttaagagtagtttgttcagtttccctatagaaaatgatttatggaaggagaataaaagwttattctgaacactaaaacaataagaccaaaaaaatgaattatcaatattgagaatccaatagacagaattagcctgttagatgcagtagaagagagaattagtgaattggaagatagctaaacagaatgaagcatagagagaaacagatggaaatataccaagctagagggtawcacaytgatgctacagtcagaacacctaacatacttctggagttctgtaagattagaggagagaaaatsaagcaagagaaatgttgcaaggatttttccaaaagtgataaaatgtattcctccatatatttttagtaatctcaaacttcaagcatgataaattaaaccaaattarcataaaataatacaggacaccaaagaccaatagaaaatctgaaaagtagcgagaggtggaagatagagtatgtcgtgtgttgaaaagaactgcattctaaatacaacctgattttaacagaaaacatggaagaaggaactcaatggaaacatgtcttcagtgcatttccaaagagtagtagaacttcataaacagaaattgaaaatatttttcagagaaaataaaaatgactgmaaatgcaaagttgaacatgcaaggagcaataaaaattattgacaatgaaaaataagtgtaattctaaataaatgttgactgtataaaaattattgtcttgttagattaaatttataattgataagatatatgcaaatggcaataaagagactggagataaaggtgacaggaataaatttagttagactatgttttgggcttttctatgtctgtgcagataatttgaacatcataatcaaggaccctgtaattctacacccaggtatatatatgcaaaagaattgtagtaaatgatgtaggtcattgaagcattattcataatagctaaaaaataagctgcccaaatatatatcaaataaagatggataaataatyacagtaaaatcataaaatggaaaaatatggagaaatgaaawgaaataaatcacatgtacatgcaactatgggattaaatttctgatacagaatgttgatttcaggaagccatgaataagaacatatagaattgcacctatacmcagttcaaagaaggccaaaccaagctattgagtttagggtcgcatacctagttggtaaagtataaagaaaattttaaaaagatcaacataaattatggatgttgcttatcacaggagatgtgaagaaacgtgtagcagattggaaagtggcattgaggtaaacctaggctcttagcaattttccatgtcttgccctacatgatgattacatgagtatttatgacacattgctatgyttcccagttttgttttggctcatttctaagtgtgcastctagttacaatacaaaaattgttaatgaggagaaatgttccatgaaattattattactctgctcattatatactgaagggaaaaatccactatttgtatacattcatgtataactctaagaggttttaagtagaaatgttctgattttagttgtaacttttggaaatttgacatgatgttacctgccaaccccacgtttttcaataggtttttcttctaggtttaattatctacttcatatgacaaaactttgacattctccatctatttttcccttggatccagaattcctaacacaacaagkgtggtcatgttacccacactcttagtttagcagaatacctatatcagttatgtttttctgcaagagaaaatcctccaaaactgctttagatatttgtgtctcataagtctttggatttcrtttttctaagcttggtttggcagatggctctggtgattggagatgggccacatactgcatcttgcagctagtttggctgatttaggctggatcaggtagtggcattctgactccattagtttctcattcttcttctgggaacagtgtactagccagatgatgtcctcatggtaaaaggaaaagagcaggaawctccaacatggaagctgtcttaaatatctgtgtaaagtctactaacttcctgttgactgaagcaaattagaggagtgaattyagagtccaagttcaaggtagtcaccctgcctrtggtgggaggatactgcaggattatatgacaaaatgtagggtacttagaaacatttacaaaattgctgaatattttaattaaaatttaaacaaaaaacagacttgaatgtaaatttaccaaagacctaagcataagaaacatgtttgataaacattattcattgtctgacaaygctgaataggaaaatagtactaattctacctggatgacctcctggaaactcgttttccatttggtgagtaataagaaaataattccttccrtcccctaatggtgtgagtgcatgtgtgtctatgtgtttaggagcttattaacaataatgtcatataaatgtattggttatcagaaaccagattttcaggtgtattggcctcacaggactttccaagataaccttggatgattttgacaaaaggtttagaatctggtatttaaatctggcataaaaataaatccatattgatatgatcctatttatgaccaagctyctttaacaatttagacatttactgtatgatatatgtattgggttttaaaatttccctatgtaacaactgaagatgctggatacaaattatggagaggttaaacaagaaaaaaattgcaaaacaatgaaaaagaatatggctttatttgcatactaacacacgagaattcacttttgacttcaacatcagtataaaacatttcagcatatagcaaggacagatagtctataaagaggaatgagtttcagctgttttgagattaataatattttccctaaagacagctttgaattcatccattggcatatgctggtgctttcctgttgacattagagaacttaaaggcagaaaatgttactgcacatttagaaatcaagtgtttatcgaagttaatgtctggatattaagggaatcacaaccagtgttattaagcctgcatttttttttttgttgttgttcaaacatatgtgttctgctcatcattttatcaattctggtagtgtttgcatttgttcttggaaatgttgccaatggcttcatagctctarttaatgtcaatgactgggttaagacacaaaagatctcmtcaactgaccaaattgtcactgctctggcattctccagaattggtttactttgatcatattattacattggtatgcaactgtgtttaattcagctttatatagtttagaagtaagaattgttccttctaatgtctcggcaataatcaatcatttcagcatttggcttgctacgagcctcagcatattttatttgttcaagattgccaatttctccaattttatttttctccacctaaagaagagaattaagagtgttcttcttgtgatactgttggggtccttggtatttttgatttgtaatcttgctgtggtaaccatggatgacagtgtgtggacaaaagaatttgaaggaaatgtgacttkgaagatcgaattgaggaatgcaatacacctttcaaacatgactataaccaaccatgctagcaaacttcacactgttcattctgactctaatatcttttctgctgttagtctgttctccgtgtaaacatctcaagatgatgcagctccatggcaaaggatctcaagatctcagcaccaaggtccatataaaacctttgcaaactgttatctccttccktatgttatttgccatttactttctgtgtataatcacatcaacttggaatcctaggacacagcagagcaatcttgtattcctgctttaccaaactcttgcaatcatgtatccttcattccactcattcatcctgattatgagaagtaggaagctaaaacagacctctctttcagttttgtgtcaggtgacgtgctgggtgaaataacagaaaccctcaactccatagattcacaaggggagcatggtgtgtcttttagcagaaaagaaactgatggtgtctagaacgttttatatttctgtcagtttgttgtagtgtatgtatktgagtaatttcaaaacagattcctaggatagtcttttatatatatataatatatataaaaytcatatatatataaaatacgtatgggtgtatatgtgtgcatgtgtgtgaataataacattgaccataaattatgaagcctagtatatttcayatatataagtatgtgtattttatgatagctaattgtatgatatttcatttgaagaatttatctctctttgtaattaagaaattacagcatttatcagaaaatcattgctgttttccattgtaatttgtaccacatacatgtacttaactatcattgtttgaacctctcattttctggatggtaaagacattcaattctaaatcaatgatgagactgtatctttgtagtaggttttatttcattatgaattsttactttacttttagtataaagcaaatagaatttttgttagataatgatgtacacaataaaattagtgtacatattaaataaaatcagtgacaaacatgtagagtatatgtatttgcctttgggaaggcaaattttgtatatgtataacaaaactgtactaaagaatactagatttaataccartatgtgaatagcttagaaaaaaatcatttctataataggaatgaagaaacaaaaccatgatcatttcagtgctattataattttttaagtgtagttagaaaaatcatttcttccaccttttgagttaaagaaaatcttttttgaagttgacatctgatgtcaagtatttccatttattttgcttagcaacctctgagcctctgaatttccaatattcttctttgtctcccattcctratattcctcaaaaaaactcaaatattccctktctttaaaaaaaaaagcccaacataaasagggtgtagaaactatagatgataatcgaatgaaactttcttcaaatgttaaaaattgcctgtgaaatctatatattgatgataggaaatatattaatgactattataatgatgtaaatggtgaaatgatasaaagtgtgctgatgtatccattgataccaagttctattataagaaggtaatctacagccttgtggaacagctaaattctgtgtgactatattcattcttggtgttatgaaattttaacattgttatctcaaccttaaaataaatcaactcctcatattatatatatataatatatatatacacacatacattttgtttatcatacatcttccctagtactatgtaatcagcataaaaagagaggtaatagctgtcttgctttctcttgactcacaggatctaaaagccagcacaaagaatagttggtcaaaagaatatattaatgaacacataagtgattggataaatggataatttgwtgtggtaaaccaatgamaatgaaactcatcacaaaatctgcagttgcttgaattttctagtttcaggttgaggttataggcttatcaaagaagaagcatttctcagagcaaaagtttgactrttccaaaattctaggggaaatatcactgtaatatagctttgctgtagctatatcaggtgtgtgaagtagagacaaggtggaacgtcaaaattagatggcacttattctaatgctttttgaaaagcatatwaaagattttggtatatttgcacagggtcagggtcagcagtgwgtgccagctgctcggggctagctgaccccatgacaagaatgttagggaacttcccagtagctgctaaacacacttttgtttttagggaatgtctctttctccttcawtatgacttatgctgccttcaatgctttgctgatacaaaagaastgaactcaaaagaagtaaaaataaaagctagcaaactttgcaactggttaagctggttgtaaacgtacctaatcactttctactgtgaatgatatatttgtattgtgatattttttagctggttattagatacacaaaaaaggtatttcatttttaaaaattgagttagtaaccactcaccttacttacamattatttgtatattattttgtttagtatcctttctaaatgaatgttttaattgccacgttataaacrcatggaaaagtgattcaratgaatgtatatcttagctttgggtgtctagaactagagccaatgtctgattttacagtgatgacatttatttgggaaggcaagtccagggcagcaatgagggatacatgtggaaactgaggcaaaggaagatgtaaaatcatgtgtcatgatgttgatatgactttgccagttgtcgcttcacaatgaggtgagacagacagcatggtggtcatcagatacatgcacttggctccccrtacttttccagaagggttacaaggggaagccacaacaaatattagtccatggaggagagaaaagggagaatgtatcctagctgtcttctgtcttctatyttcctttggccaaagattgtttgaggcagaactaccatctttgcttttcttccttacattatccaaccccttggtggctgtttgggaaagtcacactaaccaatacccccatttttctaagagatagtttttttttaatttattttttctcttytcctctcccctttccctatgtttcctgctttctacttaactttttagacatgcacatagaactgtttactttcccctcaccagacagtcccttcgggcaagttcatctaactgtgtgctccamgarggatctctccttgagacttgacagttgatttgcagacaaaagtatgccctcatsgaactgtcacctccagggtttagcttagacctcacatccattaggaggggatgtggagasgatgcccaggtggccacttctacaatggctgtcctgctcatttccttcccaactttaaaaaaaaatccactttctgctccaaaggtgaagtgtcacattagaaggcaggatgctttgtgctccttcccgcaagctaacttccaaatacattctctatttttatatcagactyttttattactttttattattttttatattagactttacatgaagtgagccgttaaccttttttgttacaagacttcatgcccacaggtatattcaagtcccagatggaaagatgatctggatcaggcaagatgctgaccaggggaacaggagacacagtcaagggaatctgaggaagtrcatgtttttgcccartacagtccccaccttgtgccactcagatgtcctcatgccctccaaytgtggctggttttataagcacatgactagtgtagttgcacgcggtcttgtgcttttgggmtttttgcttggattaatgttctgcacttgcatttttatttttcagacagcggatactcctccgctgaagagggaatagttctgcagtaattccctaggggtttgctttctcctctcctaagggcttgatggagacaggcacagagtcctataatgcccacgatgcatgcctctagcagctttgaattctgctggatcatctgacgcaatgggcagagcaggtttggccacagcctatatctgctgtagagatatywtatgttctggattccacttgaaaccactagtctttgcattcattctgcaacccatctagttttggcagaggctaggtaggttaactgaacagggatttaaaaaggactttattaacacgttggagcaatatcctctattgtggtatttgtggactcygaaaccccaagaggctcaataaacactgtgcttcctttttagtgataagaagtatatatagggcaacatgccatttaccttaaaaaggatgtttctgctgggcgtggtggttcaagcctgtaatcccagcactttgggaggccaaggtgggcagatcacttgagaccatgagtttgagaccagcctggataacatggtgaaaccctgtctctacttaaaaaaaaaaaaaaatgccagkcmtggtggcacatgcctgtaaacactgctactcaggaggctgaaagatttgaactgattgaacccaggagacaaagcttgcagtaagccgagattgcactagtgcgctccaacctgagcaacagaatgagactctgtctcaaaaataaataaataaataaataaatgaataaataaacagattttttgacatgtggactaggagtatgggacccctaaaaacaatatctgtgttgcaggtctctaaatattaycaggtgtatctctttctgctggtattttatttctatttaatgttcaagtattttactatatttaggaaactttccatttcctggttattgcaccaattactgtaacattattaataaattaacatgatgttttgcaaaatgtaaattaaactgagagcagaagtgacatcgcctgacataaaacactgaagcagcgtttttgttcttaccacacaaaggtcaattgttttaatctcctgacccacccatgggtgtaaaataagaaacattcactaaatcaagagccacatgcaaagtgccagaagctctgctctgctcagggaagataccttatcctagagagcatttgtaagtagtgatttaaatttatggaactctgccctcattttataatgcatctgattttggtagagaccagttaggttaagtggagagggatgtaaaaagactaccatcccctgtaactttcaagtgttttgtcatggtagtgatcaattccattccttggagaatgtgattattatttttcaatccttgttgccagtggaggagaatttcgcaggcttcgccttggtcctgctctaatagtgtcccttactctacaggtcaggaagaaagtgagagtcctgccagctgccatgtrtgtccatttcaattacacattcaggaagaggtaataacagcaaactgatcagattcactttgggatggacatgagtcaaaactctaggtagcatctaaccttcaaaaactcccagtgcaggctgggtatgacggctcatgcttgcagtctycacactttggtaggcacagttgggaatatctattgaggccaggagttccagaccaccctgggcttcatggtgagagcctgtctgtacaaaaactaaaaaaagaaaaaacaacaacaaaaaattagtttggcatggtggtgctcacctgtagtcccagttatccaggaggctgaggcaggatactcccttgaacctaaaarcaatatgtgagtcagttgctggccacatccagagtactgttaacaagagtgatgcctggtagaaaagtaatgaatttattccaaacctagcttggggaaggggcacaaagagtcctgcctttaagtgtaccacttcacctttggagcagaaagcagacacttttataagataaggggggttattgagcaagggtagagggtcctyctgcaagcttggtgccttttctaccatgcgggggtctgtcctgcagaycctgactcaatgacagaggagtaatatacacygacacatatattttgcttgtcagtccagctgagcatcctggccacttacagactctaaggaagagtgctgtcagctgccgccccaamttgctggccttcttggcatttatttagaacacattaaatgacaaacgctttgagtcaacaccattagagggtaatcaacctggtcaccttcccccaggagagcaatcctgcctgtgagtgatgaaaggttagctttaggactacctgagtaaacaagctctttagataaactactatacattcctttgtatctgtgccccaagtgcccaggctccggcaaagagactggctgccttcagccaaactatctgaagctatgcaaaaacttttggtcttccaagaaggtttttgttttgttttatacttttcc

SEQ ID NO: 9966 - DNA, 12900 bp, Homo sapiens
  misc_feature (9210)..(9210): n is a, c, g, or t
caatgtgagagttctgctagctgttgaaactgttaatttcatttaacattctggaagagataataaatataaacccattacatccaccttaggttgaacatgagccaaagctttatgcagcatctgactttcaaaaactcatactccaggmctggtgaggtggctcacacctgtaatccaaacaatttgggaggctgaggtgggaggagcacttgaggccaggagttscagatcagcctgggcaagacagcaagaccctgtttgttaawgaaaataaactgattgtagtactgcgtgcctgtagttccaactacccaggaagttctggcagggggatcagtttagcccaggaatttgagtctgcagtaagctatgattgtgccatttcactmcagcctgggctgcactctagcctgggcaaccaaacaagactctgtctctaaaaacaaaaaaaaacgaacaaccraaaacaaagcctcccactccattctgtgaaacacagtgtctttttttagttctcaaatattattagtgttagttcaggccccatgtttaaaattctgagagtatggatatatgtcctttcctctgggtactgttatggctacaggtgaaatggctacaggtgcttgagaaagggtcaagtgaatatttcctgaatatttttgtggtgaatcttcagtgttgtttaccgagggcatgtaagctttccttcaatcattgaactctgcttctctgaactggctcagtccagagaactggctaagggtttttgattttcaatgtcaaaggctgacctcaggagtcagcttttgcaactcttgtcccctcttggtttataattatttagcaaagtatgaggcctcttcaactatyggtcyatcaacccatttaaatgaggctgttactgtcaccactccattaaatctgacatttgcaagatcaccgataagtctgtgttgccaatggttagttttcatgttgcatgctctatgagcagcactgaacstrgtttatttgcatttcaggatgctgccctctcctgattttatccttgttcactggcacaatttcttagtctcctttgctagttcttcctcttgtctgtaaactgaaaatatcagattgcccaaggtctaaattcttcaatctctaatcaattatgtctggtttttttggtgatctcatgcagtctccttacagataatgtagccacatggttcaatagagaggaataaggctgattattcatatatgttatttatttatatacatatagttacatatatcaaattatrtaaccctttttttcaaatgtcaaagttacatttaaaagtmacaatactaaaaatctrtggagaaggtyggagcatcaataatgtttttacttgaatttctgctaaatcagagtgatggtgaccagatagctaattaagttttatttaaaatagccatgtagattgataggcaggggattatcattatagaaaaaaatgatataagtaaggaaatatacagatagaataatgattgattaacccattttgacttattgtacttggtacagttaatgtcttagtatctcagtaatctstttttatatttttctctatgatcaattaattatgagttaatttttatatatggtatgaaataatrgtctacactcatgtttttatcattctgtttttactcccacttcttaggtaagttcatctagtcataaccttagttactttctgtgtgctgttgatgccaatatttaattcttcagctcagaagtcaaycctggtctctagaatcctttctctaagaagtcatttgacatcttcatttggatgtcktaacaagaacttgaactaacatgtccaaatcaaaatagtgatcttccctctagtctccagmgttgtttcttctatagcctttccctcttctgttaatgaccacttcagtctttcagatgcttagaccaaaaacacggagttaacattttctctctttcagaactcatctctaaggcatcagcaaattttgttggttctaccctcttgttggttctaccctcaaaaacatacagaatccaatcccttgtcatcacttttgccatactcatctaaactgctgccatacctagccaagataattgccatcaactcctaattattctttctagttctgcacatcattttctcctgatgtactctcaagrtagcagccaaagagagcctatgaagatkcaaatttgatcatgccattcttcagctttagatttttcagtggcttctcatctcattagagtaaggccaaaatccttacaaagtcctataatcatttgaatratcggattttgtctgcctgtctgtcctaaaatgcctggctatcccatgctagcaacactggactttgtgtaatttcttgaatgtaccaagaattgcctcagggacttcgtacttgtgtcccttcttctcggaatgctctttctcagaaatcaacactaaacactatcactcatcaaacatcactgaatcattgaggcctccttgatttgatctttgtatatggtgataaataggcatctagtttcatttttctgcaaatggatatccaattttcccagcaccatttagtgaagagactgtcctttccccagagtatgttcttgscacctttgtcatgagttctctataggtgtggatttgtttccacattctctattcyatttcgctgctctatgtgtctgtttttatgccagtaccatgctgttttggttactatagytctgtartatactttgaagtcaggtratgtgattcctccagttttgttctttttgctcaggataactttggctattctgagacatccgtatattttcagaagccattaaaatttagatgagataactaaaaccaattaaaaacaaatgccacaggatatcaaagaccaatcgaaaatctgaaaagtaggtagaggaaaaastttatgtaaaaagaaacaactgtctaaatgacaatcttattttcaacagacaaaattgaagctagaattcaatggaatcatgtcttcagtgtgtttcaaaaccawagcggrctttaacaaatagaaattcaaaagaatattttttagataaaaggaaaattactaaaaatataamgctgaacatgcatgaaggaataataaataatagaagtggtaaatatgtgcataagtctaaataaattttgactgtataaagtgrtggtgtctttttgggttaagtatttaataagatatatagaaatagccatatatagtctgtaagtaaaggtatcaaaaagwgaatttagttaatttaaattyggaattttctatgtctgtgaagagaatttgaaagctatatttgatgaccctgtaattmtctttctatgtatatatccaaaggaaatgaatcaaatgatatatgaaagaatggtcatactagaattattcataactcttcaaaaaagaaaccccccaaatatgtatcaactaaagatgaatgaatcattacaacacattcatacaatggaataatatagagaagtgaaaagaaatgaatcacataaagatgcaagtatgtgagtaaatttcagaaacgtaaaggtgagtccaagaagccatgaacaggaacatacaggactacacctacatatggcttaaaggtttaaagtaggyaaaaccgtatcataragtttagggttgcatacctagttgttaatgtataaagaaaatcaaggccaggcgcgrtggctcacgcctgtaatcccagcactttgggaggccgaggcgggtggatcacctgaggtcaggagttcaagaccaacctggccaacatggcaaaaccctgtctgtactaaaaatacaaaaagttagctgggtgtggtggcatgcgcctgtagtcccagctacttggaaggctgagggaggagaattgcttgaacccgggaggtggaggttgcagtgagctgagatcgcgccactgcactcctgcctgggtgatagagcgagactctgtctcaaaaaaaaagaaaatcraggaaatgatcattctaaattatggctattgctctcctcagggtatgtgaagaaaggtgtaggggcttggagagtggcatggaggtggacmtaggctatttgcaatgtgacatgttttgccctgcttgatggttgcatgagtgtttatgacacattgctatgtttaccatcttagttttcacccatttctaagtgtgcattataattgtatttaaaaattattaactggaaaaatgctccataaagaatattaattattctgctcattgtataccttgcaaaaaattcaccatttatacacatttttatacaactcttagagagttgaagtaggaactttattttagctgcaacatatggaaatttcagatgatgctacctgcagcacacaaatcctttcaaacatttttttattacctttaattatctacctcacrtgacaaaactttgccactccccatctatttttcttttggctcctgaattcctgacaaaacaggggcaaatatatttccccacactcttggtgtagcatagtagctgtaccagttaggtttttctactagagaaaccctccaaaactacgttagatatttttatctcatatatctttggattcaggttttctaagctgggtttggtggatagctctggtgacttgagatgggccaagttctgcatcttggagctagttagactttggccaatttaggatggatcaagtgcaggcaaactgactccattagttttcattctcattctgaaaacagtgtactagccaggtgataatctcatgatcaatggaaaagagcaagaaaccccaatatggaagccatctcaaacctcggtgtgaaatctaccaattttctgttcatcaaagaaagttgtgtgagtgagctccgagtccaggggacagataatcamcctgcttatggtgggaggatactgcaaaattatgtgtcrtagggtgtggtactcaggaatatttacaaaattgttgaacattttaattaaataataaatacttaaacattaaatagacttgagagtaagtttaccaaatgcttaagcatgaaagatatgtttgatgtttgatacatttttttggggggggtctgaaaaccctcagttttcactgggaaaataggactaatttcacgtggatggcctccaggagacttacttcccattttggaaagtataagaaaataattccttccatctcttaggggtgtcacagtctctctctctctctctctctctctttctgtgtttgtatctatttatgaacatggtaacaataaattcacacaaaagtattgggttagcagcaaccagattttaaggtgttttggtcttcttatggttcccaagaaaaccttggatgattttgatttaaaagtttggattctgtctgtttaaatgtagcataaatagtaaatccgttatggtggtgatcctagttatgactaaggtcttttaaagaacttagacatttactgtatgaacgatggactcgggggtaaaatttccctatctaacagctgaagttgctgaacacaaattacgtatcggttaaacaaggaaaacattgcaaaatattgaaagagaatatgtctttatttgcatgctggtaaatgaaaatttaggtttcacttcaacttcattatgaataattcaagcccatcacaagaacggacattgaatgaatgagttaatttgagctgttttgaaaataagaatgttttccrtaaagatgacatcaaactcatccattagcataagctggtactttcttgtttgacactggtcacagtrtttaaaagtaaaaagaatgttactgcacattcagaaatcagatgcacataaaatttaaggtcagagtattaaagaaatcacaaccagtgatattaggcttgcattttctttctttttttctgctcagatatgataacttttctatacatttttttttcaattctaataatggttttatttgttctcggaaactttgccaatggcttcatagcactggtaaatttcattgactgggtgaagagaaaaaagatctcctcagctgaccaaattctcactgctctggcggtctccagaattggtttgctctgggcattattattaaattggtatttaactgtgttgaatccagctttttatagtgtagaattaagaattacttcttataatgcctgggttgtaaccaaccatttcagcatgtggcttgctgctaacctcagcatattttatttgctcaagattgccaatttctccaaccttctttttcttcatttaaagaggagagttaggartgtcattctggtgatactgttggggactttgatatttttggtttgtcatcttcttgtggcaaacatggatgagagtatgtgggcagaagaatatgaaggaaacatgactgggaagatgaaattgaggaatacagtacatctttcatatttgactgtaactaccctatggagcttcataccctttactctgtccctgatatcttttctgatgctaatctgttctctgtrtaaacatctcaagaagatgcagctccatggagaaggatcgcaagatctcagcaccaaggtccacataaaagctttgcaaactctgatctccttcctcttgttatgtgccattttctttctattcctaatcgtttcggtttggagtcctaggaggctgcggaatgacccrgttgtcatggttagcaaggctgttggaaacatatatcttgcattcgactcattcatcctaatttggagaaccaagaagctaaaacacacctttcttttgattttgtgtcagattaggtgctgagtaaaagacctgaaactctcaactctctagattcacaagtgggacattgtgtgtgtattctaggagaaaacaaactgatagtgtctggaacattttatactttttactgttttttctgtagtgtatgtttttgagtattttctgaaagcatacctagaaaagtcttttacctaaagttagtctaaaagtgtatctatgtgtgtgcatctgtatatgaaagacttaaaagacattgacaataacataatgttaatcatattttcacaagatgccaaattatagaaaatatggtaagaagtttttcagaatcatgaacccatgtatatttcacatatacatttcatattatcatgtttcacttgaaaactgtgtgatctttacttataattgttaagaagtgacacattatctcaaaatctttgctcttttccactgatttttaccacacatatgtaccacagtgtgcttaaacatctaaattttttgatagtaagcacactcaattctaaatcaataatgaggtttcatytttggggtagtttttatttcatcatgaattctaattttatgtttagtttatagccagcataattattttcagaaaaagatgcacagaataatattcaaggatgacaaatatatttagaacacattttgtatatgtctaccataaacagtactgaggaataatagacttaatacaaatatgtgaacatttgagaaaaaagtcatttctataataaggatgaagaaagaaacaccgygatgacttatgttgtcataagtctcaacatgcagttagaaaagtcatttcttccagtttttgagttaaagaaaaccttttttgaagttgagatctgatgtcaagtatttcaggttttttttttctaaaccacctcagagtccctgaattgccaatgatctcctctatcttccatacttgaaattctttttaaacttcacataaaagaacttgagtcttccctaccttagaaaaatactctatgtaaaaatastatagaaattataaaaatcatttgaattaaactttttgcaaatgttaaaatggcatctatgaaatctatgtattaatgatagaaaacatctaaaatatatgttgtattataatctagttgcaaataatacaatgagacagtgtgttgatatattcagtaatagcaagttctattataggaagaaaatgtataacatcattaaacaattaaattctataarctgtattaattcttggagttatgaaattttaacaatattatctaaaccttgggacaaatcatctctacatctgatttagttatttgt[450 bp omitted]tatctttgcatacaatttttcagttgtgaatgatatatttgtattgtgatatttccagctggttagtgtataaacaaaaatggcatttcattaaaaaaaactgagttagttaccaactaccttactaaaacgtgacttttatagaatattttaaaaccctttctaaatgaacatttaaattgccatattaaaaacccacagaaaaatgcataaataacaattataacactaaacgagtatcttasccttgggtgtctagaactagagccaatgtctgatgttaaagtgataacatttatttggaagataagtccagggcagcaatggccaggacatgtggaaattgaggcaaagcaaatgtgaaaccatgtcttgtgatgtatgatatgactctgctgatgaccacttcacaatgagatgagagagacagcatggtggtcatcagatgcgtggacttgactcccagtacttttccagaagggctgcaaggggaaaccacagccggcattagtccacggaagagaaagagaagagaanatgtatctgctcagctgtcttctgtcttctatttcccattggccagggtttccctgaggcagaactaccatctctgctgttctgcgttccatcatccagtcccttggtggtagttatgaaagccaaacctcatgcccccagtgtggtgttccattgaagtcccaaatggaaggatgatctggatcaagcaaggtgctgaccaagaaaagagaagacagtcaagataatctgaggaaggatatgtttgtgggcaatactgtccactccttgtgcaactcagattggctcatgccctccaatcatggctggctttataggcatatgacttcacagttgcacagggtcttgtgcttagaagtgcttatgcttagaggggctttatgcttggattaatcttctgcacttgctgttttgtttttcagacagaaggtagtcctctgctggagaaggaatagtcttccactaattcgctaggagtttgctctccccactcctatgggcttgtgagaggcatgcacagagtcctataatgcccactatgcatgcctgtagcaactttgaattctgttacatcatctggcacaatggccaagcaacttgggccagactctatatctgctatagagcccgtttttgtttcgggtttgacttgagacaagcagcccttgcaaactcctttagtgagtcagagaaatatccttaaatgtggtatatgttgaattcaaaaccccaataagcccccataaaactgtatttcccttttagtgataggaartatatatatatagggcaacatgccatttactgtaaaaaggatgttttgacaaaaggaccagaagcattggacccctataaacttcatctatgttataggtctttgaatctgctgaagtttatgtctcttcttccagtattttacttctgttcaatgttataatattttactatacttaaggaacttgccacttcctgcttatgggtaccactttatgtaatattattaatatattgaattaacatgatgttttgcaaaatgtcaattaaactgaaagcagaagtgacagccctgacagaaaacagtgaagcagtgttcttgtttttaccacaccaaagcaaattgttttgattttcctccacaatgtgtgtagattaaaaagcattagctaaatcaaaagccgcatacaaagtgctggaaaccacattctgctcagtgaagataccacatcctagagcgaatgtgcaagtgtgacttaagtttatgctaatgtgcattcatcctataatccatctggttttgacagaggccagttaggttaactgaataaagatataaaatggacgaccgccccctggaacttttgagttttttgttgtggcagcgaccaattctgtttcctggagaatgcagttattatgttttattcattttattgccaggaaagtagaatttcagaagcctccccttggtcctgcttacaataatgtcccttggtatacaggtcaggaagaaatgtaagagtcctgacagctgttgaacctgtcaacttcamttacactttcaggaaggggtaactacgatgaactcattagaacccctttgggttggacatgggccaaagctctatgtaccatctgatcttcaaaaactcatactccagtcctattgaggcagctcatacctgtaatcctaataatttaggaggccgaagtgggaggatcactttaggctgagagtttcagatcagccttggcaacayagtaagaatctrtaaaaaaaaaaaaaaaaattagttgtttgtggtagtgtgtgcctgtagttacagctacccagaagactcaggcaggaggattgctttagcccaggaattcgagtttgcagtgagctatgatggtgtcattgcactccagcctgggcaatcaagcaagatcttgtctctaaaaagaaacaaacaaaaacaacaaacaaaagcccaaaaagggcctggtgcggtggctcatgcctgtaatcccagcactttgggtggstgagtggttggatcacttgaggtcaggagttcgagatcagcctggccaacatggtgaaaccccacctctactaaaaatacaaaaattagccaggtgtggtggtgttgcacctgtaatccaagccacttgggaggctgaggcatgagaatcacttgaacccgggaggcagaggttgcagtgagctgagatcatgccactgaactccagcctgggcgacagagcgagtctccacctcaaaaaaaaaaaaaaaaaaatccagaagtaaaaatttgccaccgtatcccatggaccactgtgtcttttggggtacccagatattagtgttagttcaggctccaaacttaaaagtctcarataatatggacgtgtgttctgttctctgaggactgttttctggggaatagctacaggtctttgagaaagcaacatatgatacatcctgagtgttcttgcagtgcattttcaatgtccatcatcaagaggacttaagattcccttcaatcattgaattctgcttctctgaattggctcagccctgagaactggctgagggttttccattttcaatgttaaaggctgacctcaggaatcagctttttcaactctttccccctcttggtttataattatttagcaaagtatgaagcctcttcaactattggcctatcaacccatttcaataaggctgttgtcaccacttcattgaatctgacatttggaagatcaccagggagtctgtgttgccartggtcggtcttcatgttgcatgctctgtgagcagtactgaatatagtttatttgcattccaggatgctgccctctcctgattttttccttatttactgggcaccacttctcagtctcctttgctagttctctcttgtctctaaattgaaaatatcacactgcccaaggtctcagttcttcaacctttaatcaatcgggcttgttttgttggtgatctcatggagtctccttactgataatgtagccaaatggttcaatagagaggaataaggctgattattcatatgtatttatatatattatttatttatgtacatctatttacatatttctcattatataaagcttttttcttcaaatgtcagttacatttaaaagtaacatgaccaaaaatctagggagaatgtgggaggatcaataatgttttcacttgagtttctgcctattcagagtgatagtgactcagtatctaatttagttttatttaaaatagcaatgtaaatattgatagattgataggcaggggataatcattatggacataatgatctaagtaaagaaatacatagatagaattatgattgattaacccattttttatttcttgcatttggtacagttagtgtctcagtatcgcagtaatcatagttcttaagtttttgctccatgatcaatgaattatgagttaatttttgtgtgtggtataaaataagggtctaaatttatgttttttctttctcttttggctcttactttttaggtaagttcatctggtcatggccttactttctgtgtgctgatgatgtgaacatttaatccttcagctcagaacccaaccctggtctccagaatcctttctctaatagcatatttgacatcttcatttggatgtctgacaagaacttagaactaagttgt

SEQ ID NO: 9967 - DNA, 12930 bp, Homo sapiens
  misc_feature (1216)..(1284): n is a, c, g, or t
catgttgcatgctctattagccacattgaacatagtttatttgcatttcaggatgctgtcctctcctgattttatctttgttcactgggcagcacttctcagtctcctttgctagttcttttttgtctctaaactgaaaataccaattttcaacagggtctcaattcttcaatctctacaatgatgcctgttgtgttggtgatctcatgtattctccttactgacaatgtagtcaaatcagtcaacagacagkcataagggtgattatccatttatattgtttatttattcacatatcttggtatatagcacattatgtaaatatttttccttcaaatgtcaaatttacatttagaagtaatagtacgatggtgggtgctctggcttaagcccgtaattgagcagcttgggaggtttaggcaggcagatttcttcagcgcaattagtggagaccaacctgggaagaacggcgaagcccagtctctagtaaaaatacaacaattagccaggtgtggtggcatccatctgtagtcctagctacttgggaggctaatgtgggaggatagcttgaggctggaactgtagacagcagtgagccaatctcaaaccactgcactccatttggggctacagagtgagaacatgtctcaaaaaatgaaaaatagaagtaataataccaaaaatctaagggaaaagatggagtattaataatatttttgcttgaatttccactaaatcagagtgagggtgacccaccatctaatttagttttatttaaaatagcattatacatattgatagattactatgcaggggattattattattatagaaataatgatctaagtagagaaatatacagatggaattatggttgattaacccacttatattacttgcagttgtacaggtagtatgttttagtatcttagttactaatctcaccttttatgtatagctctataatcaaatatgagttattttttgtgtatggtatgaaataagaatataaatttatctttatgcatgtcctccaaatgtctttcagacctccaaatggataaacaaattgtggcatacttatacaatggaatactatacagtgatcaaaattaatgaactagacagacatgtttacaacagaataatacaacaaagaaaatgaacaaatttgagctacatagataataatactcacaaatgtgagaggaattannnnnnnnnnnnnnnnnnnnnnnnnnnnnnnnnnnnnnnnnnnnnnnnnnnnnnnnnnnnnnnnnnnnngatatactgtattattgcagagagtatttttctatattcatattgaaaaatgcccaaaaagccccaaaatagaatcctaattattggatgtcacttttgctatgaatttttaaaatgtagtaaaagaaaaagaagcaaagaaattcttgaaaatatgttggttttacattattcttgatgaactaccacatgaggatacttctctaggcctgatgctgagaatcatagaagaaacatgaggccatgaggaagaatagtagggttctctcactaccctgaactccagtacttaaaaaacaagatggaaatcacatttatcaaatagcattctcccttttacctgccataattattatcatcatcatctatatatacatctatctcattaaatgatatatttttgaaatatttaaatacataatttggaaaataagtaatttttaaaagaccatcattgtgggaaagttacaggagtaaacagcaaagcttagtcatgctcaatacatgtagatttagaaattaagtatagcttattttacaatatattgcttaagcaaataattatttatagatgagcttaaactaatctttgtttcattatgatcactatagaaacaatttagattttagtgtaactaaaactaaccagtaagaaggacaaagcaaatgatacattttatgagctagcttttatttctaagagaggattttaggaccaaatagtcaaacagagttaagacctcagatcttctgtcacacttgtgtgagtgatggtggagttcgaaagttatagttctataaacaaaactatactcacggatagggattaaatggtggaattctttagaaacaccagattcagttttgtttccatgagacttaaagttcttcaatctttcataaacttgtatgtactgttttactctttgatcttttaaagattgttataaatgaagaagtcttgatttctgctaataaaaacagagtaaaatttaaatcatggaatagaaaggtggagctgtrgttgagatattatattttattaattgtaatgacaktttgagatccagtgctgctcactgaatttccctgtgaggagagtttgtggtgatgacccagcaacagacaagctactatccaaaaaaagctactcacatcaaatcaatttccagtttcttccaagttgcaggagaatgcgtagaccataattttaatctcttctgtgacctaagtattacaaaaagaagaaaatcactamaattttcatgtcaggtgtrctaaaaatttayaaaaactattttttaagaasttggtgttataaatactttgtttagtttctccattaaaaatgatttatagcaagagaataaaagttcatttctacccctaaaacaataagataaaaaagagtaatgaatattgagaatccaatagacagakttgagaaccagttaaacataagaaagaattagtgaattggaagataactgcccagaatgaagcataaagagaccaagaggtagaaaatataaggctagagggtcagagacattgaagctacaatcagaacaactaacatacttctgcagttccagaagattagaagagagaaaatgggccagaagcattgtggagatttttccaaaagtggtaaagtgtatcagttcatatatttttagaaaccatcaaacttcagacaagataactaaaaccaaattaatataaaatgacaggacatcaaagaccaataaaaaacctgaaaggtaactaaaggaaaagacagattatgttaaagggaataactgtctaaatgacaacctgattttcaacagacaaaaatgaagctagaattcaatggaatcatgccttcagtgcatttcaaaagtagaatagaccttgataaacagaaacttaaaatgatatttttttcagataatagaaaaattattattattatcagtattattctatgtggagttggagtctcaatctggtgtccaggctggagttcagtggtaggatcatggcttactgcagtctggaactcccgggatcaaaccatcctcccacctcagccttgtgagtagcttccttatgcctggctttttcatttattgtagacacagtttcgctgtgttgcacaggctggtcttgaactcctgggtgttcctgactcagccttacaaaatgttgagattatgggtgtgagccaccctgccttgccaataaaaggactttttgaaactattaaattgaatatgcaaaaaggaatacaaattaatgaagtggtaaatatgtgcataattctaaatgaatgtttactgcataaaataataatgtcttgttggggtaattatataattgataagatayatgcaaatggcaaaaaatagaatggaggtaaagctgacaggagtacatttagttaaattatcttttaaacttttctatgtctatgaggatattttgcacaatgaccctgtaattctactcaaaggtatatatacagaggaattgcatcaaatgatatatgaaagaatgctctagtagaattattcgtaactgttcaaaaaagaagctggccaaatatatattaaggatagatcaatcattacagtaaatccacacaatggaacartatagagaagtgaaaaaaaatcacatgtacttgcaactatgtgactaaatttcagaaacacaatgttgagtccaagaagccacaaacaagaagaacatgtaggattgcacctacacrcagtgcaaagcaggccagaccaagcgatggagtttagsgttgcatacctagttggtaaagtgtaaagaaaattaaggaaataatcaccataaattttggatatygcttatctcaggaggtatgaagaaatgtttagggacttggaaagtggcatggaggtggacctaggttgtgtttggtgttccttgtcttgcctgcatcatggttacttgaatgtttatgatacactgcrgtatttcccatttttgttttggttcatttctaagtgtgcattataattttaatgtaaaatgtttaattaggagatatgtctcatagaaattattattattcatctcattatatactgatggcaataataaactatttgtatacattgttatacaactctaagggagttgaagtgagcactttcttatttagttgcaacgtgaggaaatttgagatgatgttatcctccaaccccagaactttccaatggatttcttctagccttaattatcgacctcacaagaacaaacctttgcaatttcccatctrtttttgcttttggctcctgaattcctgacacaacaaggttgtacatatttcccacactcttggtttagcagagttgatttatcagttatgtttttctgcaagagaaaaaccctccaaactacattagatgtttatatctcacatgttgttggatttcattttttttaagctgggtttggtggatggctctgtttatttgaaatggaccaaattctgaatcttggtagtagttagagtttggccaatttggtctggatcaggtgggggcaatctgacttcattagtttctcactctccttctgggaacagtgtactagccaggtgatattctcatggtaaatggaaagaggaagaatccccattatggaagccatctgaaatctctatgcaaagtgtagtaattttctgtttatcaaagcaagttaaatggttgtactccaagttcaggggcaaggtagtcagycttctcagtgatggcaggatactgcaagactatatatcaaagggttgggtactcaggaattcttatacaattgctaaatgttttgtatagtaataaatatttaaacattagtcttgagagaaactttaccaaaggcctaagaattagagatatgtttgataaataaatattattcrtgagctgaaagccctgagtgggaaaataggactaacttcacctagacaacctcctggaaactcctttttttattttggaactgatgagaaaataatttgttccattcgtgagtggtgtgcacatgtgtgtgtttgtgtgtgtatttatgagcttgtgaataatgaagttatacaaacgtattagcagcaaccagattctgaggttctccagaaaatcttagatatttttgataaaagcagtttggattctgtgtatttaaatctgtcattwaaaaaagtccatataggtgatgaacttaattatgaccaagctccttttaagaatttagacatttactatatgatctctgtattgggttataaaacttccctaacaactgaagtcactaaagacaaatgatggagaggttacacaaggaaaaattgcaaacactgaaagtgaatatgtccttgtttgcatactagcaaatgagaattcaggtttcatgtcaacttcagtatgaataattccagcctataacaaggacagacagtgaatgaatgggttaatttgagttgttttgaaaataagaatattttccataaagagagcgttgaacttacccattagcatgccatggtgatttctggcttgacaytggtaacarcaattaaaagtaaaaagaatgtcacagcacatacacaaatcaggtgcatatagaatttaaggtcaggatattcaagcaatcacaaccagtgatattacaccagcattttaaaaatttctttttgtctgttcagacatgataacttttctgcccatcattttttccattctaatagtggttacatttgtgattggaaattttgctaatggcttcatagcattggtaaattccattgagtggktcaagagacaaaagatctcttttgctgaccaaattctcactgctctggcagtctccagagttggtttactctgggtattagtattaaattggtatgcaactgagttgaatccagcttttaacagtatagaagtaagaattactgcttacaatgtctgggcagtaatcaaccatttcagcaactggcttgctactagcctcagcatattttatttgctcaagattgccaatttctccaaccttatttttcttcacttaaagaggagagttaagagtgttgttctggtgatactattggggcctttgctatttttggtttgtcatctttttgtgataaacatgaatcagattatatggacaaaagaatatgaaggaaacatgacttggaagatcaaactgaggagtgcaatgtacctttcaaatacaacrgtaaccatcctagcaaacttagttcccttcactctgaccctgatatcttttctgctgttaatctgttctctgtgtaaacatctcaaaaagatgcagctccatggcaaaggatctcaagatcccagcatgaaggtccacataaaagctwtgcaaactgtgacctccttcctcttgttatgtgccatttactttctgtccataatcatgtcagtttrgagttttgagagtctggaaaacaaacctgtcttcatgttctgcgaagctattgcattcagctatccttcaacccacccattcatcctgatttggggaaacaagaagctaaagcagacttttctttcagttttgtggcatgtgaggtactgggtgaaaggagagaagccttcatctycatagattcacaagagcagcattgtgtatcttctagcagaaaacaaacgtgttatatgaagcattttatatttcttactgtgttttctgtaatgtatgtatatgaataactttcaagcatgtacctagaaaagtcttttacctaacgttagtctaaaaaagtgcgtatgtatatatatgtatttttgtgtgtatgtttgtatgaaaaacaaaagaacattgacagtgacatactcttttttgttttttcacacaaactgccaaattatacaaaatatgacaaaaattcttaagaattatgaatccatacctatttcatttatgtattttatatttcatttgaataatttatgatctatatttataattattaagaactatcagcttatctcaggaaagacattgctgttttctattgttatttgaaccacacaaatataccacagtgtgcttcgaattcattgtttgaacctgtaactttttggatggtaaggtcattcaattctaaatcaataataaggatgtgtctttgaggttttattccattatgaattcctattttatgtttagtaaaaagcaatcagaattattgatagaaaacaatgcacacaataaaatttgagtgacaagcatatgtagagtaagtttcaactatgtctaccataaacagttctgaggaatattagatttaatacaagcatgtgaatagcttagaaaacaatctcttctataatagggatgaaaaatcatgattgtgatcttgattgctattatcagtttccatatgtagttagaaaagtcatttcttccagcttttggattaaagaaaagctttttttttgaagttgagaggtgatgtaaactattttagtatttttttctaaagcacttttaagcccctgaattgttaattatacccttaccttccatttataaaattccttctaaacttcaggtaacagaacccaaatcttccttattctaaaaaaaaactatcaatgtaaaaatagtatagaaattatggaaaataaatcaatgaaatttttgtaaatgttaaaatggcatctatgaaatctatgttttaattatagaatgtgctttacagttataattttgttgtcaatgatgaaatgaaagtggttgacatattcattaataggaagttctattatgagatggaaatgtacagtcttgttcacagctaaattctacatgactgtattaattttggtgttatgaaattttaaaaatgtgatttaaaccttaagataaatcatccccacatgtgatttatgtgtttttttaaaatcatgtatcttcctcagtacaatgtaagaactgtaaaatcagatcagagatgatctcatctctgtcttgctttctgttgaatgtaagatcagagagcaagatgatctcatctctttcttgctttctgttgactcccaggacctagaacccagcaacaagaatagatggtcaaaaatgatattttaatgaacaaataaatgggtggataaaatgggtaagctgatgtggtaaaccaatgaaagggaaactcatcacaaaatctgcagttgcrtgarttcccctgttctgttctcaggttaaggttacaggcttatccaagcagaatccttccgcagaggaaaagtttggctattccacaattttaggggaaatatgacaataatatagtcttgatgcarctgtatcaggtgtctgaattggagacaaggtagaacatcaaaattagatggcgcctattacaatatttttagaaagcgtataaacaaccttggtctatttgaatatgtatttttttctattgtgaattatatatttgtattatgatattttctagttgattattatttaaacaaaaatggcatttcattttaaaaattgagttagtaaccagctactttactaaaatgttttttatgtattacctgttattaaggtgatgacatttatttagaaatcaagttcaagacaaaaatggcaaggayatgtggaaattgagacaggaacaaatgtgaaacaatgtgtggtgatgtctggtatgrctctgctggcagccacttcacagtgaggtgagagagacagcatgacggtcatcagatgcgtacacttggctcccagcacttttccagaagggctacaaggggaaaccacagccggcattagtccagggatgagagagaggagggagaatggagaatgtatctgctcagtkgtcttctgtatttgatttcccattggccattgtttccctgaggcagaactaccatctctgctgttctgccttccatcatccagtccctaggtggaggttgtgaaagtcagacctcatgcccacagtgtggtgttccattcaagtcccaaatggaaggatgatctggatcaggcaaggtgctggccaggggaataggagatagtgaagggaatctaagaaagcacatgtctgtgtccaataccaccactctttgtgccgctcagatgtactcatgccctccagtcatggctggctttatgagcatatgacttgcacagttgcacagaggatactcctctgctgaagagggaatggtcttgcactaattccatagggatttgctctcccctctcccacaggcttgtcagagacgtgcacagagtcctataatgcccactatgtatgcctctaacagctttgaattctgctggatcatttggctcagtggccatagcagtttggatcagaacctatatctgctgtagagccctcttttgttctgggctccatttgagaccagtagcctatagaaacttcattaatgagtcagagcaatattctcaaatgtggaatatgttggctccaaaatcccagtaggcccccaaaacactgtgtctcttttgtagtgataggaaatatagagagagagcaacatgccgtttactttaaaaaagattgttttgacatgtggactagggacactgaaaacctgaaaacatcacctatgttgtcagtccctgaatcttcacatatctcttttcttctggtattttacttccattcaatgttatagtattttacaatattaagaatcttgcctcttcctgtttattttaccaaataatatataattattatttgagacagggtctcattctgtccatgaggctggagtgcagtggcaggatcatagctcattgcagcctcaaccttctgggctcagttgattctccctcctcagcattgctagcagctgggactgcagggacacaccaccttgcctggctaattttggtattttttgtagggctgggatttcaccatgttacccaggctggtttcaaactcctgggcccaagtcagcctcctaaagtgctggaattacaatcatgtgccacagggcccgggctgtaatattattaatatattaaattagcatgatgtttttaaaaaaatgtaaattaaacagagaacagaagtgacataktcctgacataaaacagtgaagcagtgctattattcttacaatacaaggcaaattgtcttgattttccctcataaagggtgtagattaacaaatattcaccaaatgacgagccccgtaaaaagtgccagaagctatgctctgctctgtgaagacagtacatcctagaaagcatttgtgagtgttgattgaagtttatggtaatctgcactcattctataatccatctggttttggtagaggccagataggttaagtgaatccrgttatagaaaggwctaccatcccctgtaacttgcaagtgttttgtcacggcagtgaccagttccattccttagggaatgcggttattatattttatacattgggttgccagcagtggagaatttcagaggcttcaacttggtcctgctataataatgtcccttactctacagttcacgaagaatgtgaaagtcctgccagctgccatacgtatccagttcaattacacgttcaggaagaggtagtaactacaaactgattagatccaccttgggatggacatgagacraarctctaggtagcatctgaccttcaaaacctccccctgcaggctggatgtgatggctcatgcctgtagtcttagtagtttgggaggccaaggtgggagaatcccttgagagcaggagttccctttgcaacatatggaaactccatgtctacaaaaaattgaaaaattagctggcgtggtgctgcatgcctatagttccaaatasttgggaaactgaggcaggaggattgyttgagcccagggtttcaaggctgtagtgggctatgatcctgccactgtactccagcttgggtaacagagggagactctgtctaagaagaaaaaaaaaaaagtgaaagttcttactggtgtcttaaatatcaagtaaaacaggttcaaatcaataattaacaatctttggttcctgcctatagcaaaaaggtaaaatggaaagcagttatacaaatagtatgttaactcataagaaaactagccaaagacagatttattatcatctgctttttttgttgttgttttctcgagacggagtctagctctgtctcccaggctggtgtgcagtggtgtgatctcgactaactacaacctccacctcctgggttcaaatgattcttttgctgcagccatctgagtacctgggattacagacgggyacyaccacacctggctaatttttgcatttctagtggatatagagtttcaccatgttggccatrctggtcttgaagtcctaacctcaggtgatccacctgcctcagcctgccaaattgctgggagccacgggcctggccaatcatctgctttttataggtgataatactgaggcagggagtagttgtaaaatggagtctcagatcatagctataccaagcagggaatctggtttcctgtcctggcagtctgactccaagatcccctcttagaaaccatcatactgtaaaaactgaaargaaataaaaatccaagattggagactgattttaacatctattcatctaaaccattaagtaatcaaaaatgaattaaatagaggaaaatacaactgactattcatacacagagaagtgtagactcttcaatggaaaacatgttttttaagtgcccaaggaatagttataaaattgctgagtattttaattaaacaactaatatttaagtattaggctcaagagaataatttagtcaaagtcctaaatatgagaggctaagtttgataaagattgaaaatgcactgaaaagcccaagtaagaaaattattttttcattttagaaattataggacaataatatttcccarctatgaggtgtgtgtatgtgtgtgtgtgaacrtgtttgtgttaatgagcttgttaacaataagttatacaaaattattagttggcagcaacsagatttttaggaatattggccttcctgggcttcccaagaaaacsytggatgcttttggtaggaaaagttaggactcactaaatctggcacagaaaaggtgaatcaacagtggtcgtgattctagttttgaccgagctgcatataacagtgtaggcatctgatgtasgatctatgtattaggttagaaaatttcccttacaactgccattgctcagcacaaattatagagaggttaaacaaggaataaatggcaaaatgatgaataagaatatgacctgatttgcatgctggcaaatgagaattcagcttttacttcaacatcagcatgaaacattttatcttataacaaggtcacagcatttgaataggagttaatttgagctgttttggaaattatcatgttttccattaagacagccttgaactcattcagtagcatggcccggtgcgttcctgcttgacattagtcagagaatttaaaaggaacaagaacattactgcacaatcagaaatcaggtgcacatagaaattaaggtcaggaccttaaagggaatattgcccattgatattaggcctgccttaaaaaaa

SEQ ID NO: 9968 - DNA, 12885 bp, Homo sapiens
ttctttaaatattttaaaaagtaagagataagcaggaagtctacctccacattcttaatgttagttttactatgaaacatcagattctggccgggtgcggtggctcatgcctgcaatcccagcactttgggaggccaagttgggtggatcacgaggtcaggagatggagaccatcctggctaacacggtgaaaccccctctctactaaaaatacaaaaaataagccaggcctgatggcaggcgcctgtagtcccagctactccggaggttgaggcaagagaatggcatgaacctgggagatggagcttgcagtgaggcagagcttgcagtgaggcggagcttgcagtgaggcggagcttgcagtgaggcagagcttgcagtgagccgagatctcgccactgcactccagcctgggtgacagagcaagactccgtctcaaaaaaaaaaaaaaaaaaaaaaaagaamcatcagattctgagcatctgtattacactagacacctttttttcttatttccaatttcattatttatgataacatttcaaagaggcagaaattagtgaatttccaataaattatagtaatatagatattaaatacacaggacaatttytataaatttatctctaaatgaaataattatgcccatttttaccattcaaagattataycatgcatgtgtacacatatgtgaggaaaaatattttgatagtacaaagtttttgaatattagagaagaattagtagaaagataattttgttgaggcataaagcatatttagtgtaactactttgactgctgtaataaaatcacccagattttgtsacagtagctgagattaaaaataaacagtagagagaatttcacttgttaataatgctattaaaagatgaagcttatacactttataattgcacagagtatttgtgtaagttcatataaaagtggaataaaattaaacagccaaaaagagagtattctttgctagaggtcacttttggggtaatttttagaatgtggtaaaagaaaaaatatcttgcaaatcattagaaatatgttgattttgtgttactcttgatgaaatactatgtgagggtatttgtctaggcctgattctgagaataatataagaatcgagccaggcaccatggctcatggttgtaatcccagcactttggaagttgagactggtggatcacctgaggtcaggagttccagaccagcctggccaatatagtgaaacccactgtctactaaaaatataaaaattagctggatgtgatggacagcacctgtaatcccagctacttgggaggctgaggcaggagaatcaattgaaccttggaggcggaggttgcagttagctgagattgtgccattgcactgcagcctgggtgacaagagcgaaactccatctcacacacacacacacacaaaatgtaaagccatgaggatgaataatagtgttctcccaccacccttaactctagtgctttgaaaagaagactcgaatcacaattatttagtaacattctccctttcaggtgacatcatcatcattattatcatcatctacatttacatctgtcttattaaatgatttatttctgaaatatttacatacataatttgggtaaygtctatgtaatttccaagagatatcattgtgggaaagttacattagtaaacagcaaagttcatgtcaggctgaatacattgagatttagaaagttaagtgtagtgtagtgtagtttaaaatacattgcttaagaaaacaattatagatgatattaaactaatccaaggaacactataaaaagattttgattttagtataaataaaattgcttagtaagaaaaataaataaaccatttcatgatcaagctcttatttctaaagagaggattttagggctaaataaatcaaacagaagtaagctctcccccacawcttgtctatatcatttggataatgatgtaattcaaaggcacagagcaccttttcaacaacataagcaaagtgaaaattatgtcatggaatacaatgatgtatctgyggttaatgaactatattttatctattgcaatgatattttgaaatccagtgctgctctttgagttccctttgagcagagtttgtggtggggacccagcaacagacaagctaatatccaaaaaaagstactcacatcaacttaatttccagtttctttcaaattgaaggtaaattctaacacaaagcttttattctattctctgactaaagtgttgggaaaagaagaaaattgttaccgttttcatttctaacatactaaaacaaaaaacaaaaaatcaaaaaaatcagaaacatttttaaaaagaacagagtgttaagagtagtttgttcagttttcctatagaaaataatgttcagaaagagaataaaagattattctgaacactaaaacaataagactaaaaaaatgaaatatcagtactgagaatccaatagaaagagtcaaccagttagagyackagaagagataattagtgaattagaagatagctamacagaatgaagcayagagagaaagaaatggaaaatgcaaggctagagggtaacacactgatgctatcatcaaaacacctaacatacttgtagagttctgtaagattagaggagagaaaacagagcgagagaaatgttgcagggatttttccaaaagtgaaaatgtatcccagcatatatctttagtaatcacaaacttcaggcatgataactaaaatcaagttaacaaaaaataatacaggacaccaaagaccagtagaaaatctgaaaagtagctagaggtagaagatagagtatgttgataagaaytgcattctaaatacaacctgattttaacagaaaatatggaaggaggaattcaawggaatcatgtcttcagtgtgtttccaaagagtagtagaccttcataaacagaaattgaaaatgatatttttcagatataataaaaattactgaaaatacaaagttgaacatgcaaggagcaataaaaattaatgacgaaaaataagtgtgtaattctaaataaatgttgactgtataaaacaatattgtcttgttggattaaaygtataattgatamgatatatgcaaatagcaataaagagactggagataaaggtgacaggaataaatttagtcaaactgtgttttgggcttttctatgtctgtgaggagaatttgaatgtcataatcaaggacsctgtaattctacacccagctatatawatgcaaaggaattgtagcaaatgatatgtgaaagaatgctcattgtagaattattctaacagctcagaaaagaagctgcccatatgtacatcaaataaggatgaataaataattacaataaaatcataaaatgraaaaacatagagaagtgaaaagaaatgaatcacatgtacatgcagttatgtgattacatttcagatccataatgttgagcacaggaagccatgaatacgaacatataggattgtatctatacagagttccaagcagaccaaaccaagctattgagtttagggttgcatacctagttggtaaagtataaagaaaaattttaaaaaatgatcatcataaattatggacgttgcgtattacaggaggtgtgaagaaaggtgtagagggatggaaacacattgaggtaaacctaggctgttagcaacattccatgtcttgccctacctgatggttacatgagtgtttatgacatattgctatgttttccatttttgttttggctcatttctaagtgtgcagtctagttataatataaaaattattaatcagaagaaatgttccatgaaaattattattactctgctcattatataccaaagggaaaaatacactgtatacattcatgtacagctctamaagattttaattagaaaatttttgattttagttgtgactactgaaaatttgacaagatgtttcctgccaaccccagatttttcagtagatatttcttctagttttaattatctacttcatgtgacaaaacattgacattttccatctatttttcccttggatcctgaattcctgacacaacaggggtggacatgtttcccacacgcttggcttagcagaatacctatatcayttaagtttttctgcaagagaaaatcctccaaaactgcattagatatttgtgtctcatrtgtctttggatttcatttttgtcagctaggtttggtggatggctgtggtgattggagatgggccacattctgcatcttgaagctactttggctgatttaggctggataaagcagtggcattctgactccattagtttctcattcttcttctgggaacagtgtactcaccagatgatgttctcayggtgaatggaaaagagcaagaaactccaatatggaaaccgtcttaaatctctgtgtaaagtctactaatttsctgttcactgaagcaaattacatgagtgaattcagagtccaagttccaggtagtcaccctgcctgtggtgggaggatactgcaggattatatgacaaagtgtagcgtacttagaaatatttgcaaaattgctgactgttttaattaaataattaatatttaaacaaaaaacagacttgagaataaatttaccaaaggcctatgttgggcacaggcccccaaatctggccataaactggccccagtaaactggccataaataaaatctctgcagcactgtgacatgttcgtgatggccatgacacccatgctgaaggttgtgrgtttaccagaatgagagcaaggaacacctggcccacccagggcaggaaaccacttaagggtattcctgagccacaaacaatagcatgagcgatctgcaccttaaggacatattcctgctgcagataactcgccagacccatccctttgtttcggcccatcccattgtttcccctgaagaatactttcagttaatctataatctatagaaacaatgcttatcactggcttactgtcaataaatatgtgggtaaatctctgtttggggctctcagctctgaaggctgtgagacccctgatttcccactccacacactatatttctgtgtgtgtcttaattcctctggcgccacaggattagggtctccacaaccgagctggtcttggcaggcccaagcatgagaaacatgtttgataaatattattcattgtctgacaaccctgagtggaatatgactaattccacctagatgacctcctggggaaactcgttttccaattggggatttataagaaaataattcattgcatctgctaagtgtgtsagtgcatgtgtgtctatgtattgaggagcttattaacaatgatgtcatataaatgtattggttatcagaaaccagattttaaggtgtattggcctcccaggactttccaaaataatcttggatgatattgataaaaggtttagattctggtattaaacaaaccatattggtattatcctagttatgaccaagctccttaaacaatttaaacctgtactgtatgatatgtgtattgggttttaaaatttccctatgtaacaactgacgatgctgracacaaattatggagaggttagcaaggacaacaattgcaaaacaattwaaaaaatgcctttatttgcatactaacacatgagaatttacttttcacttcatcctcaatataaaatatttcagcatatagtaagacagacagtgtatgaagaggagtgaatttgagctgttttgagaataagaatattttctatttctataaagacagctttgaattcatccattagcatatgatggtgctttcctgttgaaattagtcatgaatttaaaggcagaaaatgttactrcacatttaaaagtcaagtgtttatcgacattaaggtctggatattaagggaatcacaaccagtgttattaaggctgcattttttctttcttttcatttgttcaaacatgatatgttttctgctcatcattttatcaattctggtagtgtttgcatttgttcttggaaatgttgccaatggcttcatagctctagtaggtgtccttgagtgggttaagacacaaaagatctcatcarctgaccaaatttctcactgctctggtggtgtccagarttggtttactctgggtcatattattacattggtatgcaactgtgtttaatttggcttcayatagattagaagtaagaatttttggttctaatgtctcagcaataaccaagcatttcagcatstgggtgttactagcctcagcatatttcatttgctcaagactgccaatttctccaaccttatttttctccacctaaagaaraggattaagaatgttggtttggtgatgctgttggggcccttggtatttttcatttgtaatcttgctctgataaccaygggtgagagtgtgtggacaaaagaatatgaaggaaatttgtcttggatgatcaaattgaggaatgcaatacagctttcaaacttgactgtaaccatgccagcaaacgtcacaccctgcactctgacactaatatcttttctgctgttaatctattctccatgtaaacatgtcaagaagatgcagctccatggcaaaggatctcaacatctcagcaccaaggtgcacataaaagctttgcaaactgtgatctccttccttatgttatttgccatttactttctgtgtctaatcacatcaacttggaatcctaggactcagcagagcaaacttgtattcctgctttaccaaactcttggattcatgtatcytttgttccactcattcatcctgactatgggaagtaggaagccaaaacagacctttctttcagctttgtgacaggtgaaatgctgagtgaaaggacagaaaccctcaactccatagattcacaaagggagcattgtgtatcttttagctgaaaacaaactgacggtatctggaacattttatatttccattcgtttttccttagtgtatatatttgaataatttcaaaacagatacctagaaaagtcatctatctatctatctatctatctatctatctatctatyayacacacacacacatatrtgtgtgtgggtatatgtgtgcatgtgtgtgaataacaacattgaccacaaattatgaagccgagtatatttcacatatatatgtaggtatattttatgatagttcatcctatggtatttcatgtgaagaatttattacctctatttataattaggaacttacagcttttatcaggaaatcattgttgttttccattgtaatttgtaccacatatatgtacttaactatcattgtttgaacctctaattttttggatggtaaaaacattcaattctaaattaatgatgagaatggatctttggggtaggttttatttcattatgaattcttattttatatttattataaagcaaatagaatggttgttagctaatgatgcacacaataaaatttgagtgacaaacatacatacataagtagagtaaattttgtatgtgtatrccaaaaactgttctaaaggatactggatttaatagtagtatgtgaatagattagaaaaaaatcatttctataataggaatgaagatacatgatcatgatactttcagtgctgttataattttttaatgtgtagttagaaaagttgtttcttccactttttgaattaaagaaaaccttttttttttgaaattgacatctgatgtcaagtatttccatttattttgcttagccacctcygagcccttgaatttccaattttccctttgtctcccattcttaatatttctcaaaaaaattcaattattccctctcttaaaataaactcaatgtaaacagggtatataaactatggatcacaattgaatgaaacattctgcaaatattgaaaattatctgtctaatctatatattgatgataggaaatgtattaatcatatgtttcaytgtgggtgggcagtgagctgaggctcctcaagcatctctttctatttttattttgtttcttgacataggttctccagcatttggctcaaggcyccaagggcacatgtgacaagaaggcgccrgctttttaaacattggaagttcttctgtgtcagttctgtgacagaacatttacttaacacatcatgaaggctagtttggatgtggaggggaatagactccatctatccatatgaggtgagycaaagcacttagacgtgttttcaaaccactaatcttgatgattcagaaatgtgctcccttttccaatttcatcctgatacaaatgtawcatctccggatgatgccaatattctccccaattccatcatgagctgttctctataattcagaatctgtagactaagttgtaaaactaatgactgtcaatgtattctacatgaaatagtgggccaaagaaagagggaaacatgataagtagaaaaatatacatacaacatttttttcttacactaaagatcaaataaaacccataggaccaagcctcccacagatactttttataaattctggataaaatatttwaaaaaacagccattcattggcaatggagaatgaacaaaataggcagatactagagagaggtcagcacttggaagaagggaatagcaaggagtgagtttcctgattttatagctggccctagtgtgcaccaggcagaggactaaaacgtcagaagaaaactgtagacttactgggttgaagtaacagaggactgagtttggcataacacgagcagcaggagrtcaggagaaaatctgagaaaggagaaggccagaaaaggggagccccaacttctgaatataaactatccaaagctttgtctggtccctataccatgcatgtatagggcagacttcatgtagcccagctaaaataattaaattgagatttcagttatcatcaagcacagtgaagacagagatagcaacaaaacatattactttaggcaaagatactctattcttgaaaacctaaactacattccattacctttcataacagtcatattccttgtccattctggtttctaccttggttctaactcctacttttattaattacactaatcaaagtaattctctttcaaggagaaaactggaagttatgtaattgargactattaaaaataactattttggcagatgtgcaaaattctcaagcrcatatattacaactttctatagtcatatacatcctttttacacttgcttgaattggtctacaaaacccccatgtttcatagtgtaatccaaacaaatagccactccataaaatataagaataaaagttatatttatttattatataactttgattggtgaccacatttcagtattccaacttaactagaaattatcygaagattttcatcaactcactgaatttaatattagtctaaggtcttaaattgcaccaggaatcttggaaattaaatttaagctgataggctagagaaaataattactgtcaatatgtggagtttttcataatttgtattcagtttatttgaaagcataattttacattttttggtattttaacattatgtggacatattaatttaccttatcagtaaacagatataggaagtttaggaatttctttttttaaaatgtatttttaagtttcrtggatacatactaggtgcatacatttattgggtacatgagatgtgttgatacaggcatgcaatgtcacataatgaagaatggggtagccatcccctcaaacatttactcttttttgttacaaacaattcagttatactctttcagtcattttaaaatgtacaactgaattatcattgattatagtcaccctgctgtgctatcaaatagtaggtcttattaattctttctatttttttttttttttggtaaccattaacmagccactccttccctttagcctccactacctttcccagcctttgtttagcatccatgtactctctatgtccatgccttctgtgcaaacattgcagttgtttctgatgtattcaacttaacataataatctccaattctatccatatattgctgcaaatgacaggatctcattttttaatggctcaattgtactccattgtgtatatgtaccatattatctttatctattaatctgttgctggacactcaggttgcttccaaatcatggctattgtgaacagtgctacaacaaacatgggagtgtagatacctgtttgatacacttatttcctttcttttgggtatatacacaccagtgagattggtggaacatatggtagctctaatttttgtcttttaagaaaactttcaatggttttccatagtggttttactaatttatattcccacctgaggtgtagaatggttcccgtttctccacatcttcaccagcacttgttacatgccttttggatataagctgttttaacggggttgagatgatatctatctcattttagttttggtttgcatttctctgatggtcaatgatgttgagcaccttttcaccttttcatatgtgtgtttgacatttgtatatcttcttttgagaaatgcatattcaaatctttcacccattgtttgatcagattgttagattttttttttcctatacagttgttaaagctccttttatattctggttattaatcccttgtgagatgagtagtttgcaaatattttctcccattctgtgggttgtctctttactttgttgattgtamcctttgctgtgcagaagtattttttaacttgatgtcatcccaattgtgcatttttgacttggttccctgtgcttgtggggtattactactcaagaaatttttgctcaaaccaatgtcctggggagtttctctgaagttttcttatgggagcttcatggtttgaggtcttaaagatacatctttaatccattttgatttgatatttgtatagatatatgggactagtttcattcttctgcatagggatattcagttgtcccagcaccatttattgaagagactgtctttttccagtgtacgttcttggcatctttttcaaaaatgagttcacygtaggtgtgtggatttgtttccaagttgtctattctattccgttggtctatgtgtctgtcttaatgccagtaacatgctgttttggttactacagcctctgtagtataatatgaagtcaggtaacatgattcctccacttttgttcttttttcttaggatactyttggctattctgggtcagttgtggctccatataaattttaggattgttttctctatgtctgtgaagaatgtttttagtattttgataggaattacattgaatctgtagattctttgggtagtatggccattttaacaatgttgatacttctaatccatggacatggaccatcttttcttttgttgggtgtccttttcaatttcttgcattagtgttttatagttttcattatagagatctttcatctctttggttgagttaatcttcagctatttaattttatgtgtggcttttgtgagtgggattaattttttgattttgttttcagattgttcactattgacatatagaaatactactaattttttatgttaattgtgtatactgcaaatttattgagtttgtttatcaattctaatagttttttggtacagtcttcaggttttataaatataagatcatattgtttgaaaacagggrtaatttggcttattcttttcctatgtggatgctctttatttatttttcttgcatgattgctctagctagagcttctactattatgttgaatagcagcagtgattgtgagcatttttggmatgttccagatcttagaggaaagtcttttagtttttcccaattcagtatgatactagttgtgggtctttctatatgatttttattatgtttagattttccttctatattcagatttctgagggtttttatcatgaaggaatattgaattttatcaaatgctttttcagcattaatttaaatgatcatatggttcttgtcctacattctgttgatatgatgtattacattgattgattttgatttgtgtatgttgaaccacccttgcatctcagggataaatcccacttggccatgaggaattatctttttaatgtattatttaatttgattcgctagtatattgttgagactttagcatcaatgttcatcagggatatttayttgtagttttcctttttcaatgtgtctttgtctggttttggtatcagggtaataagattttcaagaataagcctgggccgggcctggtggctcacgcctgtaatcccagcactttgggaggctgagttcggtggatcacgaggtcaggagatcaagaccatcctggctaacacagtgaaaccccgtctctactaaaaatacaaaaatttagccgggcgtggtggtgggcgcctgtagtcccagctactcgggaggctgaggcaggagaatggcgtgaaccygggaggtggcgcttgcagtgagtggagagcatgccactgaactccagcctgggtgacagagtgagactctgcctcaaaaaaaaaaaaaaaaaaaaaaaagaatgagcctggaagtagtccctctttctctattttttcagaagagtttgagtaggattgrcatcagttctttaaatgtttggtagaattcagatctaaagccgtctgctcccaggcttttttttttttttttttttaaactgggagacattttattgcagaatttatctcattacctgtttttggtcttatcaggttttgggcttctttatggttcgatctttgtaggttgtatgtgtctaggaatt

SEQ ID NO: 9969 - DNA, 12930 bp, Homo sapiens
tgtttgtgcatatataattctactttgactgctatagtaaaatgatccagatttagtcaccatagctaagaaggggaaaaagcatttgcaagaatttggcttgctaatgatgctattaaaagataaactaaagttgatatactgtattattgcatagactatttgtccatgttwgtrttcaaaaatgccaaaaaaaawcccaaaatagaatcctaattgttggaggtcgtgtttcttatcgaattttaaaatgtagtaaaagaaaaaaaagcaaataaatcgttgaaaatatgttggttttacattattcttgatgaaataccatgtgagggtacttgtctaggcctaatgctgagaatcatagaagaatcrtgaggccatgaggaagaatartagtgttctctcatcacgctgagctccagtacttagaaacaagcctgaaatcacactgatcaaatagcattctccctttcacctgccatcatcattatcatcatcgtctatatcttcatctatmtcatgaagtggtttgtttttgaaatatttaaatacataatttggaaaataagtaattttaaaaagatcatcattgtgggaaagttacaatagtaaacagcaaagttcaagtcaagctccaatacatttagatttagaaattaagtgtagtttattttacaatacattgcttatgcaaataattatttatggatgaccttcaatgaatcctcctttcactatgatcatgatagaaacaattyagattttcgtgtaaataaaattccttaataagaaagataaagcgartaacacattttttgagcacgcttttatttctaaagagcggattttaggaccaaactgtcaaacagaggtaagaccccagatcttctgtcacacttgagtgagtgatgatggagttagaaggttgtagttctataaccaaaactatattcatggataggattaaatggtggaattccatagaagcaccagattcagttttgtttccatgggacttaaagtctacttatgtcagatgtccttcattttttgataaactcgtaagtactgttttactatttgatctttcaatgattgttataaactaagaagttttgatttctgctaattaaaacagcatagggcgggcgcggtggctcacgcctgtaatcccagcacttcgggaggccgaggtgggtggatcacgaggtcaggagatggagaccatcctggcgaacacagtaaaaccctgtctctactaaaaatacaaaaaattagccaggcgtkgtggcrggctcctgtagtcccagctactccggaggctgaggcaggagaatggcgtgaacccgggggacagagyttgcagtgagccgagatcgcgccactgcactccagcctgggagacagcgacactccgtctcaaaaaacaaaacaaaacaaagcaaaaacagcgtaaaatttaaatcatggaatagagtggtggagctgtggttgagatgctctatttaattaattttaatgacattttgagatccagtgctgctcattgaatttgcctgtgaaaagagtttgtggtgatgacccagcaacagataagatactatccaaaaaaagctactgacatcaaatcaatttccagtttcttctaagttgcaggagaatgcctagatcttgcttttattctcttctttgaccaaagtattacaaaaagaaaaatatggttaccattttcatgtcaggtatactaaaagtttaaaaaaactctttttttaataacttggttttaggamtacytggtttagtttctccgttagaaaaatgatttatataaggagaacaaaagttcatttctacttctaaaacaataagacaaaaacaaaaagagtaatcaattttgagaatccaatagagttaaaaaccagttaaacataagaaagaattagtgaatttgaagataactacccagaatgaagataaagagacgaatagatagaaaatataaggctagagggtcagagacagtgaagctacaatcagaacaactaacatacttctgcagttcccgaaaattagaagagarcaaatggggcagaagcaatgtggagatttttccaaaagtgataaagtatatcagttcatatatttttagaaactatcagacttcagacacgataactaaaaccaaattaacataaaatgacaggacatcaaagaccaatagaaaacctgaaaagtaactagaggaaaagatagattatgttaaagggaataactgtctaaacgacaagctgattttcaacagacaaaaataaagctagagttcaatggattcatgtcttcagtgtatttcaaaagtagaatagatcttgataaacagaaacttaaaatacatcttttcagatagaagaaaaattattattaatattattattattatttttgttggtagagttggagtctcactctgttatccaggctggagttcagtggtaggatcatggcttactgcagtctggaactcctgggctcaaaccatcctcccacctcagccttgtgagtagcttcactatgcctgactaactttttcattcattgtagaggcagttttactgtgttgcacaggctggtcttgaactcctgggtgctcctgccccagccttacaaaatgttgggattatgggtgtgagctaccctgcctggccaataaakggtcttwttgaaaatattaagttgaatatgcaagaaggaatacaaattaatgaaagtggtaaatatgtgcataattctaaatgaatgtttagaaaataataatgtcttgttggggtaattatacaattgataagacatatgcaaatggcaaaaaatagaatggaggtaaaggtgacaggagtaagtttagttaaattattttctgaacttttctatgtctatgaggagattttgaacaatgataatataattctactcataggtatatatgcaaaggaattgtatcaaatgatatatgaaagaatgttctagtagaattattcataactgttcaaaaaagaaactggccaaatacatattaaggttggatgaatcattacagtaattccatgcaatggaacaatatagagaagtgaaaaaaaatcacatgtgcttgcaactatgtgactaaatttcagaaacataatgttgagttcaggaagccacaaacaagaggaacatgtaggattgcacctatacagcgttcaaagtaggctagaccaagcgatggagtttagggttgcatacctagttggtaaagtatgaagaaaattgaggaaataaccattataaattatggatattgcttatatcaggagatgcgaagaagggtttagggacttggaaagtggaatggaggtggacctagsctgttttmggtgttccttgtcttgccctgcatcatggttacttgagtgtttatgatacactgtggtatttcccatttttgtattggttcatttctaagtgcgcattataactttaatatacaaatttgtaattaggagaaatatctcatagaaattattattactcgtctcattatatactgaaggggaaatatcaattatttgtatacattcctatacaactctaagatagttgaaataggaactttcttatttagttgcaacatgaggaaatttgagatgatgttatctgccacccccagatctttccaaaggatttcttctagccttaattatcgacctcacaggacaaacctttgccattccccatctattttttctttcggctcctgaattcctgacacaacaaggttgtacatatttcccacactcttggtttaagagttcttttatcagttatgtttctctgcaggagaagacccttcaaaactacattagatatttatatctcacatgtcgtttgatgttggttttttgttttgttttgttttgttttgttttgttttgttttttgacagagtcttgctgtgtcgcccaggctggagtgcagtggcataatctcagttcactgcaacctccgcctcycgggttcatgccattctcctgcctcagcctcccgagtagctgggaatacaggtgcacaccaccatgccctgctaatttttgtatttttrgtagagatggggtttcaccatgttggccaggatggtctccatctcttgacctcgtaatctgccttcctcaacctcgcctgcgctgggcctggattttatttttctaagctgggtttggtggatggctgtggtgatttgagatgggccaaattctrcatcttggaggacgttagagttttgccaatttaatctggatcakgtggcagcaatctcacgtcwttagtttctcattcttcttctgggaacagtgtactagataggccatactcttatggtaaatggaaagaagaagaatccccagtatggaagccatctcaaatctctatgcaaactgtagtaattttctgtttatcaaagtaagtgaaatgattgaactccaagttcaggggcaaggtagtcagtcttcctgtgataggatactgcaggattatatatcaaagggtctggtactgaggaattcttataaaattgctaaatattttttataataatatttaaacattagacttgagagaaactttaccaagtcctaagaattagagataatgtttttgataaataaatatkattcatgggctgaaaaccctgagtgggaaaataggactaatttcatctgcacagcctcttggaaactcattttttattttggaaattacaagaaaataatttgttccattcataagtggtgtgcacatgtgtatatttgtgtgcatatttatgagtttgtgaataaygaagttatacgaaagtgttagcagcaaccagatcttatggagtagtggcctgcctgtggttctcaagaaaatctgagatgcctttgataaaagcagttaggattctgtgtatttaaatctgtgatttaaaaaagtccgcattggtgatgatcttagttatgaccaagctccctttgagaatttagatatttactatatgatatatatattgagttacaaaacttccctaacaactgaagtcactaaagataaatgatggagaggttacacaaggaaaaattgcaaacactgaaagtgaatatgtccctatttgcrtactagcaaatgaggattcaggtttcacgtcaatttcagtgtgaataattccagcctataacaagaacagacagtgaatgaatgagttaatttgagttgtttgaaaataagaatgttttccataaagagatcattgaactcatcagttaacatgccatggttatttctggcttgacactggtcacaacrattaaaagtaaaaagaatgtcacagcacattcacaaatcaggtgcatatagaatttaaggycaggatattcaagcaatcacacccagttatattacattgagagatgaagcgagctatactttctgaatcgagtggggacttggagaacgtttctgtagctagcaaggggattgtaaaatgcaccaaacagtgcactgtaaaaccacagcaatcagcgctctgtagctagcaagaggattgtaaaatgcaccaatcgctctaaaatacaccaagcaacaggatcctaaaagtagccaatggcagggaggattgaaaaaagggcactctgataggacaaaaaaaggaaaatgggaggggacaaataagggaataaaagctcatggcttcagccagcagcagcaacctgcctgggtcgccttcctcycggtggaagctttgtcctttctctcttctcaataaaccttgctgttgctcactctttgggtccatgccatctttaagagcagcaacactcaccgtgaaggtcggtggctccatttttgaagtcagggagaccacgaacccacctgcaggaaccaactccggacacaacaccagcattaaaacaatttttttttgtctgttcagacatgacaacttttatacccatcattttttccagtgtggtagtggttctatttgttattggaaattttgctaatggcttcatagcattggtaaattccattgagygggtcaagagacaaaagatctcttttgctgaccagattctcactgctctggcggtctccagagttggtttgctctgggtattattattaaattggtattcaactgtgtttaatccagctttttatagtgtagaagtaagaactactgcttataatgtctgggcagtaaccggccatttcagcaactggcttgctactagcctcagcatattttatttgctcaagattgccaatttctccaaccttatttttcttcacttaaagaggagagttaagagtgtcattctggtgatgctgttggggcctttactatttttggcytgtcaactttttgtgataaacatgaaagagattgtacggacaaaagaatatgaaggaaacwtgacttggaagatcaaattgaggagtgcagtgtacctttcagatgcgactgtaaccacgctaggaaacttagtgcccttcactctgaccctgctatgttttttgctgttaatctgttctctgtgtaaacatctcaagaagatgcagctccatggtaaaggatctsaagatcccagcaccaaggtccacataaaagytttgcaaactgtgatctttttcctcttgttatgtgccrtttactttctgtccataatgatatcagtttggagttttgggagtctggaaaacaaacctgtcttcatgttctgcaaagctattagattcagctatccttcaatccaccsattcatcctgatttggggaaacaagaagctaaagcagacttttctttcagttttgcggcaagtgaggtactgggtgaaaggagagaagccttcrtctccatagattcatgagaggggcattgtgtgtcttctagcagaaaacaaactggtggtgtatgaaacattttatatttcttactggtttttctatactgtatgtgtatgaataatttcccaacgtatacctagaaaagyctttgacctaatattagtctagaaaaaaawatatatatatgtgtgtgtgtgtttatgtgtgtatgaaaacttaagaacattgacaataacatgctcttttctgtttttttcatacaaactgccaaattatacaaaatatgacaaaaatttcttagaattttgaagccatgtatatttcattcatgtattttatatttcatttgtagaatttatgatgtctatttataattattaagaagtarcagyttatcccaggataaatattgctcttttctattgttatttgaaccacaggaatacaccacattgtgcttagaattcattgcttgaacctcgaatttattggatggtaaagtcattcaattctaaatcaataatgaggatgtatctttggtgttttattccattatgaatttctattttatgtttagtaaaaagcaatgagaattattgttagaaaagaatgcacacagtagaatttgagtgagaagcatatgcagagtaaatttaatgtatgtctaccataagcggtactgaggaatattagatttcatatgtgaatagcttaggaaaaaatcccttctctaataaagggatgaaatatcatgatcatgatctggattggtatcatcagttatgcatatgcagttagaaacgtcatttcttccgcttttgaattaaagaaaagctgtttttgaagttgagatctcatgcaaattattttagtattctttctaaagcacttttaagcccctgaattgctaattatatccttaccttccatttatgaaattccttctaaacttcagataagagaactcaaatcctctctttttgaaaaataaaatcaatgtaaatatartatakaaattgtggaaaatatttcagtcaaactttttgtaaatgttaaaawagtatctatgaaatctgtgtattaattatgagatgagccttaacgttgtaattttgtcatcaatgatgaaatgaaagggtgttgacatattctttaataggaagttctattataagaaagaaatgtacagtcytgttcacagctaaattctacttgactgtattaattcttggtgttatgaaatttaaacaatgtgatttaaaccttaagatgaatcatccccccacctgatttgtgtatttttttaatcatatatcttcctcagtacaatgtaaggactgtaaaaaaagagataatgtctgtcttgctttctgttgactcccaggaactcgaaaccagcaccaagaatagatkrysaaaaatratactttaatgaacaaataaatrggtggctaaaatggrtaagytgatgtggtwaaccagtgaaaaggaaactcacacaaaatctgcagttgcatgaattmccctgttccrgtctcaggttaagattacaggcttatccaagcagaatccttctcctaaggaaaagtttggctattccacaattttaggggaaatatgacaataatatagtcttgatgcagctgtatcaggtgtctgagttggagacaaggtagaacaccaaaattagatggcacctattataatrgtttgaaaaatcatataaacaactttggtctatttgaatatgtatttttttctattgtcaattatttgtattatgatattttctagttgattatttaaacaaaaatgacatttcatttcaaaaaattgagttagtaaccagctactttaccaaaatgtttttaatgtaatacctgttattgaagtgctaccatttatttagaagtcaagttcaagacaaaaatggcaaggacgtgtggaaattgagaccggaacaaatgtgaaacaatgtgtggtgatgtctggtatgaccctgatggcagccacttcacagtgaggtgagagagacagcatgatggtcatcagatgcatgtacttggcttccagcacttttccagaagggctacaaggggaaaccacagctggcattagtccatggaagagagagaggagggagaatgtatctgctcatctgtcattagtcttctatttcctattggtcagggtttccttgaggcagaactatcatctctgctgttctgtcttacatcatccagtcccttggtggtggtcatgaaagtcagacctcatgcccacagtgtggtgatgcattcaagtcccaaatagaaggatgayctggatcaggcaaggtrctrgccaggggaatwggacatagtgaagagaatctragaaagcacatgtttgtgtccagtaccrccactccttgtgccactgaggcgtgctcataccctccagtcatggctggctttatgagcatatgacgtccacagttgcatagggttttgtgcttatagggacttgtgyttagagggactctatgcttggattaatrttctgcacttgctrttttgtttktcasacagaggatacttstctgctgaagagagaatgktcttrcactaattccatagggatttgctctccystctccaacaggcttgtcagagacatgcacagagtcctataatgaccactaygtatgttctagcatctttgaatcctgctggatcatctggcwcagtggccagagcagcttggagcagagtctatatcttctgtagagccctcatttgttctggattccacttgagaccagcagcctgggaaacttcrttaatgagtcagagcaatattctcaaatgtggaatatgttgtctccaaaatcccaataggcccccaaaacattgtgtctcttttgtagtgataggaaatttatagagagagcaacatgccatatactgtaaaaaagattgtttcaacgtgtggtctagggacactgaatgctttaaaacatcacctatgctgtaggtccctgaatsttctcaggttgrtttcttttcttctggtattttacttccattcatcgttagagtattttactatagttaagaaacttgccacttcctgattattgtaccaagtaatatattattattattattgctattattttgagacagggtctcattctgtccctgaggctggagttcagtggcaggatcacagctcattacagcctcaaccttctgggctcaagtrattcycccacctcygcattgctagcagctgggactgcaggggcacaacatcacgcctggctaatttttgtattttctgtagggctaggatttcacagtgttacccaggctggtctcaaaatcctgggctcaaatgatcttcccgtgtcggcctcctaaaatgatgggattacagtcatgtgccacagggcctggtctgtaatattattaatatattaaataatcacgatgttttaaaaaatgtaaattaaacagaagtgacatagccgtgatataaaacagtgacacagtgttattattatgatacaaggcaaattgttttgatttttcctcataatggktgtagattaagaaccattcagcaaatcacaagcccagtaaaaagtaccagaagctctgctctgcttagtgaagacagcacatcctggaaagcatttgtgagtgttgatttaagtttctggtagtctgyattcattctataacccgtctggttttgatagagkccagataggtttagtgaatcggcttatagaaaggactaccatcccctgtaactttcaagtgttttgtcacggcactgaccagttccattccttagggaatgcggttattatattttatatattttgttgccagtagaggagaatttcagaggcttccctttggtcctgctataataatgtcctttactctacagttcacgaagaatgtgagtcctgccggctgccatacatatctatttcaattatactttcaggaagaggtagtaactacaaactgattagctccaccttggaatggasatgagccgaagctctaggtagtatctgaccttcaaaaactccccctgcaggctggatgtgatggctcatgcctgcagtcctagcactttgggaggcgaaggtgggaggatcccttgagagcaggagttcccttcacaacatgtggaaactccgtctgtacaaaaaatttaaaaaattagctggtgtgttggtgcatgcctatagttccaaatacttgggaagctgaggcaggaggattgcttgagcgcaggagttccaggctgcagtggactatgatcctgccactgtactccagcttgggtaacagagggagactgtgtctcagaagaagaaaaaaaaacaagtataagttctcaccggtatcttaaacatcaagtaaaacagtatcgagtaaaacaaaaaactaaaaactccaaaagtcaaaaacacttttaaaaagaacatggtgttaagagtagtttgttcagtttccccatagaaaatgatttatggaaggagaataaaagattattctgaacactaaaacaataagactgaaaaaatgaattatcaatattgagaatccaatagacagagttaaccagttggatacagtacaagagagaataagtgaattggaagatagctacacagaatgaagcatagaagggaagagatggaaatacacagagctagagggtaacacattgatgctacagacagaacacctaacatacttctggagttctgtaagattagaggagagaaaatagagcaagagaaatgttgcaaggatttttccaaaaggtataaaatgtatccctgaatatatttttagtaatctcaaacttcaggcatgataactaaaaccaaattaacataaaataatacaggacrcaaaagaccaatagaaaatctgaaaagtagctagaggtagaagatagagyatgttgaaaagaactgtattctaaatacaacctgattttaacagaaaacatggaagcaggaattcaatggattaatgggaatcatgtcttcaatgtgtttccaaagagtagtagaccttcataaacagaaattgaaaatgatatttttcagataaaataaaattactgaaaatacaaagttgaacacgcaaggagcattacaaattaatgacaatccatgctggctaacacggtgaaaccccgtctctactaaaaataaaaaawaattagcctggcstggtggcgggcacctgcagtcccagctactccggaggctgaggcaggagaatggctaaacccggaagrcggagctttcagtgagcagagatcgtgccactgcactccagcctgggtgacagggagactatgtctcaaaaaaaaaaaaaaaaattaatgacaatgaaaactaagtgtgtaattctaaataaatkttgactatataaaacaatagtgtcttcktggattgaatgtataattgataagatatatgcaaatagcaataaagaggctggagataaaggtaacaggaataaatttagtcaaactgtgttttgggcttttctatgtctgtgagaagaatttgaacatcataatcaaggaccctgtaattctacamccagatatatatacacagaggaattgtagcaaatgatatgtgaaagaatgttcattgtagcattattcataaaagctcaaaaaataagctgtccaaatatatatcaaataaggatggataaataattacagtaaaatcaaaaaatgaaaaaaatatagagaagtgaaaagawatggatcacatgtacatgcaatgatggggttaaattttggatacaaaatgttgattccaggaagccatgaataagaacatataggattgcacctatacatagatcaaatcaggccaaaccaagctattgagtttagggtcgaataccttattggtaaagtataaagaatattaaaaaaagaccatcataaattagggatgttgcttatcacagg

SEQ ID NO: 9970 - DNA, 49183 bp, Homo sapiens
atatagtcctcctcattctcaggttggggctctgcatcaccaaagggaaagaatggtgctgagccacagacacgggaggccaggatgggaaatagtgctcacctaggattctcctactgcccacgctgtggcctgtgccagaaggaatgtttcacagataatgagccattggccaataagagcctgaagactgtctaagattcctgcccctccacacctgtgggcgtttctcgtcgggtggaatgagagacttgagaaaagaaagagacacagagaaaaagtatagagaaagaaaagtgggcccaggggaccagcgctcagcatayggaggacccgcaccagcaccagtctctgagttcccttagtatttattgatcattatcaggtgtttctcagagagggggatgtggcaggacaatagggtaatagtggagacagggccagcaggaaaacatgcgaacaaatgtctctgcatcataaacaaggtaaagcaaaaagtgctgtgcttttgaggtgcatatacataaacatctcaatgccttaaagagcagtattgcctccagcatgtctcacctccagccctaaggtggttttctcctatctcagtagatggaatatacaatcagcttttacaccgagacattccattgcccagggacgagcaggagacagatgyttttctcttatctcaactgcaaagaggccttcctcttttactaatcctcctcagcacagaccctttacaggtgtcacgctgggggacggtcaggtctttcccttcccgcaaggccatatttcagactgtcacatggggagaaaccttggacaatacctggctttcctaggcagaggtccctgtgggcttccgcagtrtattgtgtctctgggtacttgagagtagggagtggtgacgactttcaacaagcatgctgccttcaagcatttgtttaacaaagcacatcctgcacagcccttaatccatttaaccttgagttgacacagcacgtgtttcagcgagcacagggttgggggtagggttacagataacagcatctcaaggcagaagaatttttcttagtacagaacaaaatggagtctcttatgtctacttctttctacatagacacagtaacagtctgatctctctttcttttccccacacttggtataatgcaagtggtatggtgaatggatagagcacagactctggagtcagataatccagggtttgaatccaactcttgcattttttttggctctgagccattgagcaagttatttagcagcactatacttcaatttgtaaaatggggataactactcctgcttcttactgctaccaagatcaatgaagtaacactgtggaaaccccaggcatccagggagttcaatagcaagatttccttcctccttattctcttgagtattcatggtgatactcaccaggaaaaaggaaagagctctgatcagtgtcaggattcccaagtttggtccagatcctgccttacaaacaccaccagctcctttgcagggctgttaggaggatcaaataaggctgtgaatgtgaaggcttttgaaaatggctttgtaactacaaggcactatcacctgtatatcttctgttgttggtctgttgacatctgctcttaatagctcaaggaagcagctcagtatactaaatgtactaactgcaaatctctggttagtcacattgcccctcaggtcctgtattagtttcctgtggctgctgtaaaaaattatcacaagcctgatgacttaaaacaacagaaattcattctcccaccgttctgtaggcacaaggtctaaaattaacatattggcargacctgctccttctgaaagctcaaggggagaatctttctctgcctcttccagcgtctggtggtctctggtgttcgttgaattgtggctgcatagctctagtctctgctttgtcttttcacatggccatcttctttgtgtctctgtgtgtcctttttctatttcttagaaagatgcactactctcattggatttggggatcactctgattcacccagtataatctcatctcaattcttaccttaattacatctgaaagatcctgattccaaataagtccacattctgacgttccaggtgaagaagaatttgggggcagagaggactctatatagaatccactctagaacctcagaaccttcatctaaaccatttctgaccctcattcaatgtatgtttttatttagttctagattgcaccaaacaggaaaactcttcatatagtgcctagcattagctcagttatctgtgtagaggggatccaggagatcagagtggagaggcctcatagcgagkctagagaaggtctaattctggaaatgagaggaagggcaaagtaaacaagagaataagtgtctgtctttgagagaggaaggtttgacatgaatagacagcatgcattccaggagccgtgcagcttgaggagagaacaccagtcttgaaatcagacctggatcattggtttcccatttttacaggatgccaatattctcacatcatttagttatttcaactgatattttatgaatacgtagacagtatgccattcactccaccatttggattctcagttattgtaacagtggtgtgttggtaaatggttaagagccagatctctgaaaaataatatatgcatatatgtaaatgagcttgttataaattttgcttatacgaagaatgtgtaacacgcaatttataaaataaaatttattgtattttaataaaatgtacaatcctctttattgtaaattccatatagccacagatctcacaggctgtttgctttcatattggcttaattcatatccacagccaaactgtgtttacaagtgacaaaggaatgtagttccaacatgaatgttggttaatgtcttttytgaagttaaagaaatgtgaaacaacaaaaacatatgttggaacatcacttgctcatcagtgacactagtgactttttgctgaatcagatgatagtttttgaatactggaaaaatgtttcctcaattttttatgctaatcctaatgtaagggccatagtcatggcacatgtttaagtttactctgcatcattatgttttctctattactttcttacatttagacaatcaacaaaacagtaaagttctgatttatattgcttgctgatttccatggcataaactctcaccatggccagtttcaagctcccaacactatgccattgaatgcagagtggggaagagaggtccagaagcaccaatgttccagtatttaatttccactgtagacacataagagatgtcaattacctcaagaacatagatatcagtaatgtcataaaataattaagaaacaatgagctttgagattttattccctctatttaatataatttatttagttgtgaagttttttttaaaggcagggttttgctctgttgcccaggctggagtgcagcggctatttacaggtgtattagtccactctcacactgctataaagatactacccaagactgggtaatttataaaggaaaaaggtttaatcgacttgcagttccacatggctaaggaggccccaggaaacttacaatcatggtggaaggcaaaggagaagcaaggaccttcttcacatcacagtaggagagagaagagcagccaagagcagaaaatactgccttataaaaccatccaatcttgtgagaactcactcactgtcttaagaccggcatggaggggaaactgcccccatgatccaatcacctcccaccttgtccctttctcaacacttggggattatggggattacaattcgagataaaatttgggtggggacacagcggcaaaccacaccaacaggcatgatcatgatagtccgttttcacactgctataaagatactacagcctcaaactcttgggctcaaggggtcctcatgcttcagcctctcaagtacctgggactacaggcatgtaccaccatgcccagcttaactgtaagtttatataatttaatttaattttatatgtttaataatggccatgttcatcaagcacctcacaagattcctgaaaatctattttttatttttattaaaaaaaattgtttgtagacatgaggtctcactctatcgcccagactattttcaaactcttggcctcaaaaattctcccacctaggcctccacaaatggtggggttacaggcgtgccactgtgcccatccagattcctgaaaatttaacaattttatgagttggtacatgctgactcgagcacacaccactgggaatagttgtgaggaggacagttgagtgctggggaaaggaaggaagaaaacagtgaggataaagttcacatatctcaccagcttttattacctgatccccatggggaggcccatcagagagtgcctatgacctgttacaatggactctaaaaacacttccctactctttcaagtctccctgtgagcattggttacacttccagtatcccattcttatagtttaactcatgaaaaagggcgggatcctccttctgccaatactagttccttctcctcaatgaaaagttagacacaaactccaaaataaaggcaactcccagaatacaacacagccccaattaaattaaaatggcttttatccaaaagacaggtaataacaaatgctgacaaggatgtggagaaaaagtacccttgtacrctgttgttgggaatataagttagtacaaccactgtggagaatggtttgaaggttcctcaaaaaactaaaaatagagctaccatatgatccacaatctcactggtaggtatacacctaaaagaaaagaaatcagtatattgaagagatatctgtactcccatgtttattacagcactattcacaatagccaaggttggaagcgacctaagcgtctatcaccgatgagtggataaagaaaatgtggtacatatacacaatgaagtactattcagctaaaaaagaattagatccwgtcattcacaatgacatggatggaattgaagatcattatgttacgtgaaataagccaggcacagacagacaaactttgyacgttctcacttgcttgtgagaggtaaaaattaaaacaattgaacttgtgggcatagagagtagaaggatggttaccagaggctgaagggtagtgggggttggggaagaagtggggatggttaatgggtacaaaaaaatagaaagaatgaataagaactagtatttgataatacaacagtgtgactatagtcaataataatttaattgcacatttaaaaataaaaatataattgcactgtttgtaacacaaaggataaatatttgaggtgatggatatcccatttaccctgtgtgattattacatattgcatgcctctatcaacatatctcatataccccatacaaatatatgcataccccatacatatatatatacataymcacacacacacacacacacacacacacacacacacacatatatgtatatctactatgtacccacagacgttaaaaattagaggagaaaacacacacacaacaaggagactgagctggaaggatggagctctgggatagatttgtcctacatccctgcctgggagggaatccacacacatgcaagaagacaaactaggagcatgggctactaaattataccacattgcactcatcggggtcacagggtttcttccaagtgacccgcacatgcccttcccatctctgtgtgacagtggcacctgcaccagactgcatgttgaggtgtcatctgaaattatgaaataaaacagaagtaagaggtctattagctcatcaaaatgcagttatctaagttcagctgtgaactgccaaatttgaggagtgatccaatgaaacatcttttctttgcaatccaagaagwcttaccggagagaactgctcagagaatctgcaacatccggttcctggagacagctaaggaaagaagctggggcrcatgtttctgcccaaagccgggttttggmcgaggtgactacacaccccctttcctggctcccataggctaagtgcytggcttcttgagaagcctgcttcttgagaacaaaaaagtgatttaaagcctcatgggagatgagcaatcctcaagacacaagcagaaaaagtcccagtgatacaggaagcgggttcaggaacctgctggttcctgatacataaatcagacagcctctgctgcatgacacgaagcttgcttctgcctggcatctgtgagcagctgccmggctcyggccaggatcccttccttctcctcaktggctgatggatcccaaggggctcctctccttgaccttmgtgctgtttctctycctggcttttggggcaagctacggaacaggtgagtgttcatctgcctgatggtttgagtcccatgttagctgccaggaatcagcgtatcttcgtggatggagagaaggtgcagggctgggtattgtgtttggtcactcttccttagggactggctgtcagtttcaactgcctctttcaaagaggaaggaacattataagttcctgggcccttgggtttccaagactcagccccaccaaccccagtttccaaggaaatgaggggctctaagccaaaggctccagtcacttttctgaccagtcttagggtgacaggccctggtagaagtcttgcttgagtggttggttttacatgggcatcttctggcaaagacccagcctagagagactgagctggatggactgagctctgggagaagatttgccctacatccctgccctgggagggaatctgtgcacatgcaggctgacaaaccaggagcatgggtcaacagaaagcattggctagagtgggaagagagagtagaagtgaaaactccaggcttttggctgagaaccagcagtggccacagtgcggtcatactggtgtgtattttcttggaagagaaggtccaagaaagcaagagggaagaagttgggatttctgaaggctagggctggttacagtatgtgggaaatgcaaattgggaaccctcagagagtagctccagcaggaaggccagacaagagctacctttggatctggactctgttcctgtctttctgtctatcttcttcccaaggcaggctattgctttctgtttagaagtatcagggctatgagaaaaggtatttgagaaagaaaaagccaagcaagaagtggactttggactgcctgtgtgagtggggtgagaatctccttctgcttatttgtttagactgtgggaggtagcctggagtagaagaggtggcattacggacacggggggaaatcctgaggcccagggtgttttaagcttggggttttcaagaccrcaaatccaatatggacttttccaggaaaagcaccgtgatatgccagggatgtgggggtgctgcacaatggatgtgtcttttaccagacagccagacgaacagggcttgctcagcccactttcttttggaatctgcaratccatggctcgtacttcccaaggtctaggggaggaagaactgagctcggggctcagaaaaccaaatcgagccactttaagtggtcacagggaaagccaagcctccgytgttgcaaccaatttgtgactgcaccatttctggagcacctcttggtgactgtaaggtgtgatggagtgatggtgctgaactgtgaactggacttttccatctctgtgcttgctagcctcttggccagcctggcccatagcatcttaggcactgctgaccaatagctcgtcttrttgaggctttggaagtcgccggtcagggagaagcaacccagccccayaaggcaagtctatccaatcggaggctgctcacttcattgcatgttttcttctttgaatcttcacaaaagtttttcagtgtttttatttttaaatacacacccttttgtgaagccccaataaaacccagacagaaatgctttgcaaatggggcaggttagtcatgacagatttgcccaagcaagaagcttgattcttgtaaaactggcatccactcccattctcatttctactcagctcaacttctaattcccagtcagaattgtaaaaatcaaaaagtccacatgtcccttccccaagtaaagtgaatttttcatttcccccgatgagatttgttttaatagactttattttttagagcagttttaggttcacagcaaagttgggcagaaagaacagagatttcccatatgccctctgccccatacatacatagcctcccctattatcaatatccyccaccaggatggtacatttgttataattgatgaccttatgtcaatgagttttttttattcctccatgcagttcctctgcacccccttcacacactttgggggaaggtgagggacaagtgcgtgggttctagacttggcctaaccttgcgtgttcagtggcccattctatcccaagatgtcaatctaggcacttctatttctcaaaaatattaatactgtgatgtgatgctgtcactttcactgtctccctcactggactggaaatcagagtatcagggctaattggtttaatccatagatttgactttgaatgatcccattcagcaactattaargacacatgatgtggcagccactgtgcaagggtgcaaggtgtggggaaaacaaaatgaacaacagccactgcccagcacctgacactgtgtctgtactgagagcctgtccacaaatatttgttgagtgaataatactggtatatactgcatacttgccatataccaggcactgttctaaatgctttatgtgtgtcagtcatttcattttcacaccaaccctataagaaatgtatgtattattggtaccattacaactttataaatgaggaaaggggcacagagtagtttagcaatttctctgcgctcacatagctgcctgactccagaggcctcaatgagtaaaactggacaagcctatgtttgggaagcaggggtggagagaatgccaaaatttgtatccaggtcccatggtaaaaattagaatgtgctatctataattgaaaaatatgagttgaattgaattggaataaattgaagtatagaaatgtccaaaaggtgagagactgataaaaatcacagaagaacgtagagggcatataagaagtatttgacctggaatttggaaaatgaaaactttttttcatcatgcaaatgttcatttaatttttttttgttaactagtttgtttattgattatcacatctataaaacatgtcatgtctatgaaacttcaacagtacacaagagtatttagtgaagactaatttcccttccatacctcatgctggaggcaaccactgtgaccagtttcttgtgtgtctttccaaatgtataggtcttcgtgtttgatagatcagtacggtgactatagttaacaataatctattgtacatatcaaaataactggaagagaataattcaaatgttcttagcataaagaaaagagaaatactcaaggtgatacatatcccaattaacccgatttgatctttacacaacatgtgagtgtatcagacagcacatgtgccctgaaaatatatacatctattatgtatcaattttttaacatggcagagaagaaatcagagataaagagggtggggaaataaaacttctctcgacttttcagtgtcctggtgaagagtactagctctgacattttttcataccataagaattaaatctgtagttatttgcataggtaattgctctgatccaaacgaataataaaatttttcccgagaggagcaaatggttatagcctgaacaaggtccctaggtagagcgcccagggtgccrtgaagcctggagtcactatcttcctaagcaggccagcataagcttgtgccatcattatgcarcatgcaagaaggaatgagccccagaacttggagtcaagtcccaggacttgccataaaagccaagacatgtaacggactatctggctcctggagagatttatctacctaccaaagtgttggaataaggagcagacctttaagacggggaggggggatagctgcctcctycctcttttataggtagggaaaataatttgtccttgtttcttacctatggagtgtctgtttactcacatagagcaattgaccttgctcttatcacatcatcctagggggaagggggggccaaagcatttactatttactgtgagtcatttaataagaaatttaactctaatccagtatatctcatgtgcacatttgggataaagttaataaaaatgaatattaaaaacttagccccaaataaatgggtccgatgggcttgatttttatggaacttgagaaggagcgttctagaaggaggcacaaatgcagaggtaaagggtttcaagtgttcttggcaagttgtctgttgtacctgaaacctagggtttatatttaaggcacttccatgtcctcagctggcaagtggggaaaagggtccccaccactttcttccataatatacctcttagggatactataaaggcaaatcagagtacattctgcttttggagggaggagaacttggactctgtgttgtcatttgctcatttttcattcatcccattctgttttattaattcacttgggcaacaaggatttactgagctcctactatgtcccaggtgggtgttagggatactgtagtgaataaaacagacacagtccctactcttggaagcttataagagtgggggattacaggcattgaaccagagttgaacacgtgatgaatgatatgaaggagtgcgttcattgtccattggaagtctgtgacaggaaaacccaacctaagtcaggagtcaggaaagtcttccctatgaaagagatgtcmaaatggagaccagaaagatggaagttgttagctaggcaaataaagagtggttatagcctctaaggctagggaacgtacatactaatagtctaagatagaaagacccagcagtgccaaataataaaaataggactttgactgatggggatacagtttaaaaagcaaacacagacaagatgtcytttctttctgagcctaaatttaccaaaagaactgtggggtctgtaagttctgttccttctgtacctgaaagaatactgtagcaagatgctaaaagcacatatgaaagtgtcagggctaggcaaaaaaatataatacaataaaacaaaaagagttatcattaggtagaagcccatcttgtgagagggttggctaaatcctactattaataatttttgaccaaactccataggcccatgtgaatcactcatttttcgaagtagaattacccatgaaggaaagtgagttggtgttaacagctacaaatgtttcctcccagactcttttagtaaataagggctggctgaatcacagacacactggaaaacactcatctagcaggatgtttcaggagcagggacgccactcgaggggttttatgaaccactttaaagcccccacttatttttccaccttgtgcttatgtgagggtgatctcaagtaccccctccagaccccaacactcacacactcaggtattgcgtcatcattctttatgtgggttgtggggtataagggtctcttcctgatgaagttttggttccactcctcatgactgagtgtgcataaaaccactcagcctctctcatctacccctcccttttcctcttcctctttctccttctatgttctttcgtttattttatttttttatttttttatttttttggttattccctacctctcttatatccctctttctcctcccccaatcaactccaagttctgaaagcaaccatggcgcaaagagtgtgcaaggttaggtggggaaggagtgcatgggagccattttggggagtggtggcgatgggttatggcctgaaaatgggattttttattctttttttctccctatcaaagttggtctttaaaaatcaacactamgctagcaatttttaatcttgttttgaatctcagatccctttaagagatggcatttatggatgtgctcccagaaaaatatgtatacgctcatctatacaactttttatacaaaagtctggaagttcatacttgcacatatggctttaaattttttctcatttctttatacacagaagtttaggttcaggattcaagaagttactcttttaggtactgtgcctacaagtcaggtatgtagccaccaaaggggtcacattatctagacagtcaggcatccataagtgtggtggaagaaaatccaacatgcttcccagtayattaatgtaaaaacaaccaccaccaccacaataactataatgttcctcatgtcatcaagcagcaggggagagcactctgttttaagcttaatatattcgcaatattttaaaagacaaatgcctaattgcctttctcacttttcctcaacaattaagaatttcaatcactctaggccagattttagcccagatagacttctttttcttcttccccaatcactgaatctctagtctactattagctgagccctttactgagcaacatggggatttcggggtattttggtgacaagaatatttgggccagtgtgtccaattttccaatagctcatcttagccacaagtcagttgtgaaagagtctcttctaggtagctgcattacttaagctgatggttctattttactctctgactttcttatcagctagaacaatctatgctctctttgagtcatgggctccttcttttatgaacactagcttatggttaagttcagatatatatatatgtgtatgtatatatatatgtatgtgtgtgtgtatatatatatatgtrtgtgtgtgtgtgtgtrtrtatatatatatatatatatatrtgacaaacctaataacctaaataagaggctttggtcaggtattatggttttcagcattcattcattgaacagatatttattaaatgcctcctatatactaagcacatagcacctgtttgtaggtcttggggtcaaaatagtgaacaaaatgaagttcttcctcttgaggcttttgcattctagtgggagagacaaaaataaaacaaacaaatatacagtataatataatgcagtgataagtgcagaaagaaacacaaagctattttagatagatggtcagaggaggcctcttggaggagaaactgttttgagcagatacctaaaataaagtgaaagaatgagctacccaggtatggaagggaagaaattcttcagagagaggaacagcaaaagcaaaagttctgagacaggaatgttcttggtgggtttaagaaacagccaggagccagtgtggccgtagcacagtgagcaaagaggagggcaggaaatggagttggaacagtgccacggactgggcatgcagggcctttgaagccatatcaataatggactatggttttattctatcggtgctagaaagccacagaaatttaaaagcaggagagagacaaaataggacatggtttttaaagatgattcyatctattgtatgaatgcagggagatcagctggaagaagacggcagtacccaggcctgggatgatggtggtggaaatgcaggaggtgaaaagggttcagataccagacatattttgaagtcagagccaggaggatttgctgttaaaatgagtgtggagtatggctgggcacagtggctcatgcctgtaatcccagcactttgggaggccgaggcgggcagatcacttgaggtcaggagttcgaaaccagcctggccaacatggtgaaaccccgtctttactaaaaatacaaaaaattagcagtgcatggtggcaggcacctgtaatcccagctacccaggagactgaggcaggggacttgcttgagcccgggaggcagaggttgcagtgagccgagatcgcaacattgcactccagcctgggcgacagcacaagactccatctcacagaaaaaaaaaaattgagtttggagtatgcgagaaagaaaggaatcaaggatgtttccagtgttttggcctgacaaattggctgaattataatgtttgcagaaggtgttctggaaccaagagtttgtttgctaagtttgaaatgccctttagacctccaagtcctgtcttgtgtaggcagttgggagtgcagtgaaggttttggttgggagatataaccctgtagcatcccagaaatatgtcagactgtgcaattgggtgagaaactggatgagtgtggatgagaatgagaactccgagtactgagatgctccagtatttagaagtccagaagagcagaaggctcctgccaagaaaactgagcagaggcaacctatataggataggagaaaaaccgggagagtatgttgttccctgagccaaatgatgacagcgtttgaaggagggatggatgaactatgtcaagtacccctgagaaagcaagtaagataagaactttgacttggcttagtggagtagacagtgaccttgacaaaggtggttccagcgagcagtggggaagaacacctgtttatagtgggtccaaggaaaaatgggtctggaaatgggaaaagaaactataaacacacattaaagcactttgctgtaaaggaaaacagaaatggrgaggtatctggggatggacctgggatcaggggagatagttttaatataaggaaactacaagtttatatgttgtgtattgatggaaataacctagtaaaaaaaaacctgataatgtgagggacagaggcaattgccgaaacaaagccttgaagtaggtgagtgctccgtggaggaagaggctcgacttaagtgggaatgtagaccatccatccaggtaggtaggttgatttagtggtggtaataagtggaagttctctttttgtgttttctattttatacttcagtgaaacaaaaagcaaagtcgtcacatgagagaggagggggaaaggcaggttgtgggtttgaggagagaggaggtgtgaaataatcagcagcaggaaccctcatagtggtttgaaaggctcttggtatttttttttttaaccttgttgttggctcagcttttttggaaaagagaaatacagtaatatctcactgtcgacattattaactatctcagggtgtttggagagagaggattccacagtttgaacactgggcttatcacttcctgactccacattcctcagatttttctgttttcctcatgatctgaaatgcttcctgggctcatgagctcagaatcacttttatttgctctccrtccttcatcctgtatattcaatggtggaaaaaaccctggtagaggaattagcagaactgaattctaatcctgactctgccacttactagttagggaagccatttaacttctctgtgctttttagatgcctgaacaataaatctgagttgataaagacccagtactctagttaatctatacaactctatcctaagtaatttgaagatttctattgacagttttgaagtattgagaatatagtggggatcctcaaggcagttcttatagaccacgaaggacttggcaaccccagggatagccaaagaggaagagggagagcctccagtctgtccttcctgatctgctgacacgatgttgtctaaaggccttaataataagggactctcttctcctccctcccacaggtgggcgcatgatgaactgcccaaagattctccggcakttgggaagcaaagtgctgctgcccctgacatatgaaaggataaataagagcatgaacaaaagcatccacattgtygtcacaatggcaaaatcactggagaacagtgtcgagaacaaaatagtgtctcttgatccatccgaagcaggccctccacgttatctaggagatcgctacaagttttatctggagaatctcaccctggggatacgggaaagcaggaaggaggatgagggatggtaccttatgaccctggagaaaaatgtttcagttcagcgcttttgcctgcagttgaggctttatggtaataatggcggcttccccagtccacactaaagggccaargtgctcctttgaccaagaatttaggtctctcttaaaagcaaagggtattcagaattggaagtaactagaatgatcttctagtttgggggtatttaaacctgctgcatggaagacgttttaaaggttgacatttttttttccaaattgcatattgatggtagctgattaagcattagttactcttactcccatttcccaaaggaaaggggcacagctccttgtgggctggagggccgatagacccaaggatcttggtttgcaagtaatattttatttgaaaataggatttttttctgattaaaagaagttgaataccacagatcaaacccagtctctcctacatgaggacagtgaaatctaaccagaagcggttagcacatttacacacatttgtgtaggtgtttcactgcactgggggttctggataaagatggytaaaattcagcccacacaccacttgttaagccctgcattccggcaccagatcatacctacttggtggaagaagtgccttttggcatttaaacaaaggctttggttataaagtcttttagttgctgtacttaaactaggaaccaagtccacctgaatccaaggccagtgcttttttgagcctttttaactaccagtccctcttgagtgcasccagggattgtgtctcttaggcccagagactcatctgaattcccagggatcctgatagccacatggggctttcctgcttcttcaaaatgacttccttatctctggggatgggacaggaattcccacctaaccagcatttctttgaaattctcaaatatctagagggaaggcagcaatactctcaccaatcctccctcaacccmgcattccctttccttcaaacagtgcctgcggaattcccatggccctcccccaggtacctgagagtcatttccagcagtggctccaggcacgaytgccatgagcgtggaggctgcacatgatgcattttccaaaacggtgtggatgccagacattctgtcctttggttcctatgtttcctgtttttgtcacatcttgtgatcaaattcttactttggaaaatgtggtctctgcaaccatggcatttttctcaagccaaaggaagagtttggattttgaagtcagacagacctaggttcagatcttaacttggccacttagaagctgtgagttgtaagatattccacctccctgggacttggctttctcatctataaaatggggaataattacaactagagttataattgttgagaagattaaaaaagatgatgaggtggctcacgcctgtaatctcagcactttgggaggccgaggcgggcggatcacaaggtcaggagatcgagaccatcctggctatggtggtgaaaccccatctctactaaaaatacaaaaaaaaaaaaaaattagctcagcatggtggtgggcacctgtagtcccagctactcgggaggctgaggcaggagaatggcgtgaacccaggaggtggagcttgcagtgagctgagattgtgccactgcactccagcttaggtgacagagcgagactctgtctcaaaaaaaaaaaaaaaaaagatgatgaatgtgaaacaccagcactgtgcttgtcctataatagttgctaaataagcaagaatttaccttttatgtggcctatttcatggccttagagtgggatagattgatgaggcctatggttataattgaggacctatcactatctcagacacacaaaagcacttactacacacccacccactcactcacccatgcgcccgtgtacatgcgcgcrcgcgcacgcacacacatacacacacacaccytcccacacacatcacgatagatgaaatcccaccactaaaaagccattcttttaggtctaggaagtaacaacgtaagccaactaaaaaccatggtggattagttgacagcaaactccactgataggagacaggagaatagcaacttaggtcaaggacatcaggaagggcgagtggagccctaacaatattggtagaagaggcctaaaaagcaaattcttattttctattttatcccaaggtggtcttagawaggatgtagtggggcatgatggacagtgtgaagcaatagattccccactagaaataaatcacattgagggggagggaaaatgccattaggctgtactttgttctaacaaaaaggtcaagtgagaattcccaggggttcacttcagtgatggctcccttcctcccactcctgacagagcaggtctccactccagaaattaaagttttaaacaagacccaggagaacgggacctgcaccttgatactgggctgcacagtggagaagggggaccatgtggcttacagctggagtgaaaaggcgggcacccacccactgaacccagccaacagctcccacctcctgtccctcaccctcggcccccagcatgctgacaatatctacatctgcacygtgagcaaccctatcagcaacaattcccagaccttcagcccgtggcccggatgcaggacagacccctcaggtgagtacactggtggcagcctgtgtgccaccytaatgagcatgggctcagtcttcacatggtccaattgctccccagccatggcattcaccttagtaacaatactttacattttctttatagtttgcaaaagtttaccatgtgcatttagtgagctcactctcatattgaccagggtggcatttttatgctcagttcacagttgacgaaaccaacaggaggtgatagagmcagacccagagcctaagtctccaaggygtagccttctctgcctcttgccttgactccaacctgcaaggttggctgggtgagggattgcaggtgggagggcctggctcccaagtctatgctccactaatgctggggcagttctacaccgtcaattagtatttactgatcacctacctggtaagaaattgtgaataaatatgatatgtgatctctcctctctaacaattcattgtaaagataagacgtaaaacattgcttaataatgaaacacaggatatagtgaaggtcctcgttttatggaatggactgtgaatcccatagcagggccaggggagtcagaacgagagactaagacctggactgtgaagtttgaggaaaaataataaattgcayagcgcttcatcattagcaaagcactctcaactgtgtaatctcttttgatcctcacaataaccttgccagataggtgttatactttcattttacagatgaggaaattgacgttcataccatttaagtaccctcttcaagtttctttggcatgtagatagtggagttaacccctaaacctacatcttctgactgttcttcctctagaaagaaaagcatcattattctgtcagcaaaaggaagacagaacttactaagtaagcccatttaaccacttggatacaggacagaacacaggcccttttcactaacagatcttgtgtccctgcctcaggcaggttcagggactgtaggaccagggtgttgctctgcaaggcattgcttacaccctgacattctcctctctgcatccactggggggacataggaatcgttccaatgggtcttctgcctacagtagccatggtgtccatgtggagggctttcccaggtggtcatggttgagggacaggggaactcagccaagtaatgcccttccacatagcactgcctgtcacagagactcccctggagtattcccagatggactgctgggaaaatcccacctggcctccagtgtgcccctggaagttcttgaatgagtctaaccccctgcatgtttcctccccagacatttcatagccagagtcccccgtcctctcacttactggatatgtctggctgcttgcccaccttgcatacaaaccacattcagaggctaccccccagttcagagcgctctccccacccacagtcatttagaaggtgctggcaggacaagcaagctgtgcagcatagtgggtagcttacagaatgtgaccccggaagtcctagagccaatgctgccctttctacttacaagggcaagtgcctcaatccctctgagatttagattcttcatctctaaataacagcaactggcgggtcatcatggtttactatgtgccagttatgtggcatctcagttaatcctcacagcaacaaaataatattgatagtatccccacttcacagatgaggaaacaaagctataacatggttaagtaaggtcacacacagagcaagtgatggagctaggctttctgattctggaagcctcataggcattagtgaaagagataaagcacttaaaatgccttataaaccataataaaaatgtaatttttattataaaagctacaaaaatataatgtattttttaattgtaaatgaggaagcagtakcccttacctcagcacagccctctctgggtatagctgccctattagagtacaaaaacagggcactgaatattttaccctggcctaacccaaaaaaggggcagaactttcttcatgctcctcaatgtagtttaaaaagaatttaattagggcataccaaagtgttggtgggccataaagcttatactaagggcactcagctcaggacgttctaagaaaacatgtgaagatggacttacccatctaagccactctgaggaccaagaatgcaccartgggaaccagatttactgagtaggaagctggttcttgtgaggagtggagggacaggaagcagtagaaacctggcaccacaggaagggccctgtcaggatctcggctcrgtttgtaagagaactgtccagccgttcccctctcttgggtctctgtttcatccccagtaaaatgaaaagggcgaacaaatgaagtccctcccagagtagacagtccttgattcagtgtgtgtgtgtgtcaataagaactgccaatagaggcttgccactgtgtatgagtttgctaaggctgctgtaacaaaggaccacacactgagtggcttaaacaatcaaaatgtattggctctcagttctggaggctagaagtctaaagtcaaggtgtcagcaggattgttcttctctgagggctgtcagagaagkatctctcccrggcgcctctccctggcttgtaaatggctgtcttctccttgtctcttcatatcatcttctctctatgtgtatttctgtgtccaaatttcctcttctcataaggacaacagtcatattggattagggcccacctgtctcagtttgctagggctgccataataaagtacaacagattgggtggtttaaataacagaaatttatttttctcctrgttctggaggctagaagtttgaggtcaaggtgttggcaggtttggtgtcttctgaggcctctcgccttagcttgcatatggctaccttctcactgtgttctcacctggtctttccttcgtgtactcacaccctgatctctctctctctctctttctctttcctggtgtctctttgtgtgtccagatttcctcttcttataaggacaccagttaggttagattaggggccaccctaatgacctcattttaacttaataacctttaaagaccttgcctccaaatacggtcatattctgaggtccttggggttagagcttcaacatagaaatttgggggaggggagacaaaattcagcccawaacatctccctaatgacctcagttttactcaattaactctgtgaagacgctatgtccaaataaggaaatcaacatatgaatttgggaaaacacaattcaacatgtaataaaagtagagatgcctcctccccaccctgccagcctgcagggataggggaccagaccttccctgcctcagaaccagatcacacagctggtttgtggcctgccctgcgcagtataccagattgcctaaatactgaaaacagaattgtatcagtaccttgatttgtgtttgcgcatgaataacgaatactaccagttcttaaaacactgcacttagtttgacaaaacatttacactctacattgtgctaggggccagtacacaaagataaaaaagacatgatccttgccttaaggcagaagacagctgtataagtaaacaatgatccgagattagacagtgtgacggatgtaaaatggaaatatatgcaaggcaacaaacaggagggaattattaacactgtctcgggggattagagagagcatcccagagaatgtgacataaactgggttttaaaaataagtagaaattacccaagctgatgaaagacattccaggcagagggaggagcagatacagctgggtcttgctctgtattatcttgtaggtgataggaactaataaagagttttagatagaggagtgacaccatcagtcttgcttttcaaagaggaactccagtagtrtagagaacagactggggcagggaagtggggaagaaagagaaaccagttcctgggggccattattgcagtcatccatcaaaatgatgggacccgagccaaagcagcaactgtcagttaacaaagacatttttcctagggcatacaaaggaaaaccccagscttgggatgaaagggtggggtccgagggtttattagaggttgmtttgccatctgtcatcaggacagtgattttaagacatttttcattttcattaatgaaaacctcacagcggttaatgrtgtgatgagacggaatgcaatgtgatgtragcactgaatcttgacaggactcacttaagcgaaactgtgcaaaaacttatatgttccttgaaatctttttctttaggtgacatttgttcaggtcatgtattcatccttgttccaattgccatttcagtgtgttaatgtctatcataatgaagcatctttattgcaaagtccaattcttagggtgctatgaagtactctggctaggtcatgtgaagccagtggatgtgggtcagctgtggacagtgtgtgacttgctgccatcctcgatgactgtattctgaaatagatatggctgtgctagaatgaaggaatctagaaaggaatgcccctggaagctcatcttgaagagaggatctttttcagcagatcagcaaamcgctggctcagcacctctgagttagctcagtgaaagaaaaggctgacgcctgccagtgagctccggaggcttcccctttctaacaaggtcatttcttcaaatagggagttcccattgtttcagagtcacttagatgttccaggcactaagacaggtctctctctagggtcttcccaatttagcsagcgtaaaaacaatggtggaaaggaaaaacctggaaactttgcacagcccagagcctggtcatgggccacacccgctataagggaagctgagacacatagctcctagctgagcagctacatgcccagaaaagactcgtattaccacraaagcatgagcgcaatctcactggagctagtagcctctgcaatgctgggtgggataggcaggttgtaagtgatttttctggaagctgtgaactcygtaaaaatgtttacttggatggtcccagaacttaaattagtatatggttcatgaggatccttccccacccccagttctgaatggaaactgccacgaacaagaatgtatctcttgaagatggcagcctttgctgacagaaccacatgaaaggcaggaaggagatccggcacgctcccaccgttacgctaacgtcgcagtatctcctaggtgaactgcatttgtttctcagattctttttagttttctttttcatcttccctaaaaaaaatattaataataagattttgggacttgagaagagagagagagagagagacacgcttctgtgtttctgtgacaacactttcagagacaagaaaaaaaacgccctctggctttttccttggatgtgtgactgtcygccaagttatcacgtttaaaccacagacaataggtggagagggcccagggtggagactcgagcaaagcactcttcccaaatggcatgtgagttattgaccagcctgctcggccgcctctaagagcctcgggagtagggggagttccaaacctctggttcagaaatgttcaggtagcatttctttgtgaatgaaggagtcaggagcttctagaccccaagacaactttgatttctcagcatcaccatccagagaggcctcactacatgactgagcaaagagaagaagagctggagcttctgccacaggaaatggtggtttgaaaatgggagcacaggtgaagcgccgatggcacagacacacacttgcctcctggctccatcttgttattgtaaagtataagccaagtgggtcacttctccttccctttgattcctgccttgggccattcagcaggtgaccctgcattccttctggtaatttttaaacagaaagctacgtgacagtctttttctagatccatttttgtggactctcatttaatttaacttagttcatcgagtgcatattgagtgccctcctgccctatattgtttccggtggaatggaggatacaaataaagaataaggtacagggcctaccttcatggaatttgcaatcaaagtgggacttctacatcttactagctagaaaaatataatatttaaagaaacatattataatcaaggaactgctactagaattcctctttgaaaaggaattgtatttgtttatgatagtaccttaataaatgctagaaggcaggtggagaccccccaggaatctgggtgtgggttggatggttctgtatgagaatggaggaagatgatacttgtgcagaaatgggaagagaaagagagagtctgaacctgctaggtggtgaaagctgcctggttcacaatggaatttgctccctgggacccttcaatcttcagcagagaacttaaacccacaaaattattggtgtaagtttttaaaaaaaagtttttttggtttgtttgtggaaactgattgtattagtccgctctcatcctgccaataaagacatacctgagactgggtgatttayaaaggaaagaggtttaattggctcatagttccacatggctggagaggcctcacaatcatggttgaaggcgaatgaggagcaaaatcatgtcttacgtggcagcaggcaagagagtttgtgcaggggagctcccatttataaaaccatcagatcttgtgagacttattcactcccatgagaacaacatgggggaaaccaccccatgattcaattatctccacctggccccacccttgacacatggggattattacaattcaaggtgagatttgggtgggggcgtggccaaaccatatcactgatgaagtgactaaaccttgcacccaaggaagcacagagtagagcaagcagagttataggagcaaagacttagagaaccatgaggaaattactcccagaaattacagaaatcatgtgcagcttgacctgaacaaactgtaatagtagcacttttttcatacttatccaaatttctaagagcatggggtctctgacatttgatttccatgtaaatataattaaagaatagcaacaaatggatgagcaccaagtataaaaatacttgggcctactatacaggtagggaaactaagccataagtaaagaacagatgggactgaagcatctctggacactggtgaagagactcctttggacttaagatcaaactcattttcttgtctttccaatcaatcaacaagaatttactgagactctattatgtactgagtactaagagagctgttaaagtagtgtaagagatggtctctggcctcctagaacctagcaactatttggagaattgaggctagcagaagtaattgacacttactgaccacatgatggattccagatattgctctaggcactttccatacattactatatgggtttctcagaacaacactgtgaacttattgttatgctcattttacagatgaggaagttgaagccacagagggtatgartagcttatctgtagtcacagagctatcaagtggtagacccagaatttgaacttatctatctggctccaaataccatcactgaaaatggtctgcatggtaaagatgatgttgccaaaactcaggttctaagatacatgacataaaccacaggtgctgcaggagtccaagggacagggaagaacaagagctgggatggtcaggaaaggtgacacaaagaaaggaagattggcctgggcatcaaggctaggcaggcatggtggacagcttagggtgcagcaggaaggagagtatggagtggagcctggggccaggaatgagcatgtgttggatggaggatgatgaaggatgggttggctgctcagagggcttttgactcaaaaggtttgagtcaaaagggctttgacatcactactgccttctttatggggaccgcatctccagaggctaaagcacaaaccacaaaatctgcagttcccatcttatccagctctgccactgactttttctatgactctggatactcctgtctgtgtctcagtgtcctcaaaataaaattagtgggttgggtgaaataagcactatactatagttcccttaaggttaaaaaggtctatgattcatatttgtatccaaagatgaggaaaaaaattagagtttatgaaatatctttcaggaccatggccaacttgtctctcagatctagatggactggcagaagcttgtcataggacaaaggtagcagattgctttcatcctctagagaccctagaaaagatagagagggccggcgttgtcatgtcctgaagccttggtgctgcacccagtcatcgttagtttctgtgagttggtgggcagcagagcaaccggcgtcgggcgcgagggagaggaggctgactcaccaggcattactggtgcagttttgtcttttattttccagttcagaggtactactttgtctgttggttttatttttttaatctcaagtgaaattggaaagaaatattatcttttaaaatgatataaatggtgggggtgtttcttctcaaatcagttgttgtattggaagttcccaaagtatctatgatagaagaagaaagaggaactagtcaaaatagtaagtgctactataatggtttgctggatcagttccataggctgacgaaacacaaagttcaggctactggctttgcttcttatcctagtattagagtgatttctccagtggttcctagtgtcgatatcataaaccttgaatgaatcaatctgtctcaaacacacacatacacacatmcwcayayacacacacacacacacacacactcctgcacagagggttctcagtgaccataagtcactcagagtggagctgctccttcctccagcatcagcaatgattcaaaatgtcatgctttatacaaattcagaactctctgcctgcctcctaacttttttttttaatcagagcataagactgttgaagttggtatctggcaaaattaaaacatttaatttaggggatagaacctataaccaaggtgtttgcaaagtcagttcagtgagattccttgggctaacttgatgtgtgaaaggcctaaggagaaaaagaatcttttcaaatccagaaggcaacttcttgccagctatcaggctggargcccctttggatcttgtrggctgcattttatgaattcattgagactgtctgtatctttggtcaactctgtaaacatctgattgtgtccaccatgattctttcctttggaacccgactatttttctttcaatttctgccccacaaattcctcacaggttcaacaacaagcaggcttattccacaatcatccttataagtttcccttacacattaatgttaacatctggtgttactctatttagaaccttagtgcgaatattctacttagaaccctagggcttcagctcggtccccactgttcattaccccggtataactttttccaagcccataagtctctctaactctccaagaagtctgtctttagtattcagccacatttctactactaaaccaagctctagttcttgaggttctccaggctgttttccttctccataaaatgagaataatgagtgtacctaccttgtaagattattgtgaggattaaatatgttagtacacatgatgcactaaaaatatgtggcccattgcaagtgctcaataattgttcattataatcttattgagctacatgtcttgtttactgggggtgataattctcattcactgtttgtcaaagtgttgctcctagttcaaaaggatttgataaagtgggtaaaggagagaaaacaataaaagttttctctctgattttgagccttgatgattagttctcgggctaattttaaacatgaagatgatttagaggaaagactaaatactttcctttcagttcaggtctgctgggttcaacccagttatttgcatgaaaggacaacaatagcactattatgtttatttttaaaaaagataagtagatctttcttcctcccagtgtctcatgagaatagcgtgaattcacagggacggcacatggaaccattatattctctttacccaaaatggatacaggacacattagcaatcttaagatggagaaactgggcagagagattgacttaggagagatgaagataatttaatgttagacatgtggtagytsagttaaaaataaagcatttggatagaaaaatcttcatgaaattaagaatgtgaaagtatagtgagagaaattagaataagaaaacagatacaaaaattttcagtggtctaaagctgacctctaaaaccatgaaaacaaacgtctcccttgggagagaatgcagaaatagaacatgaggctccattatcccactttcatgtaagatgtttttaagctcagaatacttttgagattgctctttgacttctttttttttccagaaacaaaaccatgggcagtgtatgctgggctgttagggggtgtcatcatgattctcatcatggtggtaatactacagttgagaagaagaggtaggtgtctggcaataaatagattcttatcacactctctgtggtaagcaggggacctctctccacaggctcggacttgctctcacaactctggctttctgcatggggccacctttgcaaaaatagtagataaacatatcctgggaccttgcttaattcagtctaattcaacatgtcttgatcccctctactaggctgtggaaagaaatagaagagccacaggtttctaatgtgagagacattattcagataatttcagtttagtgtgactagcactgccatcagggtaaacacaggatgctgaagaagtgaacaagaggtttaagagtattcactgggaacagaattcagaaaattattggatctcatccaaaaagtcaccagggttagaatgaaaccaataaggcacaattattcccctgcagttgaagtgcctagaggtaccatcccctgtcctctcttccaaatttccctatgatacaatatctcagggcattgtgctcccctcagccaccttgactactaccaaccaatactggagtcaaaatgtcctgacccaagaccaggagagatgccccggctgccttcccatggtaaggatagaacttgatcctcataacactgagctgatgactgatttcattctcaagtagatcagtgtcatctacacacaaccttcttagaaaagcccttacctcagcactctgatgttggttttgcatatataaaaaaatctagatcatagcacagcgacctacttgtgtctcatttcctccatctaagagttagccaggtaggagggatgggtgattcagatagaaattaggttgacagcctatggggctcggggtagggcaatcacatttagctcatactataaggaaatagtgagatgacccaggatgagaaaactgaacttaacttatccacattaacctacctagtaaaattgctgggatcctacgccatactctttcctcaaccacacttggcttatcacatggttgtgctctaagggaatagtgctccccatcccacaattccccactaccttccccaacacacatacccatcctcacctcaaccccattcaccatttgtcccttgtaagttagcaacacacaaaactgcctcaaacttgcggtaaaatttatatttagttgctgcacctttcataaaaccttgctaaagaaattatattggcagcttctaatgctataatcatcagaatgcagcctgacgctgaaggcttttcaatttcatgactctttggcaatttcatgtccaggagaatacactgataaagaatgtgggtataggcattagacaaacttacattcagatgcagattttgctactgacaagctgtgtgatcaaatgacttaacttctcgtctgcaaaacaggggtaatactatgtacttcatggtattgtggtggagattggtatcaatacacagaaaacactgaacacagtggttcccatcgatgggtgatagatagatagatacatagacagatagatacatagacagatagacagatctcttagtgtagatgaattaaaatggcaatgtgtaagtgctatggccaggagaagctgcactggaagcatctggaaacaatacctagaacagattgaaaatattttaagtcatggtaacataagactttatgcttcaggtaaaagctgaaaaggatattagatactctatgccctcattttacagttatggtaagagaaaagacccattgagatgacgtgatttgtccaatgccacacagctaatgatggctacaatgtagatgtcctaattttaaggccaagactttttccttagagcctaagaccttgctgacttggagccgagttaagcttactcctaaaaacctgttcttgcactggggaaaataacctgagactaaattatcttggtccaatggtccttttaagcagcaacaatcaacctcacctcttccatctgtctgaccatttaggactgtccttccagttctacatttgactctgagctgacctgcaagactgaaagtctttgaggactgtagtctgttctctactctatttgtagccactacagcacctaggagagtgctgggcaggcatgtcttactttgcaaacactcgtggggactaacttgaacctcctctgctacctccaactgcttcttgagtcctcccctccattttacacacacacacacacacacacacacacacacgcactcacgcacactcctcagtcaggatcaactctgaccaaaaaagcgaagttgaaaccactaggcacaccgtgctcatacccacacacaaaaaatcccatgttgactttccttgaattcctggaacttcatcagtgtctgccccacatttcctccccaagactcacaccctcacgcagcacattccaccatgctcaccacatacacactgggcctttcccttccaaagaaaaatgtgcctctcctaaaaatgctatttcctcagagatgtgccttttttttttttttttttttttgagatagattcttgctctgtcactcaggctggagtgcaatggcatgatctcggctcactgcaacctctgtctcctgggctcaagcagttcttctgyctcagcctcctgagtagctgaaattataagcgcgtgccaccatgcctggctaatttttgtatttttagtagagacagggtttccccatgttggccaggctggtctcaaactcctgacctcgtgatctgcccacctcrgcctcccatagtgytgtgattataggcgtgagccactgcacccagcccagttttttaagaraataaattaactggtgttaaaataagtctaccttaaaggctgtgattttctgggtccagcctccattgcctctgcctggactttgcaataatcccataataaacctccatccttcagtctgccactttcccaccatccttactgctgcatgatgtatwmaaaggatactgtgcaactttagaaagaatgagataggtctactgtgctaacatgaaaaatgtcctcaatacattttaagtgaaaagatcaagttacagagaagtgtgtgcagaatgacacctcttgtgtgraaaaaagtctatataagtatagcaaatatccaaaactgcattgtctaatatggtagtcactagccacatgtggctttttaaatttaaattaatttgaattaaataaaatttaaaattcagtgacattagtcacagttcaggtgctccatagccccgtgtctgtaagctgtattagacactgcagatatggaacatttccatcatctcagaaagttctgttgcacagagctgatctacagggatatacatcaaacttttaaaaatggtttcttcttttttttcccacttcttttcacaggtattgaaaaatacggtttcttttgggaatgaaattgggttggttaatggaagaaggggatttatactttttactttatactttatatatttcttcacaatttttattttatgatgagaataaattactcctataatttaaaaagaaagctttttaaaattggctaaaaattaaaatattctgcaacttattaatttccagagaccctaggccctgagcaaaatttccagatggtgggcaacagaatgacattgttgctttattttctaaatagtcccaggtggaacatccctcttacacgtccccccgcccttacctcccacacatcaattcccscagaaatagggaggtgagaaagctgtgagtgaagcaacatactaccagctggaaaatacaaaagaggtataaacaactagccctgccctcaaagaacttagaatcctattaggagaccagrtatgcacattgagcaacagagattaaagtaattgaatggtacaccaatgagaaaaacacctaatgcgtattgggcatttgttatgcaccaggcagtgttctaaacactttacaagtggtatctcatttaattatcacaacagccccgtgaggcaggtatttcaaatcccatttcacagataggcctagagtgatcaagtaactaacctaagacaatatgacaaatgtgcaggggggctgggactcagggctttgtttccattgtgcccttggggaaagtgggtatgcaaaggacagtaaagaccaggtctgagtaaggagctcctgckggggaccagagggagataaccattatggtttcttttcaccaggtaaaacgaaccattaccagacaacagtggaaaaaaaaagccttacgatctatgcccaagtccagaaaccaggtgtaagttctatattttgtttgagatgaacctgtcatgtttcctagagtattcctggccagtctaccttgcctgttggacattcacagttttccatccagagcagaggaaggtagggaacaggagtcaagaacaagagttctcctaaagtcactaaacgtcagtgtttgaaataatgggcaacactggataattttctggtcatgagtcttcacaggaaaaaaatgaagaagctggaaatacatactgtatgactctttccagctctggcattgtaggagtctaggttccatgttagtcaattatttccttttctagggaaaagagtgcaggcttgaggagagaggaggtttggaaaagctattgtgtgacatgttggactgatccaagtttaggatttactaagtgcaaaagtgacaaggaaggtaggatcttcaaaattctagctagagtgtggttaaagagatgaaagatgagatggaagaaagaaaactgtgacagagtgatcactggactaagaagtgaaggatggaaaaactggatgcatggtgaagttgagaagcagatatgcttgaaggaagggatagagacgctaaaaggatcgtggttagatgtagagacactgtagtttttcaacatgaaggcaattcttggtattgtataggccagaatctggacatttggggtgtaggtagaggcaaattcttgagtaaaggatgtgaaggtaaagatggttttgatagtaccttagaaaattgcatgaaaagacagcaaatgcacttctgagaaccaggagatggactcttgaacaaagttcttatttctgctgtcccctagtggcctggagggcttattacacaacccagctccatccttcccccaactaaactccatttaaatagatgagaatcccaagagtaaccctttcaccccacgctctcatctgcctgtttaggtaaccaggttcaccttkaccatagtgtcttccctcactactctatcctatgctgctagcatccctcttttttactgtgaagcatgacatatggtagtcactagccacatgtagctttttaaatttaaattaatttgaattaaataaaatttaaaattcagtggcattcatcagttcaggactgtcctcccagttctacatttgagtctgagctgacctgcaagactgaaagtctttgaggactggagtctgttctctactctatttgtagccactatacacctaggagagtgctgggcaggcatgtcttactttgcaaacactcgaggggactaacttccacctcctctgctacttccagctgcttctartcacacttttagtcctctcctccattttacacacacacacacacacactcactctcacatacacacactcatgcatacccactcctcagtaaggatcaactctgaccaaaaaaatacacaacacattaatgtcagctcagtgarttacccttaaacacatatctcgatatttggtaaagcaagtcttcctaatttgtttttctgcaaaagtttttggctattcttgttcctttatactttcatatgtattttagaatcaacttatcaagtaccacaaaaagaaaaaaaaatattagaattgtattgagtctacagatctatatgaggagaaattacatttttcagtgttgcgtgttttttgttttttgttttttgttttttgacagagtcttgctttatcgcccaggctggagtgcagtggtgtgatctgggctcactacaacctccgcctcctgggttcaagtgattctcctrcctcagccttccaagtagctgagattacaggcacctgccaccacacccagctaatttttgtatctttagtagagatggggtttcaccatgttggccaggctggtctcaaactactaacctcaagtgatctgcccacctcagcctcccaaagtgctgggattacagatgtgagccactgtgcctggcctcagtattgagtcttctaataccataaaactaccactcagatcaaagactagaacattgcccgtacttcctgaaggcctcctgtgccacttcccaatcattacttcctctctcctccccaaagataaccactatcctgacttctagaaaaataggttagctttttccttttttatttttgaactttataaaaattgaattctttattcttttttctctcatgtctgatttattttgctcagtattatctttatgagattcatatatgtctttgaatttagatataatgcattctttttcattrcttcatagaatataaacgtatgaatatactagagtttatttatccagttgactattgatggacatgtgggttattwccagtttgaggctattatgaaagttgcagctgtgaacattcatatgcaagtcgttaagtggacatgtgcacatattttttkgggtatatacctagatatacctrgaagtagaacwgctgaatcgtagagtatgcatacctccaaattgactagataaggccgagctgtttttcaaagtgggcgtatccatttacttttctatcagctacatatgagagtctcaattgctatgccttttttttttwaatttttttttgagacagagtttcactctgttgcctaggctggggtgcagtggcgtgatcttgtcttactgcaacctccgcctcctgggttcaagccattctcctgtctcggcctcccaagcagctgggattacaggtacgcaccaccacacctggctcattgttgtatttttastagagacagtatttcaccatgttggccagggtggtctcgaactcctgatctcaggagatctgcccgcctcagcatcccaaagtgctgggattacaggcatgagccaccactcctggcctcaattgctatgcattctaatgaaaacttggtattaacagtctaattttagtcctactgttggatgtgtcttattakgcttttattccacatctctgtaattattaaggaagttgaacaacttttcatatgtttattggccatattaaaattctttcttaaagtgcccatttaatctcttgcccatttccctttgaggtttagtctttcttttatggactagtatatgcttttcatatattttggatatgtgccctttggcagatatgttagcaaataccttcacccatctgtagcttgcctttggaatttctcagagatacctactgataaagagaaggtcttaattttgttgtagaccaatttagtctagtcctttttaagcattactggattttatttgctaatattttgttaagagtttggttttccacttawgtttctgagtgaaattggcctgtaattctcttgtataatgcctttttttttttaagaaggcactgcagtggctggtatatagcattcttgtgaatatatctaactgggatacaagttgaggtagaaatatttcaaatgtccttaaaaaaataagtaacagagttcttcctggactcttctttaatcacaagcctcagattgatcccaaaatgacacacagctactctacctaatacccacatcacggtaaagttggtcgctctcctgttaaaaattcagactttaagaactggaagggacctgggtagtcatgcccaaccagtggggttttgatataaagatttatgctaattcacataaggagttggggtatatgttagtttcctagggatgccttaacaaattactggaaacttggtggcttaaaacaacagaaatttattctctaacagttctggaggtcagragtccaaaatcaaggaggcacatcctcagggccacactccatctggaggctttargagaaaatcctctttgcctcttccagcatctggtggctccaggctctccgtggcatttgttggcttgtagttgtgtatctgcaatttttgccttcatcttcacatgacctccctctctgtgtcttcttcttttccatctcttataaggacastcatcatcagacttcggacttattctaatycaggatgaccttattttgaaatccttatcttgacatctgtgaagacctttattcaaataaagtcacattttgacattctgcctggacatatcttttggggccacagttcaacccaccacagggtgcatttcctttttgttattctctgcgatatttgggtaggatgtcttatttctccccttaaatatttgctagtagagcaaattgctagtaaagctatctgagactggggtttctttggtggaaatttttttaagttatatttttattattaaattttctcctctacatattagtgaacaacttttttcagtctttttagtggctaccctagaaattataaaatacaactttgacttaccaaagtctaaggtttacttccctcctgcataatacttyaagtccacaataatttcacctcttgatttaagtgaccgttttgtcattatttgaatttcatatatattttaaacacacaagacataattattattgttttatatatawaaaatatayacttacccacattttcacaattttctttgttcatatttgygatgtctttattatatcawtataaagactgtaataatgtagacaattatttaaaaactaacaatgcctttattcttatttttaatggctataaaataatcttataaagaatataataacatgaaaatcactaaacaagtgtttactgtgtgctaggaactcttctaggacttatcagagctagtatcttgcagaattaattccagcggccaccattcacaaaaattatgtgaaaataatgcctctggagttgcttgtaaatgatgctccctaaagatgtacaaatcagtggtcctaacagaagataataagatacaaaaatatactaacttattatatttatgtttaaaataattccctatgcctggataaaaatcctgaagtgaacatttaagcacacacagagtcttaataggactatrggtgacttcttttacatatttttctcctttctaaaacttctgaattaaygttaaaaatgtaagttatttgcctccttctgcctctaggtcaggttatgctaaagttctcccaaacaggaagaccagcagaggttgcatctgttgataaaggtctctcttcttttttttttttttggtgakgcggagtctcactctgtcgccaggctagagtgctgtggcgccatctcagctcactgcaacctccagctccctggttcaagggattctcctgcctccgcctcctgagtagctgggattacgggcatgcaccatcattcctggctaatttttgtatttttagtagagatggggtttcactatgttggccaggatggtctcgatctcctgacctcgtgatccacccacctcagcctcccaaagtgctgggattacaggcgtgagccaccacgcccggccaaaggtctcttaataaactgttttgatagcctctttatctcatcactgcaagaaattctttcttaaactcaaaatttcttcaaaatgtatttaagaattgtatgggatcttgaaagccatctatctgaaccacccaattactgcttgaattatctgctacaacattacttccaaagtgttgcctagctcctttttactgaaatatagtttgtgaacaagcagcatcagcatcacctgggactttattagaaatgcagaatcaggccctgctccagatcttccgaaatagaatcaaccctttaacaagatccccaagtaattcatatgcataataaaagtcagcagcactggtctagaccatgcccaagcacttataactataggagctcattgcctgccaakgcaattcatcccacatttgaacatcttttaccattagaaagatcttcattatattgaatcaaaatattttccccaaatcctaatcttggtttaaacctgagatactttataggcaaattgaattccttttctatatggcaattcatcaaatatatgaagagaaaaattatgtcccatccctttttcctccaataaactttcctaattccttaacccttccatcacatgacaaaattccaagttttctcgcattaaaacacatgtggtgtggcttcaagtctggctctatacccagggagagtggacagcagcattatyccataaccagtgtccccaaaatgtgttgaattaatgacttccctattgtaagtgatggcatccgcatcttacaaggatgtggtctcaatttattttgaggtctttgtccaggaattgtggattttaattcrttcaaagtaacatcaacaaatatcagctgaagagtttatttttatgtgtccaatactgttctgtggggagtacaaaaatatatggcttatttctcaaggaatgtatagactggagaaacaacacataaatatatcagaatgttttaaatatagcatagagtgccataaagtgtaaattagactttaaatacctgaggaatttaagtaagggataggtcattataagttgagtgaccaaaaaagaatagtgatagaaaggacatgcaccttaagttaaaagagcttaaggcaggggactcccggctttgacacttcttgcttgtacacattaggaaaacatttggtctttctgagctgtagcttcatcatcggtgaagtgtgagtaacaacagtatttaacacagagtggttgtgaggcaaatgagaagacatatgtgaggaggaggaagagtaggaatggcagtgtgggatgcaagaattctgcatgtagccggtgatatgagtgagamggactaaattctgttgctattctgtcccctccagctgcccctgtaagagccacaccaatttcagtttcttgtgaggaagacatttaaaacatttgagaagcactgacaatggatgaggctgccttgggaggttgtgcaccccaagacgccacttggggagtccaagcaaagcctsgggaattgagttccagagaatttgggggagaattcccacctgagaaggaggttggaccaaatgactggaaggaactttctgcctcaagtcttcttgagtctgtgcttctctatcggagagttgggtragaactagctctctctgttcagctaatctgctttctttgcttctcttgtagcctcttcagaagaaacttgactccttcccagctcaggacccttgcaccaccatatatgttgctgccacagagcctgtcycagagtctgtccaggtgaggcatctctctgcctactctccgtasagagggaatacatgaaggaggggaaaatgaggaakttttttttttttaaggtgggaagagggagaggatcagggaaaatagctattgggcactaggcttcatacctaggtgacaaaatactgtgtataacaaatcctcatgacacaagtttacctatgtaacaaaccagcacatgtacgcctgaacttaaaataaaagtaaaaaaaaaaaaattaaaacaaaaacaaattaaatgaaacagattgatgagtcctggactggggaagggaggccacagcatgcaggcaaaaaggagtctctgtggctttggttttccagtttccatgaagcccccaatacctgctcacayggggccactgctaaccccctgctggccagtgtttccctgagagttgtccaaggaccacatcagaatcagccagcgtacttgttaaaaataaagattcctagggacttccacctaggattctgttaaatgaaaatgtctatggagagtagccatagacctacgtatttaaaaaacccacaccccaggtaattctgatacacactcaagtttaagaacagcagctggagtccaggagttctcaactccagctacaaaacagaatcaccagggaagcattgtaaaaatgctcatgcctagactctgtgcagccccatttaatcagaatatttaggggtggagatctgcataggtgttaagcctagaagagaatatggggtgcagctcaaaatgakacttgcatattctaccctattgcaagatcagcagggactaagtttacttcggacaggaatctttcctttactgaatgaatagaaataaattctgggctgaaatctttgcwccatttgggctctttcagaagagagcccaggatgatagaggcacaaaggtcacacaaatgcctgcatccaccttatttttcaaagctcctrccgcacacacactcatccagaaatgcctgggcaggtgccctatatttcaagatgaaaccaatcttcaacttgaggtccattctcacttcactgtcatatctaagaaggaagtaaaaatataaacctgacttcaaagcttcaaaaaaatacatakatttttaatgaagtttacttaaggacaaaaacagtatgctatagttaacattttatggcaaaacccttaaattctattttcttkgtttctttgacatgagagatctttgcgcataaccctcttctccccttcctctctcctgccaataccacttttctcttctccctttgagtcccactagactttttaaaaactcaataatttacaactctcttggcttcccagattgtgacccatatgtaacagcaaaacaaatggttttccttacaaggggatggaaggggagagggcaaagagggagacagggcactgagtgctggtcctcagatcatgctccccataatrgcatgcttatgcttggaagggagctgtggcccttgttgcaggtggagaagcagtgtgggaacccaagtgctgtcccagcaaggccctgtctgtgacagaccctgcacaagccatgatctctaagaccctttccttttcctcagcagtgctgttttcatttgcattctgtgaagtgagtatccagtccctctactcacagacttctgctttgtccccaggaaacaaattccatcacagtctatgctagtgtgacacttmcagagagctgacaccagagaccaacaaagggactttctgaaggaaaatggaaaaaccaaaatgaacactgaacttggccacaggccccaagtttcctctggcagacatgctgcacgtctgtacccttctcagwtcaactccctggtgatgtttcttccacatacatctgtgaaatgaacaaggaagkgaggcttcccaagaatttagcttgctgtgcagtggctgcaggcgcagaacagagcgttacttgataacagcgttccatctttgtgttgtagcagatgaaatggacagtaatgtgagttcagactttgggcatcttgctcttrgctggaactggataataaaaatcagactgaawgccaggacatctgagtacctatctcacacactggaccaccagtcacaaagtctggaaaagtttacattttggctatctttactttgttctgggagctgatcatgataacctgcagacctgatsaagcctctgtgcctcagtttctctctcaggataaagagtgaatagaggcygaagggtgaatttcttattatacataaaacactctgatattattgtataaaggaagctaagaatattattttatttgcaaaacccagaagctaaaaagtcaataaacagaaagaatgattttgagatctctgagttttgaacagtggactggaaaccatgtaagagccttaaaagtacagttctgtgcaaatggcattcmgttttaaakaaaaacrtagcaaatgtttgatggtgctgttacaaaggagcttggaatactcagaggaacttgtcccatggtgatttttcacttctcaaaatgatgtttaaatcccagttctctgttgattcccttgaacaacaaacctggaacctcagctaagactctctgtgaccagattctgaacctcttatatccagggcttcaaggggtattgcaggtcaaggtctttcctaggcactttctactccctgcatacctctcctcacactaaatttatcctctagtagaaaattaagttattttggtctaacagcttcaaatcyttgaatgctcaataacttattttgcaagctgcaggcagaaagagactttttaagtaaagtcctttgttttttcctattctctgcttttagacaggctgtcctcaatttaagccytgctttttcttattgtttcttatataaacttggtaagtactgtaagaaacagccactatcataccattgcataataaggagcaccaacttcccagctcaaaactcaggtccttattgccttgtatcttacctcctctatgaggtcaattcacattgtaagcctgttgcttagtgcatctcgtttcctggtaccagcttctttaatagagttcttagttgcaatcaacagaagctggctttggcttttttatgtagaaaaggaacctattgaaaagatactgattggttccaataactgctagaagtttctgcaaaaccatgctttgaaagtgagcaggaaaagaagagactaggctgtggctgggagcacagccaaaattacaaaaccagcccagggatgatgatcctgttcatgcacagccactgtccccagcactaggcacagactctaccactgcctcactgtctctgctggacttggaaacttgatattactgttactgctgcactgtctgccatgaaaatgaattctccagggtcccttcttcatcctttcatctctagcttataattcaaagtctgggattgagtggccaatcctaggtcacatgtccatgtcctatctccaaggggggctgggaattgaatatctggcattttccactttcacttcttatgaattaaggaattctacaaataatagaagtgggattcaggtggtaggcagacaaaaaagcctcacaattatccactacgccacccttgtataaccttaccctcattcactgtctactctcaaaactgtggagctactaatgaagatttgtaaaccctgggcttatgagcacccattcctttactacaactcagattgctctagaagctcagttcccagcacttggatttttccagtagctgaattctacctgaaggaagggcagaaacaaagggtgaagaagaggctatcacttccaagtatcctgcacccctgggctcaagacctcactggggagggagtcttttgggccacccaccaaacagcactggcattatgcctctcaccctagaccatggttacacgtggtaaaacaaccccttctggtgatacattcacaactctctagtttcccccaaatggcactatggggagcgggagcttgccttttcctcagacttaaaacaataagttttccccgtgtttcccctctaatgctgttttcttttgaccaagcatrtctgaattctagagaagtcaggaggaacacacccattctcggtttgaagggactgatgttctgaagtacaactgggcacagtcccaggctcttcaggacgcttcctccattcacacagcggggatgtgattgttacwgygggtggtgtgtgctggctgagaagccactgtgaattgattcttcttctgaagtttatgtttctactttttggaaatgaataaattacagccagtccatcaaggaaattgcamttttgtcttgtgtttcctaaaggatttataacacagtaatatggcatgatgtgtttcctggccttatgtctccatgccatagttatgaaatgctgaaggaggcagatttgatcagataggatgtgaggttgtccctttcctggaggtggacaagggttagcttggcatccccttcaccaaaggtcaggaaccaccctccacatggagaactgtgttgaaaggattgtttaatttttgtcactgccagagtaattcccttccctgaactcygccaaattccccttgtggacaaaatctagagcagggtttctcaactgccacactattgacatttggggctggataatttttttgtcatggggctgtcctgtgcactgtagggtgtttaacagcatccctggcctcggcccactgggtgtatggcacatgccctgtccttgattgtgacaatcaagtgtctccaaacactaccaaatgtcccctgcttggcaaaatctcccccagttgagaaccactgatctagagatatgctggccccctggtgagctctgagaaaactaaatacgcttctatataccaagaagtagatctgtcaaaggtggccacctggtcacttaagcatggcccaaacctgccartgacacccaagtttacctaaatattagaattacccgggaaactttttaaaaaataatgatgaccaaatctaacctgaaaccaaaatgagatctgggttgagatttatagaactacttataccacagaaaggatttcgtgatgagtttcacacaccagccacaagagggtgatatagcaacacaatccacccaaccttagcatccccaccacttccttgtatctaaaggatgtggacttagtcacagactggatgaaactgtgtctggtttctcagctcttacaggctgaaaggagataaggaggctaatgtggattgatgaaaggctctaaaaggttaagtgtactaagtttatttcacagaagacttctagttctactcaatgcttcactcattcaacaaagttattaagttcctactaagtgtttggcttgtcatccagcaggagatacaaagaacacaggcaattgaaktattataacaggtagatcactatgtgatctactgagaaccattggaaaataaaagaagatgctattaataattaccctggggcaggggatggcagctaggaggcaggactaacttgcaactctcactcagatgtgtggagactcacatcatgaacttttgttccaagaaccgctgcaggaacataccaggaaaactgaaagaattcaccagccctttgaaagaagtggcttgccactgcaaactctgtgaaatagctgaaaaactgtgagtgcctaaagtgtgagagggggaaagtctacctctgaacacacatcttcactggggaaacctgaaaatccaaataacaggagaagaatttaactttacctagagctgaaatgaatttagagagccaagcaaaatacaaaagtagaagaagcagtgggaagagccctacaggcactcctggtcccccaggaagtccagggaagtcatttctgactttatctcacagggttccttggggagggctgccagtgggattggggaagggccacagggagaaggaaacttccagctgaactttgtaataattttgactgagtacgaattgtcctggtcaggatctgtggagatgaatagaaagtgcagatatgagcacagaagccacagcaggcagggaggggtgaggcctgaaagccctgcttgccttctcagcagagaggctagtatcccagggcaacatcccagccctgcataccagaggcttggatataaatttggctctttggggagcatggcaggagtgagactggccttgctggctgtgtgggagtggggagaggcctgtcaccactggctttcccccacttccctggctacctgtacaaagcagcagaggcagccataatccccctgggaacataactccattggcctgagaaccacacccccataccgcacagttgccacagcaagccctgtccaaggatagtctgagctcagacatgctcaactctgcccccacctgatggtctttttctgccagccctggtagctgaagacaaaagacataatcttgygggagccctatggccctcccatcacctgagaaacccaaatacttayccaggtgaccttagggcaagcttgtattcccccgtactgctgcagctgatgctctcttgaaatcgccaccttctggctggaggccaatcaagtcaagccattatagcaactcataacaaaatagccctgctccaaggaaggagaaaacaacagctaattccaccacttgtaaygtcctggctaaccagaggtcctgagtctgtccatgtgacaacttcactgttagcataaccagcatttgagaaaacctgtgcactaaacaaaactacaaccaaggactctcacagaatccacttcaytgccctgctaccttcactggagtaggtgctcgtatccgtggttgagagacctgaaaatagatcacaacacaggactctttgcagacactccccagtaccagcctggagcctggtaggtccactaggtggctagacccagaaaagcaataacaatcactgcagttcagctcttgggaagccccatctgtaggggaaaggggagagcaccacatcaaaggatcaccctgtgggacaaaagaatctgaacagcagcccttgagtcctagacctttcctctgacataattgacccaaatgagaaagaaccagaaaaacaattctggcaatataattaaacaaagttctatcacaccaccaaaagatcacactagctcaccagtaatggattcaaaccaagaagaaatctctgaattgccagaaaaagaattcagaaggttgattattaagctactcaagtaggcaccagagaaaggtgaaaamcaacttaaagaaatttttaaaataatacaagatatggacaaaaacactgtaaagaaatagatattataaataaaaaacaatargaacttctggaaataaaagacatgcttagagaaatgcaaaatacactgaaaagttttaacaatagaatggaacaagtagaagaaagaacctcagagctcaaagacaatgctattgaattaayccaatctaacacagacaaagaaaaaaaaatttttttaatgaacaaagcctccagccaatttgggattatgttaaatgaccaaacctaagaataatttgtgttcctgaggaactcaaagaacacccaggaaattcattgcaaaaagataattacctaaacacacaggtttaggtaatctaaaccatcaggttatctaaagtcaagatgaaggaatgaatcttaagagctgtgaggcaaaagcatcaggtawcctataaaggaaaacctataagattaacagcagattcctcagcagaaatcctacaagctagaagggattggggtcctatctttcatatccttaaactaagtaattatccttactttagcctccttaaaagaataattatcagccaagaattttgtatctggcaaaactaagcttcatatatgaagggaagataaagtctttttcagacaagcaaatgctgaatgtatcactaccaagagaatttgccactacaaagtcagcactataagaactgctaaaaggaattctaaatcttgaaacaaaacctcaaaatacaccaaaatagaaccttcttaaaacataaatctcacaggacctatgaaacaataacacaatgaaaaaaaaaaccaagcaattcaggcaacaactagcacaatgaatagaatagtacctcatatctcaatactgacattaaaagtaaatggcctaaaggctccacttacaagatccagagtgtcagaatgaataagaattcaccaaccaagtatctgctgtctttaagagacttgc

SEQ ID NO: 9971 - DNA, 19758 bp, Homo sapiens
tactcagtgttaactattcattaaatcactattccctaaatactgtgaggcaggagtattattttatttaatttatctagcagtgtcagcagtgacaggcccacaatgattgaataaggactcccacatattakaagtaaccgcyacatactatcacatttcggattaaattagattaaaaaaaaatctctacaaggatggggccattgtttcatkcactactatatccctggcacctagaaatcgctctgacataagggcactaaataaatactttctgaaataattaatttaaattatgttccctaattatcctaacgcctgcaaactttcctttgcaaactcaaccttcattaggcttcaggtctcaagttgtgtggagttgtactgagcattaggaatgaggaaggagggacaggcttctcaggttggcacaggtctgtccagtgcatggctcaagtgctggaagtgccagcaaaactaagtaggctctgcagttaaccctctcgtaaataayggcagggacaacactaaaagtaccaaaatctgtggcgtgcaagacaaacgtacgggaatagacaaaagagaatcaaatagaagaagatacgaaagagaaaacgatgaaagatgacggttcaaaggagacaactgacaggttctagggtttaggacacctggaggtggaccattttgtgtacacctcgggaggcgtcgggtggcgatgggacaggggttgaaggaaagcactgaggggaaacaaggtgtgtcaccgcaaaaggacctcaaggttgtgtggcagcactcaccacctccccctgctccgcggacttgtacactccagacaccatctcgttatggagaagcaaaaacaacgcctcatccgccatttcctgctaattcttccaagcttcgagktttggctcccgtttgagctggtctgggggttccagctcgcgcctcagcgacttcgccggcgccgcggctccgtcaggccgccattctatccctgtggctaagagaccgaggtattcacacgacttcccaaaggctggtactgaaatgagtctggtactggagagagcccacacttcggggmtaccaaatcctagggccgaackaaagtctgacgggagstctaaccaaagccaaccagctgagatgcgatccggccgctgggcgggggcgaaaaaaacaacttccggtcccctctaccccggcattcggccagctctatgatcactgagttcctctctyccaagcccggagaggccagcgcccagatatgaggaaggttcccctctcaccacgatgtcgggggcagagcaagataaaataagacctaaagctcccgcctggcccgggcgcggtggctcacgcctgtaatcccagcactttgggtggcggaggcgggtggatcacatgaggtcggaagttcgaaccagcctgagaaaccccgtctctactataagtacaaaattagcggggcctggtggtgcatgcctgtaatcccagctactcgggagtctgaggcaggagaatcgcttgaactcgggaggcggaggttgcggtgagctgagatsgcgccactgcactccagcctgggcaacaagagtgaaactccgtctcaaaaaaaaaaaaaaaaaaagagctcccgcggccacctccttgttaattagcaatagaagttaaaaaaattcttttggcttcatcaaaagcatccacttcctgccatatgttcttcaaatatgaaaagttgtagaaagagtttaaaatatacgttttcacagtgcaaattttttaaatattgaaaagttatcccaattcctattgaattaagcccgggtatacaaaaagaattagagccattttgaccaccaggaattttcctgttagtggggtgcaagggacaagggaagtggagcaaacgaaaaacaagatacacttgaaccggaaaatacagactaatcagaggattaggtgaaaagtgctatagaattcagaaaagcgatgtcactgcaggatggagttgctaataatctacagcagtgtgagacaactgtaggaattgtcccactgcatgtgcaaataaatacacatgctacatcatagtatgtacatcttaaatttggcaaattcaaccgtaagcatgttgcttagcctgtgattagttcttccattggtaattcacaaaacaaaatttttccccaattgtccctgttgttttcccccaaattaacataccgcaaggtggctcatgcctgtaaaatccagcactttgggaggccgaggcacggggggtgggggggatcacgaggtcatgagttttgagagcagcctggccaacatggtgaaaacccgtctccactaaaaatacaaaaattagccgggcgtggtgacaggtgcctgtaatcccagctactcggggggctgaggcaggagaatcacttgaacctgggaggcagaggttgcagcgagcagaaattgtgccactgcactccagcctgggcgacagagcaagacttcgtctcaaaaaacgaaacacacacacaaactcttcatgccctttcacaggaatttaagatcatgttccaaaattttaattgtggtaggttttttttttaagcatgtcccttctaatgtttgaatcagtttattccattcatcacgtaaatccagcataaaagctccacttaagcctttgaaaacactaaattgtgtaattttgaagagtattttgccatggtaatcttaatttttccagcactaaattttcagttatgcgaaatcaggtcctttatgtctagatgacattcttgccctcatcactaccatcaagmaaaaggagtccaagtccaccacacaagtcaaaaagtaagtaaatggccaatttatcaaagttgacttctccaaccacaataacatgaggcttttaaagtacgtttctggatagaaaggaaacttatttaatgaggacctactaactattgaacacagcatcctacttatccttctccataaagttaaattgccaaggctcctaggaatagatcctatggaagcaaggacagtgagtgtgtgtgtgtgtgtgtgtgtgtgtgtgtgttttgagacagagttttgctcttgttgcccaggctggagtgcaatggcactatctcagctcactgcaaccccgcctcccgggttcaagtgattctcctgcytcagcttcccgagtaggtgggattacaggcatgcaccaccaagcccagctcattttgtatttttagtagagacggggtttctccatgttggtcaggctgatctcgaactcgtgacctcaggtgatccgcctgcctcggcctcccaaagtgctgggattacagacttgagccackgtgcccagctgtgtgtgttttgttttgtttgagacagagtctcactgttgcccaggccagagtgcagtggcatgatcttggctcactgcatgcaacctccacctcccgggctcaagcaattctgcctcagccttccaagcagctgacactacaggcacttgccaccatgcaggactaattttgtatttttagtagagacagggtttcatcatgttggccaggctggtcttgaactcccaatctcaagtgatccgcccaccaaggcctcccaaaatcctgggattaccgggccgaccatacatgcaaacattcttacacttgctgaayacgctctactattatcacactctcatgcctcaggtactgcctaaggttgtacacagacctgtaataagatcaatgaggctaagtatgctcacaatcagaattagataattgtcaatcttcatccccattattcatctctacatttttttctcctatagtacttcccgctttctaacatgctatactatttatttatttatttatttatttttgagacagagtctcactgctgcccaggctagagtgcagtggtgtgatgacagctcactgcagtctcaaactcctggactcaaacaatcatcccgcctcagcctctccagtacaatttttaaaatttttatttttagagacaggatygttgctatgttgcccaggctggtcttaactcctgggctgtagcgattctcccacctcagtctcccaagtatctgggattacaggcacaatccactggacttgctcagagatctttattgtacactgatatrcccaagtgcctagaatagcacctggcacatagtgggccctcagtatttgttgaactaatgaatgatcattgctcctttggaagcctacaaaccccacagaagcaggaatcacaactatcttgttctaggctttattttcaaaccctagcttactgctgatacacaatggaagctctaaaagattgctggattaaagtggtagcttgagttaattaatacactgggcccactaattctttgtacrmggaagatagatgcctggctgagattatttaaagcattgtttctgtgggaaagtgttttgtttttttgtttgtttgggacggagtctcactctgtcgcacaggctagagtgcagtggtgcaatctcggctcactgcaacctccgcatcccgggctcccgagtagctgggattacaggcgtacaccaccactcccagctaatttttgtatttttagtaaaggcggggtttccccatgttggccaggctggtctccaactcctggcctcaagtgatccacctgcctcagcctccctaagtgctgggattacgggcgtgagccactgtgcctggcctgtgaaaaaatgttttctgagcttcaatttgtatatatatttatagaayaaaactagttcctacattggcagtgcaggtagggcagaaccagaagcgggacaacacacacagacaccactaacaacagggccgctcccttaggtctggtcttaaccagctctaggccaggtgaagaggctaactcrrccatgactgcgtgtctgtctcgccattgctttcttttctctagtatagatgctcagcgtctaatcagagactgattctcaactggcgtgaccaaaggacagttatattatctccagtctcaatttccttatcagtaataacaggcattttatccacactttcagtttgtgagaaataaggcatgtagacggtttcacagagggtcgggaacaagatcaacccctaacaaacgttagccattatgactaatgacttttactagttttcatttttgtcttccctcttctcactttaacctaatcaggctgggcgtggtggctcacgcctgtaatcccagcaccctgggaggtcgaggcaggcgaatcacctgaggtcaggagttcgagaccagcctgcccaacatsstggaatccggtctctaataatacaaaaattagccaggcgtgttggcgcgcgcctgtagtcccaggtactcaggaggctgaggcaggagaatcgcttgaacccgggaggaggaggttgcagtgagccgagatggtgccactgcactccagcctggacgacagagcgagactccgtgtgaaaaaaaaaaaattaacctaatagaggaaagcacgcgcccaccccctctctgagcatgcgcaccaacagaatagccgcgccctttcctaattaaatcattaaccaaggtgagggtaaggaagaaaaggaggcttggctaagtcccactstgatgtgatcacgttaaaacggtgtaaggcacattacatcataggttaaaaggcctagaaaactccgcgctccccttgccrgaactgcagactcgcgagcctaagtctccgagaactcagggattgtgaaacccgccccgactctgcgctagcagcgggatccaggcacccgcagctaactggggagggagrtgactgcctggctgacttttcattggctcagagtcacaaaggctgcaggttcttcccccttccggtcgctgagtggttgaggccgraagacaacgctcatcgtcattggctgagcccggctgtcagtcctttcgcrcctcggcggcgcggcatagcccggctcggcctgtaaagcagtctcaagcctgccgcagggagaagatggcggtcgccgtragaactttgcaggaacagctggaaaaggccaaagagagtcttaagaacgtggatgagaacattcgcaagctcaccgggcgggatccgaatgacgtgaggtaagggcctaacgggaactcggaactcggagctcggagaggcagccctcaggtcggggtgaattgggggcggggagggcggccagccttaagaagactggaacctcgaggcctgttcgcggggcggcgggtaaaaccctgttgtcgccgaggtggagaggccccaggtcccctcsgtagagcgctggtctcaggtccctgaggaaggagagcgaggcctgggtgcgccggcatgctktcttggcctgtgagaagacccggactgctgattcccgctctcggccctgcaggcccggaactgcagcacaawgccccttcccgctccggcggacacccggccygttgctggccccgagaccctgccgggacgcaacaagccgccttaccccrrcttcctgtccacgtgcagcctcctcggggatggcgggatggggacctgatccaggcttgttaatgtgtgggggcatcgaggtgaatataatttctgtgacacaggtcctggagaaacgaggaagttaaatgaaatagtacttcctgtcctgtttcagacatttagatttatttgaaactatctttttggaacttttgtgattttttctccttatgatycacatctctraaagtatttgggtgcgactgtgtgtgtctacatatgattttgcactgatwtgtaaatcttttacaggcccatccaagccagattgctggccctttctggtcctggtggaggtagaggacgtggtagtttattactgaggtaagatttcctttggacttwactcrtgctgaaactactggtactttactaaatatgttggtttgaacaaaacctgtgataaaatcaataacccagtgtttgtcrtctttgttttgtttaatgttgtaatagactagatttctgtataaawrtagttatcctgaaaaactggaggttgaagaatatattaagtktaccaattttgagtgaacttaattcttataaagtaacactataaaagcattttggaatgaatgcccgtttaaggctactttasttggaaagatttttgaaagtttaaccatattctcttgtcaaatggaaataccatttatcttgtatttcaagtgttttatgttgaacattttaaatttcaggcgtggattctcagatagtggaggaggacccccagccaaacagagagaccttgaaggggcagtcagtaggtaggtttaaaaaaagattcctgaaggcttctttagtttctgaggtaccacacaaatataaatrtttattaacaataattctgtttcagcaatattaaaattgagtggtatgccactccctgccccccccaagttctgttggtatttgactgaacagttgactatcagttccytcaaaacgcagttctgcactcatgataasctaaattttatccaaataaaggtcatgtgaagagtaaaattggaaaaattgtcaattagtaccattttttctgacttgtacttgaaaaacttaaccagtttgaaatacttagaaaatacaggagagcaaaattggtttgggcgttagttcacacattgtagtatcctttctctgctggaggaaagaataaaatgggatggagacttgatagaacaaagcttctggaaacragtcctagaagagagggcatttgcccttggtgtgcagttacataaatacctcagtggtcatttaaattaatttttggccaggcacagtggctcatccctgtaatcccagcactttgggaagccaagaccagcagatcacttgagcccaggagttggagaacagcctagatacatggtgaaatcccatccctacaaaaagtacaaaaaagttacccaggcatgctggctcacgcctgtagtcccagctgcttgggaggatgaggcaggaggatcacttgagcctgggaggtcgaggctgcagtgaaccgtggtggcaccactgcacttcagcctgggtggtatagtgaaaccctgtctcaaaaaaattaatattttctatgacaggctgggcggggagcgtcggaccagaagagaatcacgccaggaaagcgacccggaggatgatgatgttaaaaaggtattgagattgaaagaacttaaatgaatgtagtaccttcactttactacatttaaaagcacaccactcatatgctagttaaattactgagattttctttttctgcagccagcattgcagtcttcagttgtagctacctccaaagagcgcacacgtagagaccttatccaggatcaaaatatggatgaaaagggaaagcaaaggtatttccctgggggaaaaaaactctagtgaaataatgcagttataaggaaaatcaagggattgttcaagcatcctgtagtatttcttagaaaatsatgggtttaaatgaaatggatcctgttgacagtaaattttcttattctgttctttaggaaccggcgaatatttggcttgttgatgggyacccttcaraaatttaaacaagaatccactgttgctactgaaagggtatttatccaagttttgttttgcatcatatatttaagttatcaaagtagtagattaatgtttttttwaaaaaatccttaaagctcttttaagacctaactgtaaacctgaaacaaagccaagtaaaaacttggtttaacttcttatagaacagctttacttaaacattgtgttggaatataacagttgttgatatcatagctaatagccttgaaatttagatatgtgaaaaaaaaaagcctcaagtctccatttccttaaagacaaattacagtcagtaccaagkgctaagttctagttagttggtatcctgaattgaaaatgtgaagcggccaggtgcagtggctcatgcctgtaatcccagcactttgggaggctgaggcaggtggatcacctgaggtcagaagtttttcgagaccagcctggccaacatggtgaaaccctgtctttactaaaaatacaaaattagccgcctgtggtggcatgcgcctgtaatccccagctatttgggaggcggaggcaagagaatcacttgaaccctggaggtgaggttgcaatgagccaagatcacactattgtaccccagcctgggcaacaggcgcaaaactccatctcaaaaaaagaaaaaatgtgaagsatatgcagataccttttttttttctttttctttttttttgtagagatggggttttatcatgttgcccaggctggtctgagctcaaagcaatccacccacctcagcctcccagagtgctgggatgacaggtgtgagccactgtgcccggcctgcagatacctttacatagtgraaaaaaaaaaaaaaaaaaaawttttttttgagatggagtttggctcttcttgctcaggctggagtgtagtggcgtgatctcagctcactgcaacctccgcctctggggttcaagtgatttctcctgcttcggcctcccaagtagctgggattataggtgcgtgcaaccacgccctgttaatttttttgtgtttttagtagagatggtggtgttggcttctgacttcagatgatctacctgcctctaatgtttcacgtaattagtatgtgtaataactttttatcataattgaactgaaatcatatataccttttgttgtaactatttcaacacgtaagtattaaagcaggctacttaacttttagcaaaagcggcgccaggaaattgaacaaaaacttgaagtkcaggcagaagaagagagaaagcaggttgaaaatgaaaggagagaactgtttgaagagaggcgtgctaaacagacagaactgcggcttttrgaacagaaagttgagcttgcgcagctggtgagtggtaatttggaattctaagattggtaatcctttgtgtttacaaaagcactgaccctttaccttttctttagcaagaagaatggaatgaacataatgccaaaataattaaatatataagaactaagacaaagccccatttgttttatattcctggaagaatgtgtccagctacycaaaaactaatagaagagtcacagagaaaaatgaacggtaagtatgcgaagaggtccattgaattgttcatagtgggtaaggtaatatgttcatatgcacacgtttgttttctaaaataattatgattcagtgattggtttgctgtgtttgstttttttttttaaataagataataagatattctaggccgggcgtggtggctcacgcctgtaatcccagcactttgggaggctgaggcaggcagatcatgaggtcaggagatcgagaccatcccggctaacatggtgaaaccccgtctctagtctctactaaaaatacaaaaaaaattagctgggcatggtggtgggcacctgtaattccagctacttggcaggctgaggcaggagaatcacttgaacctgggaggcagaagttgcagtgagccgagattacgccactgaactccagcctgggcaacagagctagactccatctcaaaaaaaaaaaaaaagatacattctgagatgctggtgagtttgtagtataggaatatttgtatcatgatggagtttaatgtgaaagttatagacagtgcttatgcatctgtattccttaagcatttgtgtaaaattacttttttttgcatgctattattgttctgataaaatgctaataagacaaatgtgaaaaccaactcagtttctagatggaaaacacatggaaggatagacactgctaagatgatgatttatctctttgggatcagaaaaattaatatatatgattttatgccaaaactggttctgttttacagaagttttatttttcatcagacataaagattgatctgttttcttcatcagttagaaaatgtsyagttctgtctgccacaatttctagtatgtagatttcccatggatctttgcttttataattttatgtcagtttgtggttacttaattgccataatcttttgtcataactttacaaaaacaaattcagatgaagcttaatgacaatttgtgaccagttataaaattatggctttgaattttcttaatcggtaaattttacacatgtaaatttttattctttagctttatttgaaggtagacgcatcgaatttgcagaacaaataaataaaatggaggctaggcctagaagacaatcaatgaaggaaaaagagcatcaggtggtgcgtaatgaagaacasaaggcggaacaagaagagggtaaggtggctcagcgagaggaagagttggwggagacaggtaaycagcacaatgatgtwgaaatagaggaagcaggagaggaagaggaaaaggaaatagcgattgttcatagtgatgcagagaaagarcaggaggaggargaacaaaaacaggaaatggaggttaagatggaggaggaaactgaggtaagggaaagtgagaagcagcaggatagtcagcctgaagaagttatggatgtgctagagatggttgagaatgtcaaacatgtaattgctgassaggaggtaatggaaactaatcgagttgaaagtgtagaaccttcagaaaatgaagctagcaaagaattggaaccagaaatggaatttgaaattgagccagataaagaatgtaaawccctttctcctgggaaagagaatgtcagtgctttagacatggaaaaggagtctgasgaaaaagaagaaaaagaatctgagccccaacctgagcctgtggctcaacctcagcctcagtctcagccccagcttcagcttcaatcccagtsccawccagtactccagtcccakcctccctctcarcctgaggatttgtcattagctsttttacagccaacaccccaagttactcaggagcawgggcatttactacctgagaggaaggattttcctgtagagtctgtaaaactcactgaggtaccagtagagccagtcttgacagtacatccagagagcaagagcaaaaccaaaactaggagcagaagtagaggtcgagctagaaataaaacaagcaagagtagaagtcgaagcagtagcagtagcagttctagtagcagttcaaccagtagcagcagtggaagtagttccagcagtggaagtagtagcagtcgcagtagttccagtagcagctccagtacaagtggcagcagcagcagagatagtagcagtagyactagtagtagtagtgagagtagaagtcggagtaggggycggggacataatagagatagaaagcacagaaggagcgtggatcggaagagaagggatacttcaggactagaaagaagtcmcaaatcttcaaaaggtggtrgtagtagagatacaaaaggatcaaaggataagaattcccggtccgacagaaagaggtctatatcagagagtagtcgatcaggcaaaagatcttcaagaagtgaaagagaccgaaaatcagayaggaaagacaaaaggcgttaatggaagaagccaggctttcttagccattctttgcagcagaagatttcttgatraaaaaggattacctttccttgtaaagaggatgctgccttaagaattgcatgttgtaaaaaatctttttggaaratacagactgtttgtttaccagacattcttgtactttttgcataattttgtaagagttatttatcaaaattatgtgaggttccaaaatatgtaaaaatgataataataaaaaaagattaacatcccttgtcatcttttttaaatatcctatactcttcagtaagaatctgtatattttaataggcaaatctttaagtctgttcccttctaattctgtatcatacattgcttttgtagaaataaatgtgtgtttatttcattatttttgggatgtcctcgttgacacttgtataataaatatcctctttatcattttcagcttttaacactagatactgcacgtgattagaatgtttttgaaggtttcctcgtttttatttgccttggacagtttttagttgtcagagtcagagctttgcagctttgagggggaacagttctctttaaaatcatttgctattttctattctcccttgttattttaatctaagcattttcccccgtttctcatattttaaccatatgttcggtagataactaaacagtatgatctggttggcattttcttcctgatgatgggagcgtcattcttttgtcttcatggttacttgtgtgatataacatacatctgttaaagaaaatcacttctttctaggggagggaggtagaaaagtatctttcaaacttggtttttgagtttgtgtcttgtcttaactttgtgttggctctaacttaaacatgctgatatgtgttttcaagaattttgtttaaggaagtattgtatggaagtccacaaaatgaaggaagttcatctaggttttaatatgtaagcaagataacacacaagtgtaccaagtgattattaactttgttgttttacaaatttgtatgaacttggagtatctgttggccattactatacatgtgcaaataaatgtggcttagacttgtgtgactgcttaagactagtacttgtattaactttctgatgctttatacaagagagcacttaaattgcatccttcyttgagtttaacactgtagctttagccttgactttgaatattcattttgccttcccttgacaagtaaatggttacagtgaaaatgtgaagaagtatttccagttagtttttgtgtgtatataactcacttgtgtaagtggatgtgttaaaagatctctttttaaaaatccttttattggagtarttattaaaacagtaaatgcatagagctttgcacagcaatctgtatccatgagccagttccaccactagtaccttcatctgtggcttatccagcaaratgtttcatttcctgtgtgccctggcaggaaagaggttggtaaatagtgaattaaagggatgatcataaaatttaacctggttaaaaagcaccttatttgatgacagtttgtatgcactaaaatcstttatacaaattaagttttgtctactgatttgtacctggaaaatctgaacaatattcatgttgcttacagaaaaggctagtattggcttgaagctctackataggaggggtagtaatgggggtataatgaatgcttgaggggaaagtaattttcagtaatttcagttaagcgctactgatcatagtatgtgaaaggaatttttcttatatggaatgcttgatgaatttgcatgtcatccttgtgcaggggccattttaatctttyttttttttttttttttctcggagacagggtcttagtctgtcacccaggctggagtgcagtggcacaaacaatctgactgcagcctcgacctcctgggttcaagggatcctcccacctcagcctaccaagtacctgggactacaggtgtgcaccaccattcccagttaattttttattttttgtagagacaggatctcactatgttgcccaggctggtctcgaactcctgggctcaagcgttactcctgccttggcctctgaaagtgctgggattacaggcgtgagccaccactcttggtctgtgttccaattttagtatgtgctgctgaagtgagcacaggaattttaataacagattgtactaacatttttaagtggtattcatttttaggttggaaggtttaattttttaaatatagtattttagatttttttgtttccgatcagtgctttatccttgaactaaaattttatggaacttaatgttcagagaaccatggaattgcacttgaagagacacaaggaagaagaatgtaaaagtaatgacagtttcccagggggaaaagacatgcagtagtctttttttttttttttttttttgagatggagtctcgttctgtcacccaggctggagtgcagtggtgcgatctcggctcactgcaacctccgcctcccagsttcatgcaattctgcctcagccttccaagtagctgggattacaggcgcacaccaccacacctggctaatttttttttttttttttttttttgtatttttagtagagttgggggtttcactgtgttggccagactggtctcgaactcctgacatcgtgatccgcctgccttggcctcccaaagtgctgggattacaggcatgagccacggcgcccggctaacacgcagtagtcttcctactggagattacaaattagtgtttatggttgagtgcrgtggcctgtaattcccaacactttgggaggctgaggtggaaagattgcttgagcccaggagccagagaccaacctcggcaacatggcaaaaaactgtctacgaagagaaaaactagccgattgtggtggcatgagcctgagtcccagctactctggaggctgagacaggaggattgcttgagcccaggaggttgaggtgaagtagctatgatcacactactgcactccagcctgggtgacagagtgagaccctgtctaaaaaataacaaaaaaacccaaatagtgtttatggaaaacttaggagctgaaaggggatagagatggtgagttaggactgaaatcagtttagagctgtattaggaaagacaggctgggtgctatggctcacacctgtaatcccagcaatttggkagkctgagggtagaggatggatggcttgaagccaggagttcaagactgacctgggcatcagcaagaatctatctctacaaaaaatagaaaaatttagccrtgtgtgtacctgtagttctagttacttcgggggctgaggtgggaggattgcttgaacccaggagtttgaggttatagtgagctttgatggcaccactgcactccrtactggtgacagactgtctaaaaaaaaaattggcagagatgtctaaggggctattaaggaaacatcttttaagataccaasgtttgggtaaccaccaaaataaagatagtttgaacttcaatgagctgtatttccaatctagggtccttctacacactatctgtagaatgataacaatttacatgattactcaggtaatttgggcaaagcaaaagccaccataccaataatgtattgacataaattcaaaaggaaagagagtagtgattacatgggccaatgctattagagtcagtcaagatgtgggtttaaagtacataaacaagaatttcttttatggctaatattgtgtaagaatttttttatgactagtcaaactttaaaatatcttctgaaatccaacgacaaatccaacccattttccctttttgaggttaaaatgaatgttattaaatcacatagcccagaaaatgtagctatgtatttgattcaataccactactctagtaagccagtggggtagagactacaacttggtaaaaataaacgaggtatctgagaatgtttttcttacgcctgtctttgtctcagctagcaggacttttttttttttttctttttttaaatagagatgagagtcttgccctgttgcccaggctggtctcgaattcctgagcttaagcgatcctcccattttggccatcctaagtgctaagattacaggtgtgagctaccatgtccagccaatcttttcaaaaaaggaacttaaataattatactaaaaaaaatgatgatactcaaatgcctgcaactccactttccatggccagttgactaccctattcaaatttgtaatagctgccactccttgccatgactgtcccaaaatctttggtgttggccgggcacggtggctcatgcctgtaatcccagcactttgggaggctgaggcgggcccctgatcatgaggtcaggagatcaagaccatcctggttaacatggtgaaaaccccgtctctactgaaaatataaaaaatttagccaggcgtggtggtgggcacctgtagtcccagctactcgggaggctgaggcaggagaatggcatgaacccgggaggcggagcttgcagtgagccgagatggcacyactgcactccagcctgggggacagagcgagrctccatcaaaaaaaaaaaaaatccttggtgttaagtggcttggtctctctttcccactttctttcctctctttcagcacatccaaatatgtttgaaacaatgagccaagtcacatcctgaaatttgtcctcgttttcttccaaataatggaaacaacagtttctgtgacattttttgtaaatattttgtgtgctgtgcagctaaagggtgaccagagtgctccttgtacatagtagatctgaaaaggagtatggaggaatcaaaattatttggggctctttgtcaaattactcagcctttttggagatttcagatacagcccaaccctttaagaatctttgttgtcttagtgaactagtgttacctctttaaatatgttatatatctctgttttgatggatgaagaacaaagttatctaggaactgagattatataatgaagattaaaaagggcttttgtttctcttctaatttcttatttatgtgaatttagttgcctttcatactctcagacttctttttcatccagatacccctccctcaaatcacaatcctttcgtctagttttctgtattaagacctgccatttgtgatgttctggactctacatcaaacaatcctgacctttccaaaaatttgctttttgacagccagcacgttaactataaggaatgatcttttattgtggaattcagtatcccctggtgctccagagtgaaataggggtgagtggggaatgggccacaaaataaatgcacccttcaaatttaagttttctgttaatgcctgttgggcctttgttctcacagccctgtgtatgtgcttctgtttataggtacatacccacagagcagtatgttcaaggctgctgacctttgtgttagaaatgcaaaatgctaggctatgctaggcttggtgtgatggctcacgcctgtaatcccagtgctttgggaggccgaggcaggcagatcacctgaggtcaggagtttgagactagcctggccaacatggcaaaaccctgtctctacaaaaatagaaaaattagcctggtgtggtggcatatgcctgtagtcccagctacttgggaggctaaggcaggagaatcacttgaacctgggaggtggaggttgcagtgagccgagattgtgtcaccacactctagtctgggcaacagagtgagactccrtctcaaaaaaaaaaaaaaaaaaaaaaaaacctacaaaatgctattytcatgcaaatgatgtgataattgggtcaccagggaaggctttgcaggtgaagtgacctggaagaataaagaaaagctatttaatagctcttgagcatatgttgtattctaggtactgttctcattactgagttgcaacagtgaacaaaacaaaagtttctgcctgcatagagcctacatttgcaggagggacagaaaagggccaaatgagagtgataaatgttacagagaggaagtagggaaggaagattaggagttctgaagtgggatggctttgcagtttttggtaggatggtcacaatgcctcgctgaggtgatgtttagagatcagataggtaaagacgcaagccatttggatatgagggaagagaattccaagcaaaggaataacaagactggtcctttcaataaacagtaaagagcccttgtggctggagcagtgtatgcaagggaggaaaatggtaaagtaattcagagaggtaatagtcaatgaaaatggctgaggatttgctacaacaggagaaacacaacaagcctatggtcttgaacccaacttggataaatrtcgacaaccaaaataagtgactgagacctaagtcttagtcatcgaggtttattgagctagcttgtgggcatgcccggtggaaaaaaaaacttgtaaaaacttgtttcacggatgtatctgtgcctatttttttccaaagaggttctcgggaggtttagtatttatacattttcctttaaaagtctgaggagggtgagggtggcagtgagatgaatgattacagacttatgagactttagttagtgcccagcaaatctacattttacataaggtaaggtgaacatttgaagaaataggaatagaggaagcagagaggtgaaggactgattaatcttgtctttgttctctccctggggagataagctagtaatcgacattatcaatgtggagtcttgaaagggctgctttctggttagcccttggggaggaaagcctaatggcatttggtgagggagtaggtataatgaggcatgttggacctctcatcccgtcatagctatgaactgtttcccaggtttctttggggtccccttggctaagagggggtccattcagttggggacttagaattttatttttatttctcaatataaaaccacaactggccaagtgtggtgaatcacatgcctgtaatcctagcactttgaggggctgaggtgggcagatcacttgagccccaggggttcaagaccagcctgggcaacatggcgaaacctgcctctacgaagaata

SEQ ID NO: 9972 - DNA, 25164 bp, Homo sapiens
atgcctctgaatacctagagatctctaatagtaattaattgtggtgtggtgtctctaaactgctaaccattttcaaaggcccactggaaatcgtgtacgttacacagtataacagggcatatcctaacatctttatcagttatttttaaaattaaaaattaaatcgtatcatttaatgttgtaacccagattatctcagttatgtatgtaccagaatgaattttattttattttattttattttattttatttttgagacgaagtcttgctctgctgccaggctggagtgcggtggcacgatcttggctcactrcaacctccgcctcccaggttcaagcaattctcctgcctcagcctcccgagtagctgggactacaggtgcataccaccatgcccagcttatttttgtatttttagtagagacaaggtttcaccatgttggccaggatgctctcgatctcttgacctcataatctgtctgcctcggcctcccaaagtgctgggattacaggcgtgagccactgtgcccggcctatttacttattttttgagacagggtctcacccaggctggagtgcactgtcgcaatgttggctcattgcaacctctgcttcccaggctcaagagatcctcctgcctcagcctccagagaagtgggactacaggcatgtgccaccatgcctgactatttttgcatatttttttggtagagatggagtcttgccatgttgcccaggctggtcttgaactcctgtactcaagcgatctacccacttcagcctcctaaagtgctcggattacaggggtgaaccactgcaccaggcctccagattaaattttaaaggggaaaaagatatttatgaaatggaaactagataagagaaaatcattcaaaatatgaagtatttggattagggggtcagagtgtctaggctggtaggtaaaaaaaaaatccctgatcattacattagaaaagtatggagatgggaaaaaaaaaaaaaaaaaagaaaagtatggagatggaatctcagataacaattatctgaccattccttaaactaccagtgttttcaacaatgccacaggagagacttcatcaacagccctgctctgagaagtcataccttgtgttaaccaatcttgtcttttcccctgggttctgtcctgccaacccactgaccctattttcttaactccaaattgggaatcaccattcagytggcagcaagacaaaatgtcaactgcagctttcctgactactgcaggacataagttcatggcaccttctagacagcagccatctctgtgtgctgcacccctcatccccaccttgacttgtccttccctacctgacttccacttccggcttgttgtgtcgttccacaacctgggaggagaagttctccaggcagagggcagcctgcaatgtggcccgcacggcactcaggtaggggcggagagtggcagtctataggaaataacacagaggaaagggaagatcaraatctgtcacgccaaacccaccgatcccctattccagctcccatgaagmcaggtagcactgagggtgcaaggctcttaagacactactgtgaacagaacagactaggccttcgagacgccttccarggtgtagagtggtagttttcaacaggagacaattttgcctgccagggtacatttggtaatgtcgagacatttcctttctttcttttttaacctggggtcagaccagaggaatgctgagacattttcaattgtcatgacttggcaagaaggggaactgcaggcattcagtggacagatatccactaaacatactacaatgcactacaaagaattatcgagactcaaatatcaatagtgctaaggttgagaaagtgatctagagacacaccagtgaatgcatgattgtcgtcaatctattaggccaacaaatgtataggtgtactgtttgccacgcactgagctaactgggaattcaaagatgattaacactgtctctaccctcaaacagctcaactggatagcaaatatacagaaaataactatgatataaagatgacatgtgaaatatttagatttacaagtaatctatatttgcagaagaaactggttttgaaggtgaaatgggattaggaggagaaaaaggagaataaggacattctttttttttttttttttttgagacagagtctcgctctgttgcccaggctggagcgcggtggcacgatctcggctcactgcaagctccacctcccgggttcatgcccttctcctgcctcagcctcccaagtagctgggactacaggcgcccrccaccacacccggctaactttttgtatttttagtagagacagggtttcacggtgttagccaggatggtctcaatctcctgaccttgtaatctgcccgccttggcctcccaaagtgctgggtttacaggcgtgagccaccacaccctgccagaataaggacattcttaggagagggattagcttctagctgcactggtcagtccttgtatcagccaaattctttcccacctcagagctttacacatgcttgaccatctatctgtaggcttttctcctctttctttgcctaagtcatcctccagatctcagcttaattaaggaaggcctcttgagagagaccttgacatccccctataaagtatttattacaattgacaaaaaaatgtctttcatgtcttcttaatatttatttttgagagggagtctcgcttctgtcaccctcgctggagtgcagtggcacgatctctgctcacggcaatcgccgcctcctgggttaaagcgattctcctgcttcagcctcccgagtagctgggattacaggcgcacatcaccatgcctggctaatttttgtatttttagtagagacggagtttcaccgtgttggtcaggcttgtcttgaaatcctgacctcaggcaatccgcccacctcggcctctcaaagtgttgggattacaggcgtgagccaacgtgcctggccttttttatttttttttgagacagagtcttactctgttgtccaggctggagcgcagtggtgcaatcttggctcactgcaacctccacctcccgggttcaagtgattcacctgcctcagccatgcgaatagctgagatgacaagtgtgcaccaccgtgcctggttaatttttgtatttttagtagagatggggtttcgccatgttggccaggctggtctcaaactcctgacctcaagtgacccgcccatctcggcctcctaaagtgctgggattacagacatgaaccactgcacctgccctccttcatgcctttgtaagtgatttctcctttactaggctgtaaacctcatggtcaacagaccatatctattttattcacagctatatagcctccaacctagctcagtacctaacatatacagtgtctcactcatttcctgtagaataaataagcgaaagaaataattaagattagagtaacacaaaaggacagcaagagttccagagtagtaatgagtacaatgtttctgtatatgagaagcattttagattcactaaatgaggctgcagcggtaggctgaggtaagatcatggggaatcttgaatgccaggctaccaagtttagcttttctcttaagggggtaaggaactactggggctttctgaggaggaagttcatgactgcagctgcatgatggctctgtggagaatgatttgragagggaagtgagacatacagcagactgtatcacaagcaaagagtatcacaagcgttggactgacattagatggagtggataatggaactgaaaaaaaacttcccaggggctcacgcctgtaatcccggcactttgggaggccgaggtgggtggaccacctcaggtcaggagttcaagaccagcctggccaacatggcaaaaccccgtctctactaaaaatacaaaaaattagctgtggcgggtgcctgtaatctcagctacttgagaggctgaggcagtagaattgcttgaacccaggagactgaggttgcagtgagccgagatcacgccactgtgctccagcctgggtgacagagcgagactgtgtcttaaaaaaaaagaaaaagaaaaaccacttccaacgaactgtggtccagccattcaattaactactacttggtaataaaaaaagagtaactattgatacacacaacatggttgactctcaaatgtattatggtaagaagccacacttaaaagcctgcatactaaagaattccatttacatgacaatctgaaaaaggcaaaactacaggggggaaaaatcagtagttgtctggggtgggaaggagaggactgattacaaaagggcttgagggaactttttggggtgacggaaatgttctgtattttggttgcagtagtggttacayaacttgactttttttttttaagacacgggatcttgctatattgtccaggctgaagtgcagtggctattcacagsagtgatcacagtgtactacggcctcgaacttctgggctcaagtgatcctcctgcctcagtgtcctgagcggatggtactacaggcgcatgccaccatacccagcaartttttgcaacgcttttttttttgagacggagtcttactctgttgcccagtctggtgtgcagtggcacgatctcgactcactgcaagctctgctttctgggttcacgccattctcctgcctcagcctcctgagtagctgggactacaggtgcccaccaccacgcccrgctaattttttgcatttttagyagagaagaggtttcaccgtgttagccaggatggtctcgatctcctgacgtcgtgatccgcccgcctctgcctcccaaagtgctgggattacaagcgtgagccaccacgcctggcctytgtcaacagttatagaaagtaaacctaaaaagggtgactggctccgtgacgcctgtcctttcatgaataaaacagatgtagtctcatgtaatacctcaataaacttgaacttttaaaaatcaagaggcatgtgccccactagaaaaaaaaaatacagatttttagcagagacatgaggtcacaaaagtttgccaggatagggaacccaggaggaagaacaaatttagaatagaatatgagttttgaactagaggtctaatttcaaggtctcttcaagatatccaggcaaaccttgaaagagagctgagaagccagattaggagtcatcagaatgaagaaagttatcgaagccaggagactagatcggtatcaccagggaaggtgtgacgaagagggagatggtcatccaaagtcacaactcccaggaatgcccacaygtatgaaaaaggcccacaygtatgaaaaaggcccacatgtatgaaaaagggaggacttccaggaagggagggatgagcagtatcacagctaacatacactaaggctgacacagttcagttctgaccaggaagggcctgaatggaagcaacacgagagatcctccaatggggtggaagcagggctggaggtaccaagaatgggataaggaagtgtggccgcctgccttaagcaactgtagggtcaggaaggcagaagaggacaaagggcgtatgtcgtgaagttccactgtggataggcaggtggacttgcttcatgcctcagmggctaagaggccgactacgtaccctcgaaatgctccaaagagcctaggagaccccacttccgggttcctacagggctcaggaaaagcccctacctgcttcgaaggctgaccgtgaagccacaaggcccacttcataccagggagtacccccactcgccccttcctcacctcgggcccccgccccgtctctttttcccaccctcatcgtgtccccacaacccccggacatccctcrgccccgcgcccctgcggcaaagccacatctcccaccgacccactgccctgaggccgaacagccgggggtccctggccgggggcccggctctctcaccatcgcgggcgctggctgggccggaaagcggaagtayggaagtggccagccccgcgatgcctgccctttcgcgagaagcgcagctacggtctccgcccggacttccggacggtaccatctatgctccgagcggggtagagagcccttacgaacgcttgggccttccggaagttttccacctagggctgtctcggtatttttaaattcttgcactcgagtcactatttaagctcctccaggaatgggtgyagcttccctttgtgccttcggycttcttgtcacctttgccacagcctcccccaggtatgcaatggtacagcccagcttcagattgggcaccaaattaggacaagccgaagcggacgagcccttcgtttcttccggttctgtacccccatcctttctctcgcccctcctacccgcagctcctggcgctcggcggggctaactgcagcgsggagatctcggccgccaagctccgcctcccgccccgggctgtgccccggggctcgcctgagkccgaccacccgcaccccacctctagcggctttgctcgaggcccaccttcttcccacccccggcaaactccagtaggctcgccctcgctgactccccgcccccgcgtcaactgcaaggggcccgcccatagccagttccggggcggttgctcacatcgaccggaactccccgccccctcccgcggcccctggggccgtaggaggccgcagcgaggaggtagagggggcgggggtcgcactagggtgtccctagagaacgaggactctgaaggcgggacatttgggcgacccccgggcggggccarccattaaacagtcccacttctgtgccagacactgaactgggctcttgacgggcatcatctcttaatcctcagaacatcccagggaggtaggtactattgttatccccatttttcagattcagacttttaatggggaaacagaccgagackwcttttgtccccattttacagatggaaaaactgagactgaaaaaggtcaaataacatgttcaggggcatataagtagagaatggtaaagcctgggcttgaacccaggtctgtctggcttaccagcccacgttctaaaccactgttagtgactagagaagggagaaaggtggaatagggtaagaaaagaggccaagagtcccagagaacatggtaagaatggggtgcttggaactcaaagtcttagcagaacccaagagaaatagaagggaaggaaagagcatcagaaaggcgaggcaaggcatagcagtatagcvtggtgatcagggtgcagactcaagactagcggggttcaaattgcatcttggaagcataggcacatacccacccttacagagtctcagtttctttctctgtaaaaacgagatcacaatggtccttgttcatggtgctgagtgagaaattcagtgagataaactgataaagtgctctgcacctagcttggtacccagttaagtgccctgtgagtaggaactgtgccatcaattttgtcagtaagggactgaagctgggcttccttgaggctgtccctggaggtaagaagcccttgggcttttctcagaccactttgtctcccatcaatggccctgtcctctccagctccacaggatccccatatcctgggccatgagtgagttgaaagactgccccttgcagttccacgacttcaagtctgtggatcacctgaaggtctgtccccgctacacggcagtgctggcacgctctgaggatgatggcatcggcatcgaggagctggacaccctgcagctggagctggagaccctgctgtcttctgccagccggcgcctgcgtgtgcttgaggccgaaacccaggtgataaccccagagaggggccagcaccagagatggactgcaacaagttatgggatgggtcattgagttagccccatatgctgagacttggggtacaggggtttgtggggagagggagagagacgcaaactgggtttgcatgacacaaaaaatacacaagaatatgcatgatcctcttaaattgcaagatttctaattcagtaagcttttattggcaccccactcatcccccattgtgttctgggtcctatgctagtcattagagaaaggtaattaggacagttatggctgtcagggagcttggcaactaggaaagtgagaaagtcaagtacataccaggtgatgtgatgttgtggttagcagtcctagggaactggaatggggaaacctggatttgaatcctggcataagcgcttgctagcattgctgtttcctagctatgtgactttgagaaagttgcctcatatctctgagtgtcagtttccctatctgcaaagtggggtgaataataggacctaccttagtgcttttgtgaggattaaaagagaattttttgcaaaaactcagcccaatgccagacactaagtaagtacttcagatgttatttatttgctactctgatgactttattcactgcataaagatgccttgagccttgtgtgccaggcgctatgctgtattctgcaaaatagagatggttaaggtgggctttctggtcctcagtagcttatggtctagttgaagagacaaggtgtgatggtcattccagtgtgaccaaacaacacgattgggtgcacgttggagctgtgaagtgccagagacttgtggaggaaggaggtgccaactggacctaaaaggatgaatggaattaacttgtccctgggaatccatggaccctccttgaggaaggctatgactcaagttgtattttagcatctaagaacctgggtaactgattgagagaaggcatctcmgtagtggtgacatcgaagtgaaggtttgctgagaggactcttctgttaaacagtatgtgactggcatgggtgatacagaagtgaatcagtatagatgaacaagtgaatgagattatgagaagtatatgaataaagttctaggaggccaggcacagaaaatgagctgaattttgaaggatgagtaagagtttactaggtaaaaagaggatggggaaagacccaggagcctctgtagattctagatcctaatttattcactagaggaaagagatattctgtgttttcccttstccccctcagtgacactttctgtaaatttcagatcctcaccgactggcaggataagaaaggtgacagacgattcctgaagctgggtcgagaccatgaacttggagctccccccaaacatgggaagcccaagaagcagaaactggaagggaaggcaggacatgggccgggccrtggcccaggacggcccaaatccaaaaaccttcagcccaagatccaggaatatgaattcactgatgaccctatcgacgtgccacggatccccaaaaatgatgcccccaacaggttctgggctagagaacatagaagggggcctcaaggttctggtggtggaggcactggtggggcaggggcgcccactcaggatctgcttctccctgcaggttctgggcttcagtggagccctactgtgctgacatcaccagcgaggaggtccgcacacttgaggagttactgaagcccccagaagatgaggctgagcattacaaggtagaaactctgggccytgatagacatgatgcggaacaagagagttcagaggtgcctgagaagtaaagctaccaaagccaygcatcatcttccttccccaaccctgcccagtctgctgtctgctccatcagtgcctccagacacctaggcccaaactcagctttctccgtgcactgcctcccctctaccccagccaaatgtcaacacgccctcaagcatctacttaagtgaagtctgcccatgttcctttatccccatcccctctgctttggtccaagccttcatcaacttctatccaaacagcctcttaactctcttcctgtttcgaggcctctggaggaacctttcttctttctttaagatataaaacttgggctgggagcagtggcttatgcctgcaatcctagcactttgggaggccggggcgggcagattgcttgagctcaggaatttgagaccagcctgggcaacatggtgaaaccccatctctaccaaaatacaaaaaattagccaggcatggcggtgtgcgcctgtagtcccagctactcgggaggctgagtcaggaggatctcttggacccgggaggtggaagttgcagtgagccgagatcacgccactgcactccagcctgggcaacagagcaagactccgtctccaaaaaaaaaaaaaagatataaaagtcacctcaygcctgtaatcccaacactttgggaggctgtggcaggcagatcatctgaggtcaggagttcaagaccagcctgaccaacatggtgaaacgccgtctctactaaaaatacaaaaattagcctggcacggkggcatgcacctgtaatcctggctactcgggaggctgagccaggaaaatcacctgaactggggaggcatcggttgcaatgagccaagatcgtgccactgtattccagcctgggtgacagaaggagattccatccattaaaaaaaaaaaagccgggtgcrgtggctcaagcctgtaatcccagccctttgggaggccgaggcgggcagatcacaaggtcaggagattgagaccatcctggctaacacggtgaaaccccgtctctactaaaaatagaaaaaattagccgggcgtggtggcgggcgcctgtagtcccagctgctcgggaggctamggcaggaraatggcgtgaacccgggaggcggagcttgcagtgagctgagattgygccactgcactccagcctgggtgacagagcaagaytctgtctcaaaaaaaaaagaagatataaaactatgttttaatgatgaaaataaataaaacatgctccattaaagaaaatttagaaaatacagaaaaatgttgagggagaatcctcccataggtgagctgtcatgatcagatgtgctcatgacatggcgctgcatccaggcctkycttcctcccgttatctacaggatcaagtccacgcatcccagtccttgctggcacagctccagtgcccctctccattttcctcggccatatccctcttcattgccgtgttgaccagtcccaccaagtatctcgccctcattccaggacaccacagcctcctcgctggtctctgggcctctggcaagctcttctctccctcttgtctccttgacagacttgactcacccttcaaggccctgatctcatgttacctccaccaaagcactctttcagattccccagcagaaagttagtcagtctctcctttgtgctgccacaacactttgatctctctctttcacttcacttatctgatttcttaaaaatttatctgaaaaagagttcatacagacagcagtaaattcaagcaatacaaaaggtaattccctgtcacccgtgacctgaaggctcctaattctctcgagaggcaattgctgtgacctgagacaatctgtgtacgtattctgcaccttctatcttgggaattatttcagattggcttctgtgtgtgtgtctkagttctttttggacctgtctcccttactagagtgtgaagtacaggttttatcttygttgtactttcttacctacacctgacactgggcttggccttggactagggacttgagagagatataagataggtaagtgaatgaatgaatgaagcatggctggccagtgcttacccactcagggttgggtgccatcttttccacagatcccacccctggggaagcactactcccagcgctgggcccaggaggacctgctggaggagcagaaggatggggcccgggcagcggctgtggctgacaagaagaaaggcctcatggggccactgaccgaactggacactaaaggtaggcctctcacctccctgccaaccccaggtcaggacttgaattccagaacttcagcccacctcccctcctttcctgtgcyygcttagatgtggatgccctgctgaagaagtctgaggcccagcatgaacagccggaagatggatgcccctttggtgccctgacgcagcgcctcctgcaggccctggtggaggtgagcagcctaasccaaaagaggaaccatatttactttgtgttttaatgtgttatgcttattttttatcggaatttatcatacatttattaggttggtgcaaaaataggttggtgcaaaagtaaaaacctggactaatatatagcaaaagattgggaataatatataacttgtgcacctaatagaaaagtgcacagatcataaatgtacagttttcacaaatgagcttgyattaccagcctggagattacaaaatgaaacattactatatcctagaagcccctctcatgcccctgtttttctccaactttccccaaaggtagccttactccacaattacttttgctaagcatctgttggaggggctttatacacatcctcccactggaggccaggacagtggttaacgctgtgttacagataagaagattgaggctcagaaaagggaactgttcacttgaggtctcacacaccaggattcaaaccctagcttcaggggccctgtctttatacctgctggttgaccttagacacaccctcacactctttcacctcattgagactcagttttctattctggctcaaacacaakagtttatctcatggaacagtctgggtacatgttgcaggttatctaaggtaggggaaggggcaggtctctatctcatatcatcagacagggaccccagctgayggtggccttgcagtctgcacaaggtcactctgggcgtaattgtcactccagtcccacagaataagagcaaggaggccgggcgcggtggctcacgcctgtaatcccagcactttgggaggctgaggcgggyggatcacaaggtcaggagatcgagaccatcctggctaacatgatgaaaccccgtctctactaaaaatacaaaaaaattagccgggcatagtggcaggygcctgtagtcccaactacttgggaggctgaggcaggagaatggcatgaacccaggaggcggagcttgcrgtaagccraaattgtgccactgcactccacagcctgggtgacaaagtgagactccatctcaaaaaaaaaaaacaaaacaaaacaaggaggagtgtgtgaaggaaactttttggcccatgcctagytatggctcttatctcttctgatcactttcccctggagagaacttgtcacatgaccatacccgcctgcaagagagcctgggaagtacaactggacaggcattgcctagctgccgtggaggaaagragagtatggcattcggacagctagcatctccgccacagcaggcctagcacactgcctggtgcgttgcagacgcttcacaaaccttagctgttcattaccatcattgagtgttaatcatttctcttctgtgttcctttttcttcacatcagtacgaaaataaaagggatttctagaatgatcaaagcaatttgggattggtatgggaaggcttcccacggtaggtgggatgggaaagataaaaggatatttctggtgtttgaagactgtcagtgtaggtcagaaaggagcaggaaagtggaacagctatttttccttccactcatttttgtggtcttctaggaaaatattatttcccctatggaggattctcctattcctgacatgtctgggaaagaatcaggggctgacggggcaagcacctcccctcgcaatcagaacaagcccttcaggtgagtggtgtcctatccacaacccacagtctggcccccgcttctgttggcttctctccatctcaacctggggaagtcctcatcagtaagaggctgggggcagttaggtgaagcctaatagcagtctcaagtgtgagtgatgacccagcgtgtctgcatgcacagactgagtgcagggttgttcagcacagaactgttcataccataaataacccaaatgtcctgctgaargggaatggttggctaaattggcataactccatatgatgaaataacttggggctattaatcatatagctgcaagtatagagaaatatagttaaatgacatgaaaagatgtaaattatagagtgacaagtggagaaaatattagttgtagcccagtatggatggtataatactatttttacttaaaatatatttctttttttctttttctttttttttttttgagatggagtctcgctcttgtcgtttaggttggagcgcaatggcgcaatcttggctcactgcaacctccgcctcccaggttcaagcgattctcctgcctcagccaccaagtagctgtgattacaggcgcctgccaccatgtatggctcatttttgtatttttagtagagacggggtttcaccatcttggccgggctggtcttgaactcctgacctcaggtgatcctcccacctcggccttccaaagtgctgggattacaggtgtgagccaccatgcctggcttacttacaatatatttaaatatgtgcacataagggaaaaaacctggactaatatgtagcaaaagattaggaataatatataacaaaatctggaatatatataataatatataacaaaataatagtaattctctctgggttgttggcattatgggtttttccatattttttgaatagtagatacatacgttgcttgttttaaaaaccagaccagatgtgtctgtccctccctttgtatctggatagatacagagggggtgcccaaagggaaaggcaggttttcactgaccttgggaagccctgggaacctccaaggtgggcccttctccaagctggctcttgagtctgacgggcctgcctcycgctgcagtgtgccgcatactaagtccctggagagccgcatcaaggaggagctaattgcccagggccttttggagtctgaggaccgccccgcagaggactccgaggatgaggtccttgctgagcttcgcaaacggcaggctgagctgaaggcacttagtgcccacaaccgcaccaagaagcacgacctgctgaggtgagcgttagcaggatgcacagtcccgggggtggccttggaggctgtggccacggctagtcacctttcaggggttttacaacaggctttccaatcctggctggcctctaaatcacctggagagcctcgaaaaaaacagcagtggccagtccaccgggtatgtcccaaacaaattctgattccacagagtggggctcaggcatctgtgactgaccgattgatttgatttgtttttgttttgtttttttttgagagggagtctcgcactgtcacccaggctggagtgcagtggcatgatctcggctcactgcaagctccgcctcccaggttcatgccattctcctgcctcagcctcctgagtagctgatactacaggcacccaccaccacgcccagctaatttttttgtatttttagtagagacggggtttcaccgtgttagccaggatggtctcgatctcctgacctcgtgatccacccgcctcggcctcccaaagtgccgggattacaggcgtgagccactgcgcctggcctagtttggttttttaattatggtaaaggcataatataaaatgtatctccatgggaggctgaggcaggagaatcagttgaacctgggaggcggaggttgcagtgagctgagactgcaccattgcattccagcctgggcaacaagagtgaaactgcatctcaaaaaaaaaaagaaaaaaaatttacgcttcttaaccatttttaagtgtacagtttagtagtgttacccatattcacattgttgtgtgatttattttttgtcttttcatgcttcttttctttttatccccaaagttttgttattaaaaatttgatacacacagaaaatctgaaagaatcatacaataaacatcagtatattctccacctagactaattaactgttaacattttgttggagatctgkgatttttatttgctcatcacaagaaattgaccagtgttttaggacatgttcttttgggaatccatcacagtgcctgccattcatttgatgtcaactcccatccatcttgttctgcattgatcacragggtataggtgacatcttgaggaasactgtggaatagctaccctttaggtaaagagatagggaagcaacccgaacaagtctctttgcttctcacagacaagtgctgtgtcttaacttcatagagccctgacaggacagggcacattcattcatttggccttttttttttttttttgagacggtgtctcactctgttgcccaggctggagtgcagtgccatgatctcggctcactgcaacctccgcctcccgggttcaggcagttctcctgcctcagcctcctgagtagttgggattacaggcatgcactaccatgccaggctaatcatttggccattcttaytgtctcttagatattgtgctgggggccagcaagagaggcagagcaagggacttgcagattactagcagatgatcagtaaagataagtgccattaaaaggagaggtagttgctgacaagctgccagggtatttaaggataagagtgactaatgtatgctgagggcctactgtgtgtcaggggctttatgtacactctctcaagtgtcttgacaacaacccaggagggaggagctattttcgttgtttaccagatgaggaaataaaggcccagtgaagcgaaatgctctgctgaaggtcacacastcaataaacagcaagctgagacttgaacctgtggttgaatcaaagcctctttctataatagtttgttttctctgaaaggtgagaagaagaaaacacagatggaagaggcactgagggaagcagagggagagagaggaagagagagaaaagcaggcatgtgcagttacagaagtagtgggccctagctgggcctggtggctcatgcctgtaatcccagcactttgggagactgaggtgggaggcttgtttgagctcaggagttcgaaactagcctgggcaatgtagtcagacccccttctctactaaaaatttttaaaaatcagctaggcatggtggcacatgcctatagtcctactcaggaggctgatgtgggaggattgcttgatcctgggaggtagaggytgcagtgagcttgatcaggccactgtactccagcctgggtgacagagtgagacctgtctcaaaaaaaaaaaaaaaaaaaaaaaaagaagtaatgggcaatgaagaaatggcttgcagctctcaggaaaccagagcacagcccttaccctgctgcagagcagctgcaaggccttaagcagcccctgacctgagcatctccttccccttctggaaaactggcaggctggactcaatcactaagtgaccttccagctccaccatcgatgaaatgtataaatcagaccctgttcagagagattgmtctggtgtctcacccacctcctgtcagcctcaggctgcctagaccttagggggctctggaatgcagatgccgacgtaagcaggccttctgctggcaccggaacacctgaaacaacagtgtttaaaaacaagagtttggccccagcctgctccagatctccycctcactaactgtgggatcctgggatcatctttgagcctcattttcctcacgggtaacatatgaataatagtacatattttgcagggttgttaggattaactgaaagacagagagagagagtgggtgtgcctgtgtgtgtgtgtttgtgtgtgtgtatgtatatatatatatattttagagacagggtcttactctgttgccgaggttggtctcaactcctggcttcaagtgatcttcctgcctccatctcccaaagcgctgggattacaggcatgagctactttgcccagcctactgtgtatatttttaagacctttttttttttgaagacacagtcacgctctgttgcccagactggagtgtagtggcatgatcatagttcactgtaaccttgaactcctggcctcaagcaatcctcagctcccttggagttgggactacaggtgtgcactaccacacccagctaattttttaaattttttgtagagacagtctcactatgttgctcagactggtctcgaactcctgggctcaagtgatccttctgccttgggctcccaaagtgctgggactgcagatgtgaacccccatgtgcagccaagactttattcttctagagcagttttaagttcacaacaaaattgagagaaaggtacagagaattcccgtrtctccctgtccccacatgtgcacagcctcccccgtgatcaacatgagttaatatttttcaggagcttaagatagtgccatgtaagtgtaggtcastaactgctttttggtcacgactgtatgacacaatccacaggcatgccagcctgggctggtgggtaggctcggtcttgaagagggaggggttgttctctgraggtgggctgaccctggcacctggctggctggtccccacaggctggcaaaggaggaggtgagccggcaggagctgaggcagcgggtgcgcatggctgacaacgaggtcatggacgcctttcgcaagatcatggctgcccggcagaagaagcggactcccaccaagaaagaaaaggaccaggcctggaagactcwgaaggrgcgtgagagcatcctgaagctgctggatgggtagccctcacccctgcctcakgctgattatctggcctaggggaggggaagggaggcccacttccttctttgggcacaggaaacattggcctgtggctgtccctcaaatggcggcagtctctagagggcyrtggcccttcccctgaggtcttttggcctagctctgtacaaccaggacacaggaagccctgctgggctagcctgaggcctagtctctgcttggtccccgagatggggttggaggggacttcgtttctgggtcttcctcttcccctctttaccatcccccactccctaatcccctacccctgtctccccttcaaggacttctcccttgtggttttgtaaagtgcaaacttaagaataaagtgactgctgtggtttttcaaaaaaagcatccagtctttgaatgtctgttacagtggggaggaaggaaccagtgtgggtggtaaggtttgtggggggtatgcttggtggctctcagcccatggccactaacccatggcattcagtcagggagaactttctgagtacctctttctgaggatacttgtggctgcacgtaacaatgcccccccagctcaaagtggattcacagtaaggaaatgtgttggctgcaggatgggcagtcctgggacagagtggccttcacggttagccaatctagcaattcttcagggtcatcaagggtccaggtttcttttttttttaatttaagttctagggtacatgtgtacaacgtgcaggtttgttacatatgtatacatgtgccatgttggtgtgctgcacccattaactcgtcatttacattaggtatatctcctaatgctttccctcccccctcccccaagggtccaggtttcttaggggtcaccacactgccctccacagtgtcgacctctgcctaaggtgagtccttctctggctgtagtgtggcagtggagcagttggggccagatgcttcctcatttacatccagcacaggagggagccggagccagcgggcttccatggcccatctacagaagcaagaagccttttcccagayaccatcatgtttcagtggcccaaactcagtctcacatgcccattcctcagtcactgtggcaaaggagactgtaatggctttatgccagtcagagtggagtttgctactccatcaaggtggtggagagagagtaaaacccaacaagatctgagtaggaaacagggaagtgagtgctagatagaccaccgacaacgtctcttccacagctggggcaggaagcttggcctaagggacacagatgaataaatatgctctggtacctgcctcaagttgttcccagactggtctgagagaatcagggaataatttgcaatttactgtgggaaggttgaggtccacgcaggagagaagggagggtaagattccctaaggaagtgacctatgaactgagccataaagaaggagggcgaacatggccaacattctcgtatacccagcacctctctgttggagaaatgttccttccccatcacacatggttcttgtccaactgccaaactagggtgcacacatgaccccagcttggccagtcaagtgccaatccctctagccacaatgattagtcccagaagcaggcatgtaacccaagctgggtcactcgaggccctccataagattgctctgtggatgctgagaggagagttccacttcttgttggaccataagccatagactataaactcagtctaccccagtgacctgctctcctcccatggggaaaaacctgcttgagaataaagccagctcagaaaagcagagccaggagatggagaagtgctgcatccagctattcttgaagccaccggatcctcccttagacttcccacatatatcagcccacaaaggcttcttttggcttaaactagtttgctttagagttttgtgatttgtaactaaaaaaggcctattacaagtgaattttggcaaaaagaaagatgaagtaggatcctgagagagaggacagcatgaggccctgcctcccactaggtgctgggccaagctgctgcaatttctcagtgactcattgtccccaggttgctcacagccttctcagagagaaaagacacccacacakgcaatgatgagaaaccaactctaatcataatgataatgcaatgaagkgctcaktaaatgttagtatgcaccaggcattgttctgaactcattcaactacctaatattatggggtaggtatcagctaccccataataacatcccatttacagatgaggaaactgaggcttaggaggttacataccttgctttgtcaagcaattgagtggttgagccaacattcaaactcaggccatttggcttacagagagagcctcttcattacaactcactggggccccactcccattacagtgtatgtgaatggtactccctatacttgggcagtgcccaacctgtgcagccatatatggcagctctgcttgaagacccccctcctcttaaccactcacttccatgttcactgggccacaccataagtatggtgggcgttgttggtagagagttccaagaacagagacagttttgtggaggaggtgggatgagagctgacatcccaaaattggatggaattgtgaaagaaggaagacagatataaatagaaagaagaaccctagaagaccgactgggcctggttcaccagagaagaaacttaactttcaaggatcagtcatgagcactctagctgttctctgttgcatacctactatctgcctggcactgtgccaggccctttacccacccctcctatctgatgcttaccatgcacctccaaggagagtaatattccagcctgcagatgacacagagactcaaagaratgctgtgccttgctgaggccatgcagccttgatgcaggaatagttgctgcccccaggtagcaccatccctggcagagttcttacaatcatatcagtgtctgctggagccaaaagatgcctcctttatgagtgtggaggaagctgggttgtcatgaggagggcggattagttccagtacctcaagtctccaaatttaatwcaaaacaattctgattccttatcactagtttggaggcaaagccttttgtgtcttggccctagaaagcatctgtcttgcacatcatggtctccccagagttccaaatgccttacagctgactttcagcaacaccagggtgagtgagaacrgggagggtgagctctgacccacagtgggtccccagcccctgtctgctcctgagtactctgggcaccaagtgctctgggtcccagttggctcctgctgaaaagaaagtgatggcaggagctttgtggaaatgtggtcggggagtaaatttatttcttggcctggggctcaggactcaatggaaagaaccaagtccagtggactgtaactcactcgtttaggtatcaataaactccccatttcttctcttcacctacctaattaccctattcacttattcactccatccacacacctccacttcttcattatacttttgttccctcattcagtgaccctgtcaccatggctgagagctatggaggtgactaaggctccagaaatggggacacactagacagacaatcaaaacactaggccgcaagagcaataagaagactgcaggccgggcacggtggctcacgcctgtaatcccagcactttgggaggccgaggygggcggatcacgaggtcaggagatcgagactatcctggctaacatggtgaaaccccttcgctactaaaaatacaacaaattwgccgggcgtggtggcgggyacctgtagtcccagctactcaggaggctgaggcaggagcatggcgtgaacccgggaggcggagcttgcagtgagccgagatcgcgccactgcactccagcctgggtracagagcgagacttcatctcaaaaaaaaaaaaaaaaaaagaaaagaaaaaagaaaaaagaagactgtgcaaagttggcagggacctggggcagagaaagacttaacaacagcttagagggtcaggaaaggcttcagggaggatgtggaaagaaaattgctgggcagaagataacattccagacaaaaggagcaaggcacagaggtgtgaacagctggcctgcttagagagaagtaagaactgcagtgtgactggagccctgggtgtgtggaggggaaaggaaaggataagagatgaagctagaaagtaggttgaagaccaggctgggcaagggtttgaatggcagattaaggagcatggactttattctctagacaatggtgctccaagtgtggtycctggactgccagcaacagcatcacttaggaaattgataaaaatgcaaattctcaggccacagacctactgaatcaacagctctgggtgtatagtcaggcgcygtggctcacacctgtaatcccagcactttgggaggccaaggaaggcggatcatctgaggtcaggagttcaagaccagcctggccaatatggtgaaaccctgtctctactaaaaatacaaaacgtagccaggcatggtggcacgcacctgtaatcccagctacttgggaggctgaggcaggagaattgcttgaacctggaaggtggaggttacagtgagcagagatcacaccactgcactcaagcctgggcgacagagtgagactgtctcaaaaaaaaaaaaaaacctctgggtatggggcatagccttacattatatataacatgccttctaggtgattcctggtgcatattaaagtttgagaatcacattctgaagtaacagggagccactggtggtttgtgagcagaaagcactctcagagcagcatagaggctggactaatgagagggagtgagggtgaagttggtgcaaagaaatacaagtgagatgtggaatgtggcagactggtagatgtcctccaaaatctgtttcagtaatatctcatgtggaaactggaatcatacattgaaaatactctccatacatttgatagcaaatggaaattaagtttcacatggtgatttcttatcaaaacctttaatcaaaagctcagggcatattgttttttgtttttttggggtttttttttgagacagggtcttgctctgttgcccaggctggagtgcagtggcataatctaaatcactgcaacctcagcctcccaggttcaagtgattctcctgcctcaacctcccgagtagctgggrttacaggcgtgtgccaccacgcccagctaatttttgtatttttagtagagacagggtctcaccatgttggtgagaactcctgggctcaagtgatcctcctgcctyggcctcccaaagtgctgggattataggcatgagcccagccaaaaaaaaaaaaaaaattactcaaacatcttggagcatatagccttgtcctaatttaggattacttctctgaaattgwttgccagaagaggagtccctgaatcaaaaggcctcgacattatttaagcctttgatgcatattgccaaattgctttccaaaggatctttagcaaatcattttcccaccagaatgtaggactactcattcctcacatcaacatcagccttcagtgttaccagctttttaaacttcaaatttgaaaggctgcaaatgaccttctattttgtacttttttgtatcactagtgagatacaaaatgtcctgtgtttactgtgttttatctgtatcctttgaccatttattaggttcttactgtttgttatcaatcctgtgtgctgtttatataataaatatattaagccattgtctacaaaacatttccccagtctgaagtttgcctttcatttttggctaccatttcggagtagagtagggttttcactttttgaaaaaaagttaaamaaaagtaacaaaagttaaagttttktttttttttttttttttttgagacagagtctggctctgtcattctggctggagtgcaatggtgcaatctcagctcaaygcagtctccgcctaccaggttcaagtgattctcctgcatcagcctcccgagtagctgggactacaggcatgcgccaccacacctggctaatttttgtatttttagtagagatggggtttcactatgttgcccaggctggtcttgaactcctgacctcaggtgatccttctgccttggcctcccaaagtgctgggattcaggagtgagtcaccacgcccagccaaagaattttaaaaaataaacctgtccatcttttccttgttatttcttccattttctctaatcttagttaactactcactctttcaatagcttcttttctgtcaggttcaagaattcatggaggccagccatactggctcacgcctataatcccggcactctggg

SEQ ID NO: 9973 - DNA, 18239 bp, Homo sapiens
acttttcttatcaaagatcattaaaatttagacctaaagggaaaccttgccccaagaaaattcccaaaggatcaaaaaatacagaagctttagtttgggaagaatgtgtggccaatagtgcggtaatattacaaaacaatgaatttggaactattatagattgggcaccttgaggtcaattctaccacaattgctcagggcaaactcagtcatgtcccagggcacaagtgagtccagctgttgaaagygacttaacagaaagtttagacaaacataagcataaaaaattacagtctttctatccctgggaatggggagaaaaaggaatctctaccccaagaccaaaaataataagtcctgtttctggtcctgaacatccagaattatggaggcttactgtagcctcataccacattaggatttggtctggaaatcaaactttagaaacaagagatcatcagccgttttatactatcgacctaaattccagtctaacggttcctttacaaagttgtgtaaagcccccttatatgctagttgtaggaaatatagttattaaaccagactctcaaactataacctgtraaaagtagatagtttacttgcattgattcgacttttaatcggcagcaccgtattctgctggtgagagcaagagagggcgtgtggatccctgtgtccatggaccgaccgtgggaggcctcgccatccgtccatattttgactgaatattaaaagccattttaaatagatccaaaagattcatttttactttaattacagtgcttatgggattaattgcagtcacagctacggctgctgtggcaggagttgcgctgcactcttctgttcagtcagtaaactttgttaatgattggcaaaaaaatgctacaagattgtggaattcacaatctggtattgatcaaaaattggcaaatcaaattaatgattttagacaaactgtcatttggatgggagacaggctcatgagcttagaacatcgtttccagttacaatgtgactggaatatgtcagatttttgtattacaccccaagttgtaatgagtctgagcatcactgggacatggttagacgccatctacaggcaagagaagataatctcactttagacatttccaaattaaaagaacaaattttcaaaacatcaaaagcccatttaaatttggtgccaggaactgaggcaatcgcaggagttgctgatggcctcacaaatcttaaccctgtcacttgggttaagacgattggaagtactacgattataaatttcatattaatccttgtgtgcctgttttgtctgttgttcaagtctgcaggtgtacccaacagctctgaagagacagcgaccatcaagaacgggccatgatgatgatggcagttttgtcgaaaagaaaagggggaaatgtggggaaaagagagatcagattgttactgtgtcgtgtagaaataaktagacataggagactccattttgctctgtactaagaaaaattattctgccttgagatgctgttaatctataaccttacccccaaccccgtgctctctgaaacatgtgctgtgtccactcagggttaaatggattaagggcggtgcaagatgtgctttgttcaacagatgcttgaaggcagcatgcttgttaagaatcatcaccactccctaatctcaagtacccagggacacaaacactgcggaaggccgcagggtcctctgcctgggaaagccaggtattgtccaaggtttctccccatgtgatagtctgaaatatggcctcgtgggaagggaaagacctgaccgtcccccagcccgacaccygtaaagggtctgtgctgaggaggattagtaaaagaggaaggcatgcctctttgcagttgagacaagaggaaggcatctgtctcctgcccgtcccygggcaatggaatgtcccctgggcaatggaatgtctcggtataaaacccgattgtatgttccatctactgagataggggaaaaccgccttagggctggaggtgggacatgcgggcaacaatactgctctgtaaggcattgagatgttttatgtgtatgcatatctaaagcacagcacttaattctttaccttgtccatgatgcagagacctttgttcacgtgtttatctgctgaccttctctccactattatcctatgaccctgccacatccccctctccgagaaacacccaagaatgatcaataaatactaagggaactcagaggctggcgggatcctccatatgctgaacgctggtcccctgggcccccttatttctttctctatactttgtctctgtgtctttttcttttccaagtctctcrttccacctaacaagaaacacccacaggtgtggagggacaacccaccccttcagaaagtaatagtttatttcatttatttatattttttctctccttttcacaggtgttgaacagtttattttactaatgcatgtggtttaccccaacacatcccaaatatcatgattccaacatgtggtgttggctgcattttcagagcttgcagtcatacgtcttagtctgttggggctgctgtgacaaaatactgtaaattgggtctctctaacaacagcaatataatgttcacagttctggaggctggcagtccaagatcagctggcatacagggtgtctggtgagggcccactttctgggtcatgcctgccatcttcccactgtggtcacatggcggaaggggcgagggagctctctggggcctcttgtataagggcgctaatccyaaccacaagggccccaccctcatgaccccatcacctcccaaagatgccacctccagatgccatcaccttggggatgaggtgtcaacacatgagtttggggggacacagacatttgttcatgtggtaagtggctccaatgctggmctgcctctgaggcctggcctcctggtggagggccgtgcaggcacagggctctcgtgcactggggtccccggggacacctcccacccctgcccaggctctacttgggagttggcaggtgctgagtcctcttgtgaccttcttaagaaagtccctcctggccaggttcagtggctcatgacagtaatcccagcactttaggaggccgagtcgggtggataacttgaggccaggagttcaagaccagcttggtcaacatggtgaacccctttctctactgaaaatacaaaacttagcagggtgtggtggcaggcgcctgtaatctctgttacttgggaggctgcagctagagaatcgcttcaacccagaaggcagaggttgtagcgagccgagatcacgccattgtactccagcctgggcaacagagcaagactctgtctcaaaaaaaaaaaaagaaagtcccttctctcagagctcagggctgataacagagcaagaaatgcatcctcggggagagagagcagcctggcctggcctggcctgggaaggctggcttcaaccatcaaagacagctctcacacctcaggccccagggcctggggcttgatccctgcatcccctcttccgctggctgagctctgtgcctcaagagtgagactccaccctcccagcactccctcacaagcagaccgggccccatcctgcctctgctgacccccactcccctggggcctgctctctgggtcaggacccgcatggaaaccaggggcaggccatmccaacacctcccrgaggctgcyggcagctcaggctggttttcctgtgaccagtgcaagtgttcttttcagttatctgacttccttccggggcattctgagcccacccatagcttttggcatgcctttaagggacacaaagaaccacaacagccactgtgtcctcatctgtaaggcagggccccaacccaccctgccttcctcataggggtgtgtaatgctggatgaaaaagcctattagaaagtgtccgtcaaaggccgggcacggtggctcacacctgtaatcccaacactttgggaggctgaggcaggtggatcacctgaggtcgggagtttgagaccagcctggtcaacatggtgaaaccccatctctactaaaaaatacaaaaaattaggcaggtatgatggtgcaygcctgtagtatcagctacttgggaggctggggcaggagaattgcttgaacccaggaggcagasgttgcagtgagccaagatcgtgccactgaactccagcccgggtgacagagtgagactccatctcgaaggaaaaaaaaaaagaagtgtctgtcaaaggccccgtgcggcctttaatcccagcactctgggaggccgaagtaggtgggtgaatcccttaaacccaggagtttgattttttaaaaattattttgttatttttattttcttatcttgagcccaggagtttgagaccagcctgggcaacatcgtgagaccccatatctttaaaaaaaaaaaaaaaaaaaaaaaaagctaggtatggtggtgcacacctgtagtcccagctattcaggagactgaagtgggaggatcgtttgagcctgggaggttgaggctgcagtgagctgtgattgtgccactgcactccagcctggatgacagagcaagcaaaaaaacacattagtggccgggcacagtggctcacgtctgtaatcctagcactttgggaggccaaggcgggcggattgcctgagctcaggagttcgagaccagcctgggcgacatggtgaaaccccgtcactaaaatacaaaaaattagccgggtgtggtggcgggcaccgcacctgtaattccagctactcaggaggcaaaggcaggggaatcgcttgaacccgggaggtggaagttgcagtgagtcgagatcgggccactgcactctagcctgggtgacagagcgagactctgtctccaaaaaacaaaaaccaaaacacattaggaaaatgttcacaccaaactcaaagtggagactggggagggagtgaaaactggaagcacgcagtaaaggggaatttacttttatccctttcatttcttaaacaagaaaaacaggaaacctatacatatatatattgtttcacaatgactaattctgatggtaggaatgtgggcagtcattatattattcttttttttctgtgttcttctactttctttttcttttttctttttttttttttttgagacggagtctcgctcgtcgcccaggctggagtgcagtggcacgatctcggctcactgcaaactccgcctcccgggttcacgccattctcctgcctcagcctcccgagtagctgggactacaggcgcccgccaccacgcccggctaatttttttgtatttttggtggagacgtggtttcaccgtgttagccaggatggtctcgatctcctgacytcgaggggccacaggactagtagagccaagagttgagggtccgggtggggtgatccggccgtcagaaatgcaaaagcctggaaagacatctccaaaggccaatctcaggttggacaatcgtgagctggggaagctgcaaacactgtgacctccggaataaccgctggtaatcagttacctctaacccttagcagaattcaggtccctctactactcctaacctggtggcctttcattaactctatgaagccagtttagttcgggggaagggcaattatcatttagactacgaactaatttctcccaaagttagcttggcccaagcccaggaatgaccaaggaccgtttagaggttaaaggcaagctgcgggttggttagatcagatctctttcgctgtcataattttgtaatataatttttgcaaaggcggcttcaggttttttgctaagacaggttttttgatcagatcaaattcttctgctrcagcgctctccctaaawgcataggaaggcatttctgcatttccttcctgggcggaggaaaagccccgcctcctcaggctctgagtcccgcccggtcaccattccsattgacactccagctgaccaatcagcgcgctggctggagcgcgggtctgcccctctggacgcacatgcgcgctgtcctggctcsggagatggacggccgccgtgttttgggccggttctggagtggctggcggcggggcctgggtgtscgcccagtgcccgaggacgcaggctttggcaccgaagcccggtgattaagtaccccctctctcatgcgggacggaggctagggcagggggaaggcacgtgcgggatctggatcaggtagatgttacccgaaaacagccccgttggcctctctgagcctcggtgccctccgctgtagaatggraccggtcgtacctgaattttcgaggtcagcccagacattgtgaggcatttgtcagaggccgcaggatttgggaagaggcgtccggagataggaatgggtggcacctcgggatggaatgactcccattgcttctccctccttgtccaggcatcagaggcaaccccgcggctcctgccaacggtcggggcccctcggggaccagcccttcgcggggctgctgccaaaaaacctcagtcgggaggagctggttgatgcgctgcgggcagccgtggtggaccggaaaggtgargggtgagaggcacggccgcacaaggaccgggaggrgactgcctcggcgtgcagttgggctctccattgaagccacgggatcagccctgcttctgcctcccactagcagcatgagctgggacragccacctaatttgcaccctctccccgcttttaaccctactgccatgatgcagtagggttaagagtggggagaagatgcaaataactaccgagccttgcacatagccggcgctcagttacgggagttgctatactagattattgtttattggccgcggtggctcacgcctgtaatcccggcactttasggtgctgacgcgggcggatcacctgaggtcaggagttcgagactagcctggccaacatggtgaaaccccgtctctactaaaaayacaaaaattagccaggtgtggcggcgtccgcctgtaatcccagctactcgggaggctgaggcaggagagtcacttgaacccggatagcagaggttgcagtgagccgacatcgtgctactgcgctccagcctgggatgacagagcaagactcagtctaaataaataaataaataaataatgattatttatcgacggacaaaacacaggctttggagtcagacatacctaggctctgtgatcagcttgctgtgcggctttaggaaaataactgaatttctctgaaccccactctctattcagtgatttattccttttctcaactatttcttgaacatatgctatgttccaggcactgttctaggcaggctatacagtgctgaaaaagatagatatggtttctgctctcaggggagaaatggatttctctctaacgggagaaatggatgtcagaaaataaatgaacaagttactagtggtaagtgctatgcataaactaaaacagggtgttatgatggtgaggaactgcaggaggaaggcagacattagattggagattcagacctctccgtgatgtgacatttgagccaagatgatagggagccagacctgggaaatttggggacaggaaacagcaagtgccgaggctctgaggtggcagaggaacagaaagaagttgaatttggtgtggggtagttaactcatgtctgagagtcatgatggggacatgtgctaagatgcrtgagaaagtgctctggaaactctttagtgctgcataaagggttaccgttgcttttgctgatgttcgtgtgatgtatgtttcaggacctctagtgacgttgaacaagccacagggtctaccagtgacaggtatgggccggggatgtgggaagggaatgcagcggaagggggtttcgtgwctgagggagggaaaagtgaaggcatgaagctttggcctcttgtaatttttctttcttactttccaggaaaaccaggagagctgacgttgttctcagtgctgccagagctgagccagtccctagggctcagggagcrggagcttcaggttgtccgagcatctgggaagtaagtggtaggggtgacaggaagctaggagtacaggcatccatctgtggtggggaaacagctgcttggggataagctgagacattttccatgggaaggtttgagatcatagaggtggatacaagtactgtgaagaagaggaagccgatggctctgggttcaaatcctcaagtacaaatggtgtgataccaggcaaagcatgacacctccctgacgctgggcacagtgactcacacctgtaatcccaacacttctggaggccaaggcaagaggatcacttgagcccaggagttcgagaccagcctgggcaaaatagaccccatctctggaaaaacaacaacaaaactttccgcrtggtggctcatgcctataatcaataggactttgggaggccgaggtgggaggattgcttgagtccagaagttcaagaccagcctgggcaacatggcaaaaccctatctttacttaaaaaacaaaataaaacacacacacacacacacacaaaaacctagctgggcagagcagcacatgcctgtagtgctcgggtggctgagatgggagaatcacctgagctcagaagatggcagctgcaataagctgagatcccgccactgtacgcaagcctaaacaacctgartgagacccygtctcaaaaaaacaaaacaaaacaaataccctccctgagcttcagttcccctaatggtaaaatagagaaaataatacctatgctcagtgtgcagtcatttctccatgacggtactcgtggcaggcattgctagtcgatccatgatactctttcctctaactgccatcaattaaagatggtacttgagatgaaatatttctgcagttccacaaactcatgagcttttttgtagagaacttatttaagagctaatatgtacagaatttctagtagaattctggcacatggtagacaatcgttacgacatttggctctgagttccctgggggccggggcaaaatgagaaacacattaagctacatagtcttgttatcaaagaaggggaaaccttacttgtttctcaggagttggtctaggttatagtcctggtgttagtgtttggcctgaagcaggtcagtgttcctaagagtttmctttttagtgggcgagttcaagggactttaacttgtgtgatttgtctgcttattccagagaaagctctgggcttgtactcctctccagctgtccccagacagctagtcgcctccagaagtacttcacccatgcacggagagcccaaaggcccacagccacctactggtgagaggtgctgggaggttcctagagtggtggggaggtcccagcaagccaccctgtgacctcctcctgcccctktctcagtgctgtcactgatgggatcccagctscttctgaggggaagatccaggctgccctgaaactggaacacattgatggggtcaatctcgtgagtccgggtctgggaagaggaggggtgcttctagatataktacccctacagagaggagtcaggggtatggatttrggatggctggctctcctgtcccctaaaacaggcaagtgaccactgcctatactgtggccctgcccggagtctattgggagcagggagggtctgggtatagctcccagacctgtgtaaggcttgttcactcttggctggcaccacagacagttccagtgaaggccccatcccgaaaggacatcctggaaggtgtcaagaagactctcagtcactttcgtgtggtagccacaggctctggctgtgccctggtccagctgcagccactgacaggtaggtctggcaccctagccagcctttaaaactgcacttgatttgggaggctgaggcaggtggatcacgaggtcaggagttcaagaccagtctggccaagatggtgaaaccctgtttcaactaaaaactacaaaaattagctgggcayggtggcaggcgcctgtaaaaccagctactcgggaggctgaggcaggagaatcgcttgaacctgggaggcagaagttgcaatgagccaagatcatgccactgcactccagtctaggtgatagaggagacttcatctaaaaaaaaaaaaaactgcacttgagccaggcgcggtggctcacgcctgtaatcccagcactttgggaggccaaggcggatggatcacttgaggtcaggagttcgaaaccagccaggctaacatggtgaaaccctgtctctactaaaaatacaaaaattagctggagttggtggcacgcacctgtaatcctagctacttgggaggctgaggcgggagaatcgcttgaacctgggagacagaggttgcagtgagcgaagatcacaccattgcactccagcctgggagacagagtgaaacgctggctaaaaaaaaaaaaaactgcacttggcttagggaggcaaggagctggggagacagtggtatcagcagcagcctggggagcatttgatggcccccagaggtgtatgtgaccaggcccagctagaggaggcagcttcaggctagcaccccaacaggaaagaacagtccttaggcccggtggcttcagcaattaaatcagggttgcatctcatcatgagtggatcccacagccaggcagattgayagctgtgatcgtcctgacgtgttatgtgtccctctctggatgcaggggccatagtactgacctcactgaaacatatgatctgagaaagggggtggtgtttccccaaaggaaaaggggaggagtgatactgggtggcacagaacgagtagctgcccactgtctctcctggctttcctgttgcccagtgttctccagtcaactacaggtgcacatggtactacagctctgccctgtgcttggggaccacatgtactctgcccgtgtgggcactgtcctgggccagcgatttctgctgccagctgagaacaacaagccccaaagacaggtactccagcccacctgcctgctgctttctgaggggtggagggagaggtgagcatgggcagcatctccagaccttatctgtgcagcttgggactactgggaggcagcccttttggctcccaaggctgtatccgtacccacatcttggtgtgtggccttgggcaagtaacactcactctcttgggcttcattctgtccatgtgttcaataagggagttgatgtggctaatttctaaagccctcttaagtctgccattctttgagtctggtacaaagggtcaaaggcatgcrtgtattaggacaccagatgcctctacctgctctaacacactaagcccagactaccagagtcttcacacaagaactgtgccctcatgttaaggtcaaataatgggagtgggctctgcttcaagcactaagtactcagggacccaggctgttgatacccagccagatgaggggagacagtgtaggttcaagtggataaggtttttctgggccaggtgtggaagtggcatacatactgccacccacattcactcagctagagctcactcacgtctcaccaagctgtgagagggctgggaaatggagttgaggtgtgtgcctaggaggaaactgattgggtgaccccctagccagtctctgctgcagtgtgagtgcctgtgtgaatgtgcacatctgtgtgcaaagaggaaatgattaacagttgcagaacagtggggaatggaggaagcgcccgccttactcccatttcccttagagctgggtactcagctgcttggaaaatgtggggctgaacacaacgtacctctcccgctccaggtcctggatgaagccctcctcagacgcctccacctgaccccctcccaggctgcccagctgcccttgcacctccacctacatcggctccttctcccaggcaccagggccagggacacccctgttgagctcctggcaccactgcccccttatttctccaggaccctacagtgcctggggctccgcttacaatagtcctccctctgttcctgaccccctcacacacactggaaagtgagggtgggggctctgcagtcagacaaacctaagatcacatcctggacaggccacttgcttgctgtgtggcattgggcaagtaactttacctctctggacttgtgataataaaagttcctacctcatgttatggttttgaggatttgctaagaaagtaaatgtttattacggatcttgcttactgctgagttgtgcctgtaatcccagcactttgggaggccaaggtgggcggatcacgaggacaggaattcgagactagcctggccaacatggtgaaaccccgtctctacaaaaagtacaaaaattagttgggtgtggtggtacgcgcctgtagttccagctactcaggaggctgaggcagtgaacctgggaggtggaggttgcagtgagccaagatcacacccactgcctaggcaaccgagcaagactccgtctcaaaaaaaaaaaaaaatttgtagagatggtggctgggctcagtggctcatacctgtaatcccagcactttgggaggctgaggtgggtggatcacttgagcccaggatttcaagaccagcctgggcaacatggcaaaaccctgtctctacaaaatatgcaaaaaaaaattagccaggtgtggtggcatgygcctgtagtcccagctacttgggaggctgaggtgggaggatgatctgagctcaggaagcagatattgtagtgagccgagatcttgccactgcactccagcctgggtgagagtgaaaccttgtctcaaaaaaaaaaaaaaaaaacaattgagatggggtcttgctatgttgactaggctggtctcctggcctcaagcaatccacctgttttggcacccaccccccgccaatgtgctgggattacaggcatgagccactgcacccagccttcttactctattatattttttaaagcagggtctcagtatgttgcccaggcaggctaccctccaactcctggcctcaagcaaccctcccgcttcagcctccttatcttttttttgagacagagtctcactctgtttcccaggctggagtgcagtggtgtgagctctactcactgcaacctctgcctcctaggttcaagcgattctcctgctgggattacaggcacgtgccgccacacctggctaatgtttttgttgttgttttgtttttgaatctctgtttttaaagcagggtctcagtatgttgcccaagcaggctaccctccaactcctggactcaagcaaccctcctgcctcagccttatctttcctttttttttttttttttgagacagagtctcagtctgtcgcccaggctggagtgaagtggcgcgatctcagctcactgcaaccccacctctggagttcaagcaattctcctgcctcagcctcccgagtagctgggattacaggcacatgtcaccatgcccggctaatttttgtatttttagtagagacggggtttcgccatgttggccaggctggtctcgaactcctgaccttaggtgattcacctacttcagccttcccaaaattctaggattacaggagtgagccaccggcccttaatcctttcttatgaagacacttgccattgaatgtaagcaccacactggtcattgggattatctcatttaagatcttaaatttatttacatctgcaaagacctttttttttttttttgatttagggtttcactctgtctcccaggctcagagcgcagtggcgtgatcacagctcaccayagttttgatcttcccaggctcaggtaatcctcccacctaggcctcccgagtagctaggacyacaggtgtgtgccaccacacccagctaattttctgtagaaacggtttcaccatgttgcccagactggtcttgaacttgygggctcaagcgatctcctgccttggcctctcaaagtgctrggataacaggtgtgagccaccatacccagctacaaagactcttttcccacataaggtcacattcacagggtccaagtagacatctcttttcaggggaccacagttcaacccactacaactaagcagtgccacacttttcttcaggtgggtgtggcttattggatgtttcatttttaggtgaccttggccccttgctgaagaagggatagacccatgccctctgcagaagggctgaggtttaggcaaggccaattccttcccytgtctcatggcattaacgttcctatgccyggtaggtgtcattctgctagcttggcttgttctctggggttggggggctcccagtgctcggcagttctggcaatatgtccctgcgtcgactcactgccacgtgatcttgggtaagccatgcctcctctttcagactcagtttcttcatctgtaaagtgaaggctcacgctccccacccctggatcggagatgctgggggagtccctaaataggaagccccatgtctgtccttaggtsggaattctgggcctcgctgcacggaggagctgctgatggcctcaggctcttgctgtggaccctggggtacacggcctcgccccatccactcttgaccctccaacagcaatggagtcaagccccaaatacttcacttgtttctttttatttggtgttggatccaggacaagggcagtggggaatcgaagcaggggcttccctagcttcatatcccccaggcccctgcgyctctggaatgtaccaacaaggggcaggggtttcagggggctcagcctcttcatggggcaggcctcagycctgggtttgtcacagtctggccttgaatttgcctttggccttgaccttccgacaggtgctaggaattgttccgacttcaaagggcagaggcaacaaggcacttccagctgggggcctcggaggcacaggagagcaggagcctcggtgtgaaaggaggggagaagagggagatgatcagaagtctgtggaggaaggggcttctgagggagaccagctcttcccttggggtgccagccagcctgggagctgccctctgcctgtgccctccagccctgaccccgtgctcagcactgtccactgggtgtgagtcacaggtcgaggcccacctttcttggcttcaggatgctgggtgccaccytgaaatcaaggttcggtgggagggaaatgaagaccttagccgtgggtagagtcctcaaggccttgcctgtggtcgacagggccttagtgcccaccagcttgctgtgctgtcgtctgaggacctggccctggtgtcggagtacatggggagaaggcagctgggccttggtgtggaggctggggaagtggtgacgggctgtgggagcaagagaagctgtgaggccctggggtggggcccaaggtggcctagctgccctaamaggtaygtgtggaggatggggggatatggagggaatggggtgaaggccgacggagccctcccggttcctcctccagaggcagtgagaagaaaacagggtagagtccaacagacctgggtctgcatcccagctgtgccccttctgagctgtgcaaccttgggcaacttccttaaacttcctgatacctcggctggaaaatggggataatagcacctaccttgctaggttggtgtaaacactaaaggagctgggcaggtagcggtatggggcaaactgttaagtgctggacatgtgttagttctttccccgagaggtgactgcttgaaggcaaaggcagaatactgcagtgggaaaagcgtgggcgctggagagagcaacctgggcttaagtcctggcatctttgaaatcaggtcatctttgaaataagtcactctgtgaggcagagtgactactttggaggagacaatactcatttggctgggttttttttttttttttttttttgagacagagttttgctcttgttgcccaggctggagtgcaatggtgcaatctcggctcactgcaacctccgcttcctgggttcaagcgattctcgtgcctcagtctcccaagtagctgggattataggcacctgcccctacactcggctaatttttgtattttttagtasagatggggtttcaccatgttggccaggctggtctcgaactcctgacctcaagtgatctgcccgcctcggcctcccaaagtgctttttttgtgtytttgtttttaagacagcatctcgctctgtctcccaggctggagtgcagaggtgcgatcataactcactgcagccttracctcccgggctcaagcgatcctcattagcctcgcgagtagcctggaccacaggctcacaccaccgtgcccagctaatttggctgtgtatttttaaacaatactttgtgagtagtggcttttacttgctactggtggctctttggtggggtggctgatccaggtggttgggaggggcctggagagcaggaataaatcgccttggaacactcgggtgttttgggggaatggtcttacccagggccygggggttcttcggactcagtggcaatctgttcaagtggtggggttgcctgtccccactagaaaaggtcatggtgaaaatgcagcccatcctggtgctgggggcatcccactcccagagattggggcagaccagggctgtggcccttttcgccttgcctttcttcccctttccgggggctgaagtggtggcagtggagactggcttctcactgtgccccaggctcctggccccagtgcctttcctagaagctgacctgtgggtaggggtccccgagtccttgccttccccagagcctcgctgrgtcagcagagggactgctgggcggacccccatccgccgatgacacatcgccatgggcttcttgatggtgaagccctctaccaggagccggatgcccacatattgaggcacctccacagcagkctgtgggcaagaagaggagacaaggcccactcagtcagtggtactggaatccttggcccagcgggacccagagtagagatgggtggaattactttctgaggcacctggtcaaagaggygtttctgagctgagaaatggaaagcccacctctgagtcagtacctagagtcacagagctccaggaattgctagcccagaggaagggggaatcctagccatgtcccaccagcacccctcagccacatttccctcctaagctgcccccagcccctgctggaatgcgtgtggctccactgcacaggccactgctggtggacagcttcctgagctgagccaatcagattctctgcacagagaatttgagttacgccacccagacaagtaagaggtttggagcctgcctagagcctcgtgtgaatccaggttatggggwagcagaaactaagaaccttaaagaagacagtctgtggagagaatgaagtaacgaatatgcagaggaaggcagagagaagggtccaggagagggactcccttacaactctcagttcctatcaggccaagctgtatgtcctgccctcagctgggctccaggagagctccctgtgccttgctagcaacctggagccagttggaggtatcttctgtgccactgaaggatcctgatcagaatctatctaaacatcagaattacttggagcttgttaaaaatacagctattggccgggcatggtggtcacacctgtaatcccagagctttgggaggctaaggytggcagatcacttgaggtcaagagttcgagatcagcctggccaacataaccaaaccctgtctctactaaaaatacaaaaaaattagcaggtcatggtggcaggcacctgtaatcccagctactcgggaggtcgaggcaggagaattgcttgaacccaggagacagaagttgcagtgagccgagatcgcaccattgtactccagcctgggtgaaaagagcgaaactccgtctcaaaaaaaaaaaaaaaaaaaaaatgcagctattgccgggcgcggtggctctctgggaggccaagacaggcggatcagctgaggtcaggaattggagaccagcctggccaacatggcgaaaccccatctctactaaaaacacaaaaattagccggccatggtgggcgcctgtaatcccagctactcgggatctgaggagaatcacttgaatccgggaggcggaggttgcagtgagccgagctagcaccactgcactccagcctgggtggcagagtgaga

SEQ ID NO: 9974 - DNA, 23242 bp, Homo sapiens
catctctaaaaatagtaataataataataaattaattaattaaatttaaaaaaagaatctccaggccaggcatggtggctcactcctgtaatcccagcactttgggagtccaaggcaagaagattatttgagcccgggagtttgagattacagtcagctatgatcatgccattgtactccagcctgggggacagagcgagaccctatctcagaaaacaaaaaaagaaagaaaaaacccagcttgaagttagtgtaaacaactaaagcacaaaactatgatcttatcccactggacattttactatctgaattcactcacagtacttggtccctaagtctgtgtaaccattgctggctgcctttgacttaagggctcagttggttaaagcccaaagctgaggctcaagtcatgggtccagtctcattaatggccagttattttgctctgttcttattctatatcccggaccccactttctgtgttgcatatttatgaygttggtcacgagggtggcttgaccagagagggaacagaggaaggcaaatccatcaccacagctactagcaaaacaagcacaaatcctgtgaatggaggataagatatgttttctcctataaaaagcaaagtgtttcaaaataaaaaaaaaaaacaagaatgaggcactcaaagctagtgaatggtgctgtttggaaatactgcacttcagactactgagtatactggtgaccatcacaagctggaacatacaacaggacagttagtctggctatgagtcatttgaaatcatgggacactagccgggtgcggtggctcacgcctgtaatcccagcactttgggaggcggaggcaggcggatcaygaggtcaggagattgagaccatcctggctaacacggtgaaaccccatctctactgaaaatacaaaaaaattagccaggcatggtggcgggtgcctgttgtcccagctactyaggaggctgaggcaggagaatggcgtgaacccggcaggyggagcttgcagtgaggccaagatcgtgccactgtgctccagcctgggctacacagcaagactccgtctccaaaaaaaaaaaaaaaaaatcatgggacactaaacagaygccttatatgctaaaatggataatatttttctcatggtaagttgtcatggcctaacacttgcttattatgttctgatggtaacatattttcaaatttaaatgtaatgtaagaatgttccctctgctcattacctatatgagtcattcataaacattataacaacaaaaaagataatcacaaaattttaaatggaaaaataatggagtattttatttattgatagagataacaaaactttttgtaataatcctgaatagaatttaatgaaatgtaaatccaaacacaaacagcaagaatctgttctggcaattggagatgattagtgaagcrgagaatcctgaatggtggatattcatctaagtactattggaccacggggtggagaaggagggagtcgaggatggtgaagaggtattactgactctcaaaccaaccaaccaaccaaccatatgtgtctctacctctctctcacacacacaattggatgtttgacagtgagcaagcctcttgacctctctagacctcagaggcaaaatgagaagtgtcctccagctagaaagcatcacaaattaaatgttttgctttaggttttcttccccaaacactccatattccttatgtaaaaatagagccattactacattcctatgatcgtattttaaattattgggtaagaagtatctctttataaaccaaattttcatcttaatctttgccacttctgcctcctaccccaaattaaaataaaaataaattctactamattgcaggagatagttataatgtaatgcttaagtgcttgggctctcagctagatttttgggttccacttaaattaggcaagtcactgactcgttcagtgcctcagttcctttgtaagaataatgatacctgtttcacaggatgggtaggaggatgaaataatacatttagcacaaggcctggccatagtcaatgctgagtaattattttttatttttattttttgagacagagtcttgtactgttgcccaggctggagtgcagtggtgcgatctctgctgactgcaacatctgcctcccaggttcaagcgattctcctgccttagtctyctgaatagctgggattacaggtgcctgccaycacgcccagcttattttttgtatttttagtagagacagggtttcactatgttggccaggctggtcttgaactcctgacctcatgatccacatgcctcagcctcccaaggtgctgggattacaggtgtcagccaccatgccgagcaagtaattgttatttttaaactatttccatttctccatttgcattctccatttctccatcttcaatatatgtatatgtgtgtatacatatatatgacagaggttatatatgtatatgttataatcatataacctcagacacagggtttcacagctagaaggaatttctacatcaagtacaaaactcttsttacatctgtgtcctttctgtcagattcagagggttagagtgatttggttagtgacrgaaatkatacttaaacatgagattcctggcttgaggctgcatcgtttttacttttcttccatttacttttatcttatttaaataacttcctatagaacaatttcctttaaatatgaaatgttccataggtttttggttctcagtaaattatgatattacaataatgcggtttattctcctgattgctgatctcttcataaattaggacgtgtattcacttaaagcagtctatttgataatgaaaacccagtgatttctaaataggcagtcagaagaatctgctttatgaaacagacaaacccctaacattgggcctttaaaatgttcggatatcaagaccacgaatatattatctaaattagagcccctgagcaaggactcaagctctattttatgccccatccctgactcacagtaagatcctgggcaagtcacttgaccttyttatatttcagagtgtcaaactgtgaaaagcatgtccataaaactgtgcaagcatgacctcattataaacccgatgaacttgaaagcaaagatgtgctttgatacattaaagaattaccaaaatagaactctagtttgtaaaatatgaagaatcaggaaaataaattttactatactaagtaaaaggattctgaaatgtacagtttttagcaagtaaagtcataaaaagtttcaaaatgttatatttaggtgaaataaggttaatgacagaggaaaaatattattttagagaatgcttggctttcaaaaccatagattgtagcaacttaaccaaaataatcacaaggaatggaagactatcagaaacgagtagatccttaataattaaacacatttctaggccattatttccccctacttatacaatgcatatcatgttttaaaatgtatttcactggctgggagcggtggctcacacctgtaatcccagcactttgggaggccgaggcaggtggatcacttgaagtcaggagttcgagaccagcctggccaacatggtgaaaccccatctctactaaaaatacaaaaattagccaggcgtggwggcaggcacctgtacctgtaatcccagctactcagggggctgaggcaggagaatcgcttgaacccacaagrcgaaggttgcagtgagctgagattgcaccactgcactccagcctgggcaacagagtgaggctctgtctcaaaaaaaaaagaaaaaatgtatttcactaactactatatgaaaagccccagagaaagaataccaatacccttaggaaagaagcagttttagtattattattattattggatggagtctcgctctgtcaccaggctggaatgcgatggcgctatcttggctcactgcaacstccgatgccctggttcaagggattctcctgcctcagcctactgaaagtagctgagattacaggcacgcgccaccacacccagctaatttttgtatttttagtagagacaaggtttcactatgttggccaggatggtctcgatctcctgacctygtgatccgcctgcttcggcctccccaagtgctgggattacaggtgtgagccaccgcgcccggccaagatgcagttttaataaggagtttggccatttaggcttgtaactgactggattattgcatattctttaaaattaatttgtattagtcccttttcttctatttccttatctccaactctcgcattagtatgcacgctttattcctactcaggttttcccctatgagcccaggagtattattattatttttttgcagggattaggatcaggtttgtgaagtgaatagtgtctttctaatctgcagagggaaggcagcatcccctggcttgctgctgcagcctctctttaaattaaacagcaggttcactctttctgcggcattccagaaggaacatcagtaggaacagctccacagatgctgacgtcttgtctaaggttatcccaagaagtcctgtggcatttgcaatgtgcctgtacatttttccttttttaaaaaacatattcctgcagactttgttgaaascagaaacaaacacaagcaagcaaagccctttctagcacagcatgttaatcacacactttgccatattctgtgaaacagtaagcaaatgataacctccaactgttgcccgggccctgtaaaacagaagatcaaattctgtgttctgccttggcaagaaaagaaactgcagcattttgtctagatttttacaagtcctggggttcacattactggctgaaattgttctttctctactttacagaaaaatggaaaacactagtaaacttaaagatttaaatattattttaaaaggaatataataaaaaatggaaaacactagtatatttaaagatttaaatagtcttttaaaaggaatataatcaaaactgtagtttaaaatacaatctagctccataagagaggcaattggctgtgtgttccacttgtaatgcagaggatttgaagcatctattttttcccttgtttctatggatttatgaataaagactctgacccttctcaggatcaggaaaattacgaaaaatttaaagcctgggtttaaggtctgtagaagctgcacaggtacactaattttagtaagacgggcgccaggaaaaagaacaaaatagtaggggagaaatattcaggcatcctaaaaaatattcagtggaaacgtaaaaacattaaagactgattaaacatcgcagcatgacacagatttarcaactgagcataaataatttgactcggatactgctccaaaatccgaagaggaccaatttcttccaggaggacaactacctcgtcctctgcagacccctctcctcggcagctgaaggagtgtggccaatctgcctccacctccccgcggaccccctactctcaggacctcctgcagcaccccaaactggaagtggccgctgcagacccaaggacgaggggcacgcgggagccggcagccctagtggagcggttggagatgttgaggtgggagggtcacccaggtggggtgaggctggggtaggtagcggagtgaacggcttccgaagctctgggccgcccccaggttggactaagcaggcgctctgtcttcgcccccgcccagggtgggcgtctcctgaggactccccgccacacctgacccgagaccgcgcgcccagcctagaacgcttccccgacccagcgtakggccgccgcgactggcgcgcagggggcggcgggaggcctggcgaacccgggggcgggaccaggcgggcaaggcccggctgccgcagcgccgctctgcgcgaggcggctccgccgcggcggagggatacggcgcaccatatatatatcgcggggygcagactcgcgctccggcagtggtgctgggagtgtcgtggacgccgtgcygttactcgtagtcagkcggcggcgcaggcggcggcggcggcatakcgcacagcgcgccttagcagcagcagcagcagcagcrgcatcggaggtacccccgccgtcgcagcccccgcgctggtgcagccaccctcgytccctctgctcttcctcccttcgctcgcaccatggtaggtcgggagtggcaaatgccggcgtagcagctgcccgagatttcttcccagatttctagttgttttgtttgttttttgtttgtttttggttcttggaggtttttcttttctgagtgttacgcagcagctgcgcttaaaggaggttgcattttggatttgcatctcggcgacctctgccagggagcttcatttattggttccccttggagctggacttggtcgtaggccgtccacgggcaggggctccggccgcaactgcagcgggggtttctgcatccaatccccctgcyccccgcccagccccgcacccactgcatccactagcgccgcacccgggctgcctgcagcgcagcgtttcggcctgggagccgggcggggccgggcactagacccccccccccggcccgcccctccccaccccgcttctccgccggcgcgaaggtggcaggtcgggcgggcagtggagaatgaatgggctggagctggccggtggcgcacattgttccggccgggtgttgaggggcgcagtcagcgcccgccacctccccactttggccggccctgctgggcgccctccctcggtcgctctcccctccttcttcccggggggcgcggcgcgggcgtgggctgggaaggaaggagccggggaagggtggggttgggggcaggaaggcgaggggttgggggcggagagggcggaagcggcggccgggccgccctgcgcccgggcggggccctgcggtgtggccgtggcttgttcctgccgctttcgcaccctgcggccccccacccagtgcagcagtgcgggcgggcgtgagcctcggtgcaccaggaggcacttcccgcgggaggcgctgggctcgcgctaattggggcggggggggggggcggcgggggaggagggaactggcgcgcggcttggtttccattagagacgcaaagtttctgctccgggaggaggcggcgrcgccgcgggctcgtcgcctgggggagcagaagcgggtgggaggtgcgggtggccttggcckcagccctggtgcgcgggggccgggggtggtgaccctcctggccgaggaggggcggcgtccagacgcccgctcgggggccgccttcccccccacgcctgcccccgggcacgcgccctgcccggtccctcgccccgcgccacttccagtccgcagagagatgccctccacgtttctgctttctctgcagcctctagattgccagatgcgactgtgcgcctcgctgggtgtgttttccacagmcccttcctcctcggcgtgcagggctgacatcaccgactgcgtttctggtttggcgggtggggagatggttccccgcagggttctggtacacctttgcccccagggctagcgccatttgggggaggaggttttcgttgtcgagaaagttggatgctcctggtaacccctctaacaagagagttctgtagcgaggtgggactgttctccccataaggtgacagtttctcttgcgaggtgtggcagcgcttcctgttgtacaagacagatgttgccttggcgttacgtaaatcatcgtgtctccgtcatttaaagaaagccaatttttagtgattgaggtagaaagaaagatccgtttataatttgtaaaaacaaattttcacccagaatcaatatattggaacaccattcctactgttaaagttttcacttaagagyataaacttcatcagctttctattaggacttattttgtaattggcttcttaggcatccttctttaaaagagaaatccacgttagctctccttgaggtctcgagttccctcggctggaggcacaggttcagtggagaccaaataatgcaggtgaattaccttcgtggccattactgcctcsaacgaagtgtgtttattaagaacagttcttatgtcattcttaaggtaggtagggttaatactctccagcaaatttagtagatactstttgccagaaaagagaggagtatatatagtttgataattattgtgtagttttctgtgtacttaatttttgcagttttgtaacacttcatttgtaagatggtaccattttttcctggcttctgaatcataggatagtttgacccagggcattagccattgtaatggtagscttttaacaaataactgcctaatttaaaggattggaaagcatttgttacatggaaatgaagttggtggcgtacccagttgctgtatctttattttttstacttaattatttctcataaaatggatataaaagcctgttaatccaacccaatgccattatgtaacgccagtttggagatttcgagggcctggagcagtgcgcaaggtgcgctgaaagcctkcccctggatgagatccttatcctggctgtgatggcagtggcagtgggctgggtcccttgttgagtggaaagggggactgcggtgtccatggtgcagtaggtggcgctcttctgtcttagagcctgccgccactgcagctggtgccaaggggccttctgccactagaggtgccatttttcacatgatgaacttagcctagttagatcgcagagcaagctgtaagccatgggcccagaaaagaaaacttgaagtgagcagatgttgtcacttccttgtaatcctttgttaaaatagcataaggagttttctttattctatttactttcattaaatgaccgtgctrcaggtttcaaaggattttaagattgatttttgaaagatcacaatattaaaagtataactggaaaayctatgttgaaatcaaccaaacatgtcgtggactgaatgataaccttttctttcttcatataggctgatcagctgaccgaagaacagattgctggtaagttgacaactccaaggagtccccaraaggccagaactaggcactgactcagttttggtgactcctctgttcctccccgctacagtctgggcagttttctaagaatttatttaaataagaacagtaagcagaaacactgaggtcagatgttattcttgccagtactttatagatgaggtgaaaggaagtaaaactaaggatgcccacatgttaaactctggagaatttgaccatgtttcacaatgtgcaaagtttgcrtatgattaattgtactgagcctgctactcagcggtttagtttacaattcttatgccatgggtctttcagtaatctgccacgaaagcttgtgctcgctatcctaaaataaatggaaatgggtgaatatgagtgttaggaccactgtagtaattgggaagaaagttacattagttaaactctgttgcccaggctggtctctaactcctgggctcaagcaatcctcctgcctcagcctcctgagtagctgggactacaggcatgtgccaccacgtctggcagattttagctttttaatattcctggaggacttgttttgagactgtttctcgttaggaaaccaggaatgcttctgaaatattctaaaagtcatgtggagagagtttacctgggaatgtacatttctagtaaccattttatttgttatgaaacaagggattcttatggctttagaaatgtaacaggaagggatttgaagggggcacatggaccaatcttgtcagattggatttagtcccttgaacctgggaggcaggggttgtagtgagctgagattgcaccactgcactccaatctcggtgacagagcgagactccattgtttaaaaaaaaaaaaagattggatttaggactaatttaagcatgttccagcttagccgccttgaaacctttgggaatattgtggtgtgtggcactgtttattgggagcagtgtttgctttatgggctgctgtatgaaggccagtccaacaggactattgtggtcattatttcagtagataaagaccagacttctgatacgttgcacaacttgaatggctggctttggcaagcccccggcaagtgtgtattgtgactgggttggataaagacattgattctaacgggtcaacttttgttttcagaattcaaggaagccttctccctatttgataaagatggcgatggcaccatcacaacaaaggaacttggaactgtcatgaggtcactgggtcagaacccaacagaagctgaattgcaggatatgatcaatgaagtggatgctgatggtaagagctttaaaaccatgaatgagggccattgttgtgtaattcaagttcagacatgttacaggattgtctttcaggtccccagagcaaagcaaatgtgcaaagatcctttctgtggttgccccagggccattgacaattaaaatagaagatgatgggccttgcgtccatcctgcttagtgtctagaatgttttctgcatgggatcactattgttttcttcctgcttggtgcgacctagagctcaaatctatttttttttttttttttggagacggagtctcgccctgtcgcccaggctggagtggcactggcgcgatctcggctcactgcaacctctgcctcttgggttccagcgattctcctgcgtcagccttctgagtagctggaattacaggcgtgtgtcgccacgcccagttagtgttttgtatctttagtagagatggggtttcaccatgttggccaggctggtctcaaactcctgacctcgtgatccgccctccccggcctcccaaagtgctgggattacaggcgtgaaccactgctcctggccgagctcaaagcttttatcaactggcccatgagtctgcactgagtcttgaggggggaggtgaaattaaatagccatagaaagtgctttttaacaaacttactgtgtttaaagaggaggaggaacccccagatgaagtaggtgacragcactcttagaagttaccataaaagtgagtacagtgtgagctgtagatgtgtttgctgcagaggagcatgtgaggtttggaggcggatgtgtggtgactccaggggatagatttgcagaacctaacggaaagggaagctgtaaggtgcagggccagagggaaccagcagtaaccctgatagcggtctgtcatctgttcctctcgactctacagmarcggacaacagaactttgattgctgatttccatcagtaagcaggctttgaagcacacttccccacccctaaaaaaaaaccacgtattttggtaaatcctatatatattctaatgtactgtatgacagtatagaacatgatttttaaaagatgagttgggaggagaaaaggataaaagaaaaaataaaagaagcattaagaataaacaattcggatctagattttactttctagatgattgactcgagggtggtgtagtaaaatcgcttgtctggtcacaaacatttggcagcagagcttttgattaggttctttgacaaagccttcagcacgttagagtggttttcactaatagtgttttggaaagaaaaggttgtccatagttctctagtttgctaagatgatcagctacccaggaacgtggagtaacttcctcttgtttgtgggagcccygggaatctgtgcctggggaggggagaagtctgttaggctcttggattgtgtggaagaaggagaagttgtgccaggctacagaatcctgtgtttgcactgagaaaacaggatggtacctgaccttctctgcatggctgtgagatagcttaaaataatttcttttgtttttgatgaatatgaacaatatcttaaaatttttgaggctaaaaaagtcttgaagggatccctgaggtattttctttgaaaggtactggtgaaaatgagtaacttaacctaagggtttttctttctaattttatttccatttagttcaatgacactgttagtctggagtgcttgtctttgggggtattcatctcttagttttaaagaggagttgtttggagtactggccgtagaacagattgttctgacagttccctaagtgttactagtctgagctgtgagaatgctcctgagcttttcccttaatgggaaataaagatactgagttggaagaaaacaggtggctaaccatcatagcgtggccaagaaatgatcctggagaagacttggtaagacttcatggcccatgcatggcataacagaatcaatgttcctctctcataatcttttctcctctgaaacactttatacacttaacctgcagctcagttctaggccttttttgtgttactgctgtcactaaccaaggcagagtgagacctgagtgatttccctaactcagggatggcagtcgggggcgctttcttccctcggagtggaaagattcagcctgcggagtggtgtatgctatttttctyttgaactgtacagcccttcatgacccttccatgggcttgaatccagatgtgcagtttcctttgtataattaaatactatcctgggcactgatgatgagtttgaaattatgtgaaattgccctgtgaagtgtttgaacgttttagacctgcagatgattgaacctagtaagatagtctgccccttygtcctagtacatgtttaccrttccgtacagtggttctgaaatgattactgcagagcascgttaatggagtgcttactttacatgagctttttgttttttaattcgaggtaatggcaccattgacttccccgaatttttgactatgatggctagaaaaatgaaagatacagatagtgaagaagaaatccgtgaggcattccgagtctttgacaaggtaatccagcatctacatagcagatggtacttaagtatggcttcttccgctttcacttctaaaagctataataatgttatagacagaagacttaaatctaactgcctgagcctctgatctcactttcaaaaatcctccttatggtaaccgtatcaggggagggtaggcataataaataggaattttggaccatgtttcttgactgttactttgaattgttgtgagcttttgcaaatcctgttttctgcattagctgtttgcatgtatttagtaggttagaggtgggaactagagatcagagaattgtttatggcagcagagttagcagtaacttgagagggcatagctaagtcaaagacctacttccccacactacatcattagcaataacaattgctgaatgttcacaggatggcaatggttatatcagtgcagcagaactacgtcacgtcatgacaaacttaggagaaaaactaacagatgaagaagtagatgaaatgatcagagaagcagatattgatggagacggacaagtcaactatgaaggtaaaactaaattctctgagctcagtgtttcatagtcttacctttagatctgtaagcaagccaactgcttcactagacagcctttgactttattttatgtacagtaaagatgttgtgttcattaaagctgttttcaaagataaccaaaagttactattatatttgtcttttcagaattcgtacagatgatgactgcaaaatgaagacctactttcaactcctttttcccccctctagaagaatcaaattgaatcttttacttacctcttgcaaaaaaaagaaaaaagaaaaaagttcatttattcattctgtttctatatagcaaaactgaatgtcaaaagtaccttctgtccacacacacaaaatctgcatgtattggttggtggtcctgtcccctaaagatcaagctacacatcagttttacaatataaatacttgtactaccttaatgataaggactccttaaagttccatttgctaatgattaatacactgtttgggctggccagtttttcatgcatgcagcttgacgattgagcacagtcaggcctttgtattaaaaatgaaaaatgaaaaaacaaattcaaaacctattcaaatgggttctagttcaatttgtytagtataaattgtcatagctggtttactgaaaacaaacacatttaaaattggtttacctcaggatgacgtgcagaaaaatgggtgaaggataaaccgttgagacgtggccccactggtaggatggtcctcttgtacttcgtgtgctccgacccatggtgacgatgacacaccctggtggcatgcccgtgtatgttggtttagcgttgtctgcattgttctagagtgaaacaggtgtcaggctgtcactgttcacacaaatttttaataagaaacatttaccaagggagcatctttggactctctgtttttaaaaccttytgaaccatgacttggagccggcagagtaggctgtggctgtggacttcagcacaaccatcaacattgctgttcaaagaaattacagtttacgtccattccaagttgtaaatgctagtcttttttttttttttttccaataaaaagaccattaacttaaagtggtgttaaatgctttgtaaagctgagatctaaatggggacaaggcaggtggaggggaggccagtgtacatgtaaatgcccacagcccagcattgggtttccctcccaaggccccagcaccaacctctgagcccaagaccttgcctgaaaacaagcagataccgattgcttcatcctatttatggacrtgtaggtctagttgcattttcactggggggaggggggaaggtgaattatggtaacttttaatgatctattcaggcagtagagctcttaaggaaaaaaaaaacccactttctctcaagcatgtatttaggggttgttctcaattgtgctgctgattacctgtcttatgtaactacttgagaccatctgcaagagacatgatttagtgtgtctgtaattcaatcttcgctgtgtgtggtagaagcagtagtcacttttgtaagccagtctcttcatgcctaaaagacactaccagtcacctttgattcgcgacttttaatttatgattatacttagcckcctcctcctttttttttttttccsaagttgacttgactttgcttttttccccccaagtagaactaatgctagcttccagcttgaaagtaaaactccagtgtggagtgaattttgtgtctaattataaacctgtaaccaaaactcagacatctggtactggtctttgcattgagattggtccctgtaaaaccccctttaaaagcatattgcatttagtacagagctcttttttgaaatgaaggctggagatgtgcatttttcacggtgttaactggttrtatcttattagcaaggagattggggttttgagtgtttgcgtgggtggtttcaatttgccagggaacagtggcaggctgctagcaaggcagtgagaagctcttggcagccaaatgggtgcattcagggctgatttatagagacccttggcttctccttctcctactccctgtytttctggcattttgtagcttgttagattttctgccagaggggtgggtcagagcagtggaggggagacatcgcccatgtgctkctgctactggtccttgggctgggtggttggtagaggagatgttgacactatgagctaagggttggcttttgtaattacctgaatctgaaaggaatgcctaaggttaccttggggtttctcttctggtgagatagggttcctggtttgagtaagttaatgtcctggatatttcttgtggcagggggtggtcaaagagcctgattgctgacccagtctcaggcctgtggtcgatgacctctcggtagtttcaaagggggctggagggggatatttgacttgttttttcgaaatgtagccttctaaccctcaagtctttagaagctgggtggactcttagtggtcctgcagcgtatcctaaaagactacctttgaaacaggattcttgtatggccaggatcstgtctgggaaccagaaaccctacaccctccccctccagggaatgctgagttccagttttgagcagaggtgaggcagaatccactgtagccttccgccctggtatttggggggatgaccagcccaggcgttgggtgttagtctgcatgagtttgtgagaggaaatagctgggtgtcctggcagtgcccttgaagttggttaggaccttcctgtaaactcttgcccctacttctaactactctataaatatatacatatatttatatataaagtgattagttgaactggcatcctgctttagcctgagacttgccataagaaactgctgagtacttggcaaaccctttcatagttttgttctccatctgtttggggtaggtgttgagygaggcaaatggatctcgatatttcagatgggcttttgatgcactgttgccaaggaaggctttttctgattttttgacaaatgaatttttgcacactttcattggtgtctttcggcaacttacacacattgaaaatgagctattgtacatatttttatattctctttataaatgcatgtctgattgtacttgtaacaatattgtaatgaacggctgtgcagtaggcccagcgctgctgtgtctcgtcagaggaatagcttaccacgaacccctcagcatactgggaatctcttcctgaacaacgaatgtaaatttggtcaagtctactcttccgttcattcaattattttaagcatttgaattatttattgtatatcctaaatatatttctcctttggcagtgactagatttccactaatgtgtcttaatctatccctccagctggcagttactgtttttttaatcccctgaagttgtcctgtaggagacagaaattctttgctgtctgtatcccttggagtaagaaggtagtggcatgggtggagtgtgtgttctttctccaaatctattatgatgtttattaaacacttctgtagcaaagatggtggtagttcttttgttactgaagttgcccttcaccatggctatttgaaaaggagatgtacttggacgtttctgtaaatcttgagataaactgtttggagatttaaccacctctctgatggrggaccaactctatggaaattgtaaatacgttttatttataaacctggcactgtattcaataaacatttctgcagcctttcatctctaactgcgaactgtgtaggtttctagcttgcatagctttcaattccttttgctctcaacaagatagacctgccctcagatgtaatttcactgggtctctagtactgtgagagtgaggggccagaaataaccgtagacacatcccacaaccgtcttaccctagttttaagtagtttgagtgttaatagctgacattttaacctattctcttagcctattaacttgtccatgcttgctttttatgcggaaaatttacaccataaggattagtttccttttaaccccaatccaagcctctttaggacttgtataaagaaatacatttttttcaataagatgggaattttagatgacaaccaagatgataccttggttcatgtcaagagcgggacagctgaggaaagtggggtgggatgcaagtacaatttargaccttggcattgaagccttccccttagtcaacactggcccagaccctggttcttagatgtagcaggagaggctgcctgcttctgccccctttgcttccagaaaggccttttccagctgcctcgtgtgtttcccactctgcccagaaggagtgagagggctgaaaagcggggcgggataaggccctgctttcgacagaaggcttgagacacatctccagaaagcatttaaagagcccctcctgcacataggagctgggactataaggacatggtcatcaccgtggagacggccctctgctctgaggctttagacctggcttctggatttggttctgtccctccagcctcaggcaggttctttacctttcccaggccttggtatcctccttggtaagatcatattggacttggtaccttctgcctgtggctttctaggattatgaccgacctggtttggcatcactttgtgtttagatagatgaaattgcagcctaaaggatgggaggcaaaattgtgtaggagtgctgtgtcctttgagatgacaaatgggatttaaaaattctcaccagcttcatgttggaggtggagtggaggttaagcttgctattaagacgtgatgtaatattggaacctgggtcagagaaactgattgttaagtgacttccattctcccaggacggaaataggaggctaccactgggcctgtaagggattcagtccaagtgacatcatctggttttcagcagctccggtttagaaaaacacacacacatttccgattcaagctgaactttcccgggcactggggggctggagcacccaatgactcaggatgccttagaaggaaataaaacataaagctttttatagcttggtgcttctctcccactgccctcaactctctgccaaggagtgggaggagttagctcatggaccagaactcccattaaagcccctgaactctgattaaatcaagtggcagttttcctcatgagaattatgttctttgtgtcaggaaccttaggaatgagtgtgaattgacacattcagattgtggggttttttttttctcttttgaggtggggtctcattctcactcaggctggagtgcagtggcacaatcacagctcactgcagcctccacctcccaggttcaaatgatcctcccacctcagcccccccagtagctgggactacagggatgtgctgctgtgctcagctaatttttaaatttttttatgcagacgcggtttcacatgttgcttaggctggtctcaaactcctgggctcaacaaatcctcccaccttggcctcccaaagtgttgggattacaagtgtgagccactgtgccttggctcagataattttttttttttttttttttgagacagagtcttgctctgtcactcaggctggagtgcagtggtgtgatcttggctcactgcaaccttcgcctcctgggttcaagcaattctcctgcctcagcctcctgagtagctgggactacaggcgcacaccaccacgtctggctaatttttgtatttttartagagacggagtttcactatgttggcgaggctggttttgaactcctgacctcaggtcatctgtccgccttggcctcccaaagtgctgggattataggcatgagtcactgtacccagccccagatagtcttttcaatatcatatcttagttttattttcagttttacaaaggctaaaaggaaaatccagagtttcctctagcaatataattatttgaacattttgttacaacawgatctttagatcctggctgtatgtaagcatgtttgcttttaaactgatttttcattttgagtctttgtatacccttcaagttgtgattttttttaagttactgcattttttagcaaaagatagattttttcctgcatagacatatcagaatcaagatttgagatagattgttttaaaaatggaaaataagtaaaaaagtaattataaaatcatatcttagttaaaaggaacaggtcatataggtaaaacttcctctgagtgcaggtatccatatctggtgattctcaaacttggaatacttctaacactggacatctaatcctgtttccacaaggcagaacttgggctttctccctttcaatgacaagaagttaattaacagcccattcccatttttatttttatttttttgagatggagtcttgctctgtcgctcaggctggagtgcagtggcctgatctccactcactgcaagctccgcctcccaggttyacaccattctcctgcctcagcctccygagtagctgggactacaggcgctcaccaccacacccygctaattttttgtatttttagtagagacggggtttcaccgtgttagccaggatggtctcaatctcctgaccttgtgatccacccgcctcagcctccccaagtgctgagattacaggcatcagccaccgtgcctggccaacccattcccatttttacaaaagcatttttctgaatttaatagaaatgctgttgattatttaaaatttgtgatgtcaaatgacccataacctataaactatagctgagactctgtatttccttttggaatttttttctcaccatatggatgcagagatagggtttacaacatggggtcccactgtatgtgtaagttttttttttaataagcatactattctttagtatgtacaattacatgttgtatatatacgaatatattacaatcttcttactccttataactttttctcctcacgatataayttatgtaccataaaattcaccttttaaaaatacacaatttggtggtttttagtatattgacagggttgtacaaccatcaccactatataattttagaacactttcatcaccctgaaaaaccctgtacccattggcagtgattcccatcttcctttctgcctccttccccccatcccctaatccccggaaactactatattttctgtctccatggatatgcctattctagacccatataagtgaaatcatgtattcatactttttaaatcctctttttcccttttttttttttttttttttttctgagacggagtctctctctgttacccaggctagagtgcagtagcccaatcttggctcactgcaacctccccctccccggttcaagcgattctcctgcctcagcctcccaagtagctgggattacaggtgcacaccaccacacccggctaatttttgtatttttagtagagatggggttttgccatgttagccaggctggtcttgaactcttacctcaggtgatccacctgtctcggtctcccaaagtgctgggattacaggcrcgagccactgcacccagcttcttttttactttttctactgaacatttctccatcgctttacattcttgaatataatttttaagatctggctgtattaatacagcatcatttagctaaccaataccctaataaaggccatttggcacattcccattattcttttcttatttctccaagaaacattccattttaagctgctttaactgtgagcacattcttactaggctggaatctgcttccttttaaccccacccattggtgctattgcagcttgtggagctaaytctrgacatctaatcctgtttccacaaggcagaccttggtcttcctcactgtcatggacccctcccgacttgtcaggcttaacattttgctccttttttattttttattttattttaattaattaattaattaattaattagagacagagtctcactctgtcgcccaggttggagtgcagtggcgcaatcgccactcactgcarcctctgcctcctgggttcaagtgattctcctgcctcagcctcmtgagtagctgggattacaagcgcccgccaccacgcctggctaattttttgtatttttagtagagatggggtttcactatgttggccaggctggtcttgaactcctgacctcaggtgatccgcctgccttggcctcccaaagtgctgggattacaggcgtgagccactgcgcctggctggttgtgttttcgttaagtgcactggttttgagttggttgctccttcttttttaaaaccactctttgagagaaatcaacaagatgtagtgaaatttacccaggctgtgtattcaaacatctgtgttcaaatcctggaattactggcatgtgccaccacacccagctaatttttgtatttttagtagagatggggttttgccatgttggccgggctggtctcgaactcctggcctcaagtgatctgcctgcctctgccttccaaagtgttgggattacaggtatgagccaccatgcctggcctacaacatataccaactttaatatgtaagaactgatgcaggcatagcatgaaaatgcatcaagtaagaattaacaatggtaagaataagaaatccattattatagagattttaatatacttctggtaattgagaaatcaaccagacaatagaagatttgaaccacagaattaacaagtttgatctcttgtatatacatagaacattagacccagcaagtagagaatgcacatttgaaatattaaatattaatcagcactattattaatcacaaattaataaacaatataactatgtggttataatatataattgtaaatacaaatatataattatataaacaacaaattaatgatattartgtaataaagttactaacaaatatcaattaagaagatattaattaaatagataattaggattgactacctgttagatcatagggtaaatctcaacaactactttaaaaatcctatcatattgacctagaaaataattccaaaaatacaactttaaaaataactgtttagaaaattaaaatccacttctaataacacatgggtaagaagaaatcataacgaaaatctagaaaatatttaggattgaatgaaagaaaattctacatttcaaaatgaggtacaacttaagcagtacttagaaatgtatagccttggccgggtgtggcggctcatgcctgtaatcccagcactttgggaggccaaggtgggtggatcacctgaggtcaggagttcgagaccagcctggccaacaaggtgaaaccttgtttctactcaaaacacaaaaattagctgggtgtggtggcaggcacctgtagtcccagctactcaggaggctgaggcatgagaatcgcttgaacctgggcagtggaggttgcagtgatctgagattgtgcygctgctctccagcctgggcaacagagcaagactccatctaaaaaaaaaaatttatagccttaaaatgcttataatggaaaagtagaaaggctaaaaataaataagctaagcatccaacttaggctagcaaaagaatagaataagctcaaagaaagtagaaggaaagtatcaaggataaccacagaaattaatgagaaacaaaacaaagaagatcgacacagacaaaaagtgggctcttttacaaaaagcatggcagtttgtcaaaaaaattaaacatggaattaccatatgatccagcaattc

SEQ ID NO: 9975 - DNA, 15502 bp, Homo sapiens
ctgtggtctgtaatagacttctgtagttgtaatagaaatgttgacagcttgttaattatagaaatgcttgtgagcatcactgttattcttttggaagacctgacaaaagagttcagagggttttgtttacttaaaccaagctttacgacacctcaagtccaatctcttttccttagaggctgcattcagttccatttttcctgccaatacacagtgtgctgactcagagaagggtcttcagtaacaccagactccaccagtttccacccccgctcaaaaaacaacaaaaatcccagagacacatttttgattcaagggtttttagggcttgcaagsgttataccacctgacaagacccagaagtgtaagtctctctgaggtccttgaactagagtgcaccaaactctgaaagtcacaacagcatgaaatagtactggaccttacacacggcaggcattaaccactatttgtgtgtgatacagaactgccctcaaactcaattggaattaaattattttccttgagtaaaaaaagtaaggtatataatggatacaagtttgagtctatgttttaaacctatctctgccattaactaactgtgcaatatgggtaatcatttaacctctgtggtcctcatagtttattcatttataaaatagagagacactgaacaataactttcaaccattgttctctgtcccactaattattcaaagaacatagatcctaacaagatagaagcaaccccaccattcccacagatatttacaagctttataagtatttggttatcctaagtatcatttacagtaaattttaagaaaaaacaaaattacagtaagctcttaggaacagattttatyaacatggcctagacccaagatgaaattgaaagtgctctgagtcctttgtaaatgcttcaactccacaataaaccaaattttagcaggttttgtatgtctgtgccttgttgatcatttggggcaagatcctttgggtcaaggtttcttaacagcagtgttattgactttgttattgtggggtctgggggaccactgttctgttcatcataagatgtttagcagcatctctggcctgcacccactagatgccaactgagactaccgaaactgtctccagatattgacaaatgtcccctggaagtggggaaacagygggagggaaacaaaattcccctcagttgagaattgctgctttgaagggtaagatgtcatgtgactgtattttttataatgcaatatttaataagcactttttgctaactagctggatcaactcaaagaatktaaggtatttgttgaaggctgatgcctctatttgactttatagtacttagaaggaaattatgatttactacacatgtaatacaaacagttgatacaatgtatgacacatacagtttaatgtgaataatatttggtgcatccgagaggacattaaacaaactyacattctttcacatcattgaattttaagtttctatgtgtattttagaaggatatttcgatcttagatttgaaaattgtcaaaaataacctgctgctgtgaaaaaagtatgtcccaatagagaaccatgaattaatcattctttcagtcattcaataaatgtttcattactaataatgaaaagtgtttttaagtgacaagctggctacattttttagcactaatccttcagacaagaacccactgatatgtagctctaagcaagtaatgcagtgatgtggttagtgctgtaaacatttaggcttgtcctaaagaagtagacaagagaaaaatgaatttaagaccacagtttatattacaaagtgtataatttgtcatctactctttggcttagatacaaatttttatccaagtgcctaggatcaaccactagctagaagtcaaaacacagttgaacaggtagcctaacattttttaagaaaacattaggctaattaatcatcactgtgaagtagcacattgtcccaaatttaaacttatacaaatttcctccacttaacaatataaacaattctgcatcactttaaaatgtcatttaaaaatagctgatgaagaataataacaaaatatactaatctcttaaaattaggtcaatattttaattgtaatacttttttgccaattaatttawcaacactaggaaatctacaaacattgctcaaatggtgtttgttctcagaartatacaattaaagagccttctctgttctttgttacaaggtgcacaatggcaggggaggaatgcatgaaatagtgcaatctaccttggcagtttattagtatagttagtagtactttaaaagtaggatattgaattcattccaaaatctgaaggtctgtactaccaaayacataaacaaacacacatctatatttatgcatatgatatacctgaaaatcagaatgccaaataaataaatgtttgaaagtgtaaatttttaatagtgtaatttcaaactcggaaaaatgccttttaaaactttctagattattttatacttttttagaagtagagttataaaactaaaagccagttgtcaccaccaacactcggctttgagacacaggaaagggaaaccaagatctcttccaaagtccaaatcacacaaaagactggggacctcattgtcttccagtctgtgactctcagatgcagcacaaatgtctttatcaaggaattcagatggattcaattaccgcattcttaaaatagctgattatgtgaaattgtgtgagaaaaaaacaaaaacacaacattttaaaaaagacatttgacttaggaaaagtcaaagaaaagataagattggaacccagaggtaggaaagtattgacttctaagcactgctctcctctggcaaatgtgagcagggtgtraccaggattccacctgtcctctactctagagaggaaaatcagtaggggcagagcgaggagtgagatccccatatgtgcagaagtcccacactgaactccagatatttccggcatgagcctcagaattccctgggggcactttgcctaaatccagcacgaaacagttagctacaaaaccagcccttggacatcatcttctacatgatttttttctccatatttgccccacaaaatgcaactctagagaaagctgagtagacgtctatggattcccggcaagacccgagcctttgtccaagacctcatgtcccaatctactagctgcaaaccaccagtagcaagctgcaaaaccacccagacaggcccaaggccaagggctgccactgtactttctcgatttcccggtcaaatgcaaaagaaaaatgaaatgtgggataagaagtgaggggttgcctggagggttggcacaaaacctcaaaactggtaaaagaaaaaaatatatacccttctgtaaaattaagaaaagccagcccgaagtcacagctttcgtctggcaaacttgggagaagtacaccttaaaggtggggtgagggtcaccgccttccccaaaagagggttattcctaaggaatcccgtggagcttccctctttcccagggggctcggctcacatacttcttcctgttcgtcccttccccttgtgaagctggtgaacaaataagtgattccaaggtgccctggcgcagtctatttcctttgggttaataaaattaaatcaagtcccttgcgatggcgaagatggatctcctgatagtagtccccaacctccaggcacttctcagtcccttcctgccaagccaccagacagtgctcctactctgccacacgcagcccgcacccttctggcggctcccgcgaggccaactcagactctcagttccagttgcccgcgagcctcagacacgcagaagctaaagcgccctcatctaattatttgcagaactattatccaagaaatgggccatgggataaatattcccatttcctggatggggcccctagactgtccacttgctcacaaagattaagggtaagaaaccagctctccccgaatgtgccgcttccaaactgtccagtaaaagggcgagagggagacgtgtggtctcctggggcatggacaacctctcccacctcagcagctaggcgctgggatcggggtcggctctcggctcggctcgcgggctgtaaggtctccgcggaccccaccgcctcttctgcgcgctaagggtgagcgccaagcaatttcgcgagcaatagccggcaaagtaaccaccccgagagggaaaataaacctctgcaaactggagcaagggggtgctttcctcccctggccagaagctccgggatcgcagccctcccgggtccggcttcatccctgcccggccaccgaggccctctttttctgcaccgcggattctcctccgcctgcgtgttcggggcccttgtatccgatgtttctttctaaaagttgtccttccggctgattcggaagtcgctccaagggaaagaaggtttatgctttgtcattatcttcatcgccctctttattttgcccctgccttgtcgtatttcaagaaaatgaactcttagaaaagaaagcctctccgttgaggcggttggcaatctcacagaaatgatgtaaatggtttcagggyttttttcttcccctctgctatttttttcgagtgaactgtgaagatctgtgaaaataatatcagggttttccgtcagaacgagctttgccytgcactcaggcgtggcgtgatctgacccgacacctccaaccatctgtgctatctatctgccttctgatttaccagatctgtacaagccgcatacaaattgtacttgatactaaagaaaagacagtcgggtccagtccagttcggctgtgaacgttctcacctgatttctgtctagggatggacctccccaaaacggttttcctggcgtttttgttatacagccccctaccagttattttcttcaaactaaacaaacccctaccacaggcccagatgagatcatggtttctttgacccaggcctcagaaaatggtatgatgtggactgccaattgggaatcaataaaagttgccaattcactccactagcccaaagtcagagccaccaagccactccttcctcactacaggaggggtcaataatcagcggcttaggaagtgctttctgggcccccgcattgtcgtggatgcccttctgtattgtatttttactgaattgtttttgagctaaaatgccaaggttagagttgttatccccagctcaagaggtataagttctaacacaaggtaggggcaaaataagcckacaaggaaaggagttaagtcgatattttwaaaaagatctaggaaataagcttttaagttgctrtcctgacctaccaatgacttctcggctctagatgtggctatgctgcactttgttcaagtccattaaactgggggagggggagaaagtatatttctccccctttatttggaggtccctacagcccacccttcttttcttaaagtgtctgacttcgtggtctgcatctgcgttatcagacgtgaacatgtccttgttggcatttaaaattattttagtgggctttgaagggagtaaggctagagttcaaactgacctcttctacagatccctggtcctgttcctgctgctccagatttgcttcccactcagctgctttggcaactggaaaggggaagagggaggcatgcagagatgggtacttgggaaaaatgagaagatcgcttccccccaccggcttcctgctcccaccgcaaggtttgctgtttcgttacaactaaacttgcgaattctcggagcatttcagtttggcccagtcctctttgtcctctggagacctctcgaccgagacaacgcatcgccccaaagtgaattcctgaattcctgtggcatcactgcctmtttggtgggaaaaagggagggaggggtagagcggggtgggggagggaggagtagtgaacgctgccgcactcgcctctctttttctcccagacactcgcatgtcttttcaacctccaggttctgcaaaatactgaagaaaagtccaggagctaacggcgggcgctgtcgagcacggggaggtgctgaaatagtcctggcgtgctgattcaagctttgattggcagagccacccggtgactgacagggggtctccatggcgcccgcgccgccaatccgcccaccccaatagcggagccagctcgcctgccggcgtgcctgagccgagccgagcccgaaccccaagccgcggagccagcacctcctccagtcggggtcgyccgctcccggccgttgagccaccgccgccacccggtagtgtgtcccgctgccccaatccgcctcatcaacaagcgcctggcacactcagccaggccygcgggcatctgctgcgtgtcccgctccgggctcagtgccctcgccgccgccggcactgcctcgatgttccagctgcccatcttraatttcagcccccagcaagtggccggggtatgtgagaccctggaagagagcggcgatgtggagcgcctgggtcgcttcctctggtcgctgcccgtggcccctgcggcctgcgaggccctcaacaagaatgagtcggtgctacgcgcacgagccatcgtggcctttcacggtggcaactaccgcgagctctatcatatcctggaaaaccacaagttcaccaaggagtcgcacgccaagctgcaggcgctgtggcttgaagcacactaccaggaggctgagaagctgcgtggaagacccctgggacctgtggacaagtaccgagtaaggaagaagttcccgctgccgcgcaccatttgggacggcgaacagaagacacactgcttcaaggagcgcacgcggmacctgctacgcgagtggtacctgcaggatccataccctaaccccagcaaaaaacgtgagctcgcccaggcaaccggactgacccctacgcaggtgggcaactggttcaaaaaccgccgacaaagggaccgagcggctgcagccaagaacaggtcggtacctagaggcctccgcgctttgagcgcaccggggaggaggcgggtggaggcacctctggcgcccttacccagtccctggcgactccaattcagcaggagttgggagcgcggtctgtcttgggttaagagccctgcgttctgggctcctggccgggagttcccttgccggctctgcttccccacccgctggctccccacgcctgcgggcagctgcagcagctggtcccggtcaccaaaccaaggcttcactgggacggagaggggaagagaaataaaaaattaaaatcctacaaacagttagggaccccaagacccaaagctaattcttgtcagcctgggcacaggctcctactattaatcgaagcctggcttattagcaatgtgtcggtttcatgttaattatcattttcaaagcccaggtatatccctccctaatgctttgaaaacagttttcaatggacttttgagaaatgggaagtcgagttttcctcttcccatgcgctgcctgccactcttgtctcaaaacagcaaactagtccgtgggccgaggcttttcgtttcccggagtgtggatctcgatyagccaaacattttgcggaagagcccggcctcatcccccaggcccaaatgctccttacaatcctttttgcctttaggtcgggccgacccgatccaacgcgatcgcgggagcacttgctcaggcgtaagccccaggcagacgcaccgttagaaatggtatcccatgtccctgggaccgatctgtccttgtcacccacrcttcgtttatttcctgacagtcctgtaaatctcccaaaagtgcacaacaaacagggaggacactgcaagcccagtatataaaagacctgggagctgcggcgctgagaaagggcgcgaatcatggtggggcacaacagtagggacccrcggaggggcggccgcggactcctgcccgacctctgtcgccttgccgagtaatcctcgccttaactgctggggtcttcggaagaacctctagccgccgggctggagggacgcaggaggtggtgggggcgggcgacgggcggctgtgttacgagctgtgacccgtgttccctttcttccccgtagactccagcagcaggtcctgtcacagggttccgggcgggcactacgggcggagggcgacggcacgccagaggtgctgggcgtygccaccagcccggccgccagtctatccagcaaggcggccacttcagccatctccatcacgtccagcgacagcgagtgcgacatctgagttgcccatccaggatgctcagaagcagattccagtgtaaaaacgagaaaaacaaaatgaaagaggggaagaagatgagagacctgcaaatccagcgccasagaagccaggtgaccagggacccgcgggctcgggttgccgtttcccgccccaccccgcggccggcctggcttcactggcgccctttggccgcgaccacgggaaccagcggtgaggcctgacccagcaccacgttcttcttgctttgctttttcctaaggattttgctgcaaagtctccttcggaacccgaactgcaagctgagcgcctgcccagattctcccatgggtatttcacgtcgaaaggacgctgttacatatgtataactttcgctttaaagtttttttttaacaaaacatatatatgctgtttatttacttatttaagagaccgccatggtaggtttctctgtagcttggggaacttgctgtttctaaacatgcaggctggtggtgatgggttctgtgtggagaagccaaacaataaaacaacctagtgggcaaccttcttaattaagggagctgctctcagattccttttcttcttattattattaatatcattcccttcaccaggcatgcagggacccttgagcaaatggtctccggaaggtcttacctatatatcttttgccttctttggtgcttcctggtatatgttttaaacaacctatggtaggtctataaccacctcccacgtcaaattacacgtatgtgcatatatgtatgtacctatacaaacatatgtatgtatgcatacacgtgatatatttaaggctagaaattggcaacatgtgagcgtcctctctaaggcaagtccccgcatccccagcacaggtaattatggcttgtccacttgacactcgtttacatgaagtgtcaacagctttcaggagcaatttaggaagccaaactatgggactcaataagtgagtcctattttctaaaaatgcaaaactatcctgactcargctctgcagcaagaaaggctttctgtctccttcaaggccccctccaatacaaaagcagcaggcacccatgatcatgctagagtgagcatatactgcatttaggattgagctattattaaaataagacaaaagatgatagaagaggttgtaaataattagactaacatcttcttgctgcagaatttggttttaatcaaatgaatggtttttaacaagagggatactgagatgggggaaaggatgtaatcatgtcacatactgagggtaaaacaaggctgtagaaataactggcattttaaaaacctaatctccgaattaagcatagaacaagtcatcaagggcctcattgtcctggtaatggcctcgattaaaacataaaatatttttagcatttaatttttcctcgtgcacatgcatgtatgcacctatacatgaacaaatgcatgcatatacaacgcaaaaacatctaccatctttgcactaagaaaataaatgctagccagagtctctaattttgttcctagtgaaacagattgcatattataaaatttgacattgatctttaaatcacttgagctgacttccctctttactgtccccatcccccaattacagccttttccatttgcctttctgtccttagaagatgttctttggatcagaagcctgctaacttctttaggcagaagtgccaaagtgcaaaccaaacaaaaataagtgaagtcatggaagacaaaaagcagccaaacggcaagatagacaatggaagcccaggacagagtaagggttgatttttggtttctaaatcgcttgaatagatttggctcatttgggctttataaatgttgtccttgtgtatggtggcccttatccagagaattcttgaaaatcaaaactctcttgcacaagagctttacatggaaggagtgggtaagttttcgtgataaaactggtgttctttccaaaagcaagcaaaagccctcctgtgggtcctgaaaggctcccattgtagagcttcctcagtacttaattttgtttcctagagccccaggtagttcctagaatgctaacgaggggctggcgaggactagagtgaggccaggaggggactcackgtcaaggttatgcaagtgcagcaagtgcaaggcacatgagattgagtgcctccttaaattttgcactctaagtgcctcctttgcctcatcctagtccttaatctgacaaggagtagccacggatatccactcttgttccccagccccaccccacccttagctatggggctgtccagaaccagtgtttggagaagtttgttggcaaattttctcttaagtttatgcttccaagtcctagagggatgggaaataactaattagtggaataatgtaaaagaatttgagattctaaaaatcccactccacccaccccttcaaatgatacctaaaagcagaagaaaatgtccattccgcagtgtcaagaaaatagggtaactaagaaactaagctttctctttacaaaataatttttaagtgacagtttattgcttggacaaaaagagaagaccaaacagtgatggagcatttttaattcctgctttgacaaaagcctttaaactacagctaccatttacttaaattaacaagctgcctacattttaaagtagctattctgtttcaacaatctggakatttatttatttaatttcactttagaatcttaagggggtgacacattacttgtaagatttttttaaatgtttatctgtaatgtgatggcacctaattgcctctgtgaataaccaattctttggtgaccacatattggaaattagtccagatcttcacagagatttattttattttaatctttccaatcttcccaaggacatttaaagggtttctttttaagactttttccatatcagcttcattctggtcttcagggttttggggggaaaaaaartccaggtaatggcaaggctgaaggtttctgaatttggcaaaatctctatataatgggtttccttcctttcttttcctgcaattcttctgtcacaatttcccaaaaagcagctactccagcagagtggaaagagcatttttatattaaatatttcaacggacctgaccaatgtgaagattttaccccaagccccaggtcaggctcttttccggcttataaacatttcaaccacactccagtttcaccaaaaaaaacgacggcccctgctccccaaatgccgcagttcctctcgcctccactttaatgacccactccacttccacccgtcactccctcctttcccttcgccagtttgtttataaaaaatctgggagggaggggagaagacgatgggggtggggagggcttgctctttgtttacattaaacaaatgacaggcaaagagctcaagcaaagtcttccttgacctcgttccctctccctaattttaacaaaaaggaaaaaaatattgtatccaaagagaatgtgaatggggcgggaggagaggagaagcagcttttcgctctattcaacggggacgcgagagcgcggacgatttccgctccttttgtgaggcggagcccgggggcggccgtgaatggggggtctgtggagcggccggcggggctgtcaggcggctctgcgtaatcagggctaatgacggcggccgggcgctcggcgggacaatgcgcggggccgcggggttttgtcggcctgaatggctaataggtttgcctgtgagctgcgagggggcggtgtcggggaggaggcggcggcgaggggagaaggggtcattgtccgcgcgctggcccgggcgccgaggcgtgtccctgcctgcgccgcgcggctacccccgtgcccggcgccgccgacgggaaggcagcggcggggaggccccctggaggcctgctgggaaatggcggctggagcggcgggcgcgtgggtcccctcggggaggcgccccaagccacggtccgctcccaaagagaagcccagactgggcccacagtacccgggaaggtgagtccttactcgggggcccagatctccccacggaggccacagatctgggyccccgaggaaggagagccccccttttcgcgcacccaccttttccatccagcgccccgcgaactcgcggacgtgtaggcctcgagccactcctactgttgggctgcgtgactcagcggctcgaggagagaaacctctcaaaaccgggggaccgagacggggttcaatttaaacctaggtgggagaatgagcccacaagcgcgcgcccctgcagctgcggaggcgcgcgcccgcccaccctcgggcgcctgaagtcgcagcggttgcagagcctcgagcccgtggatgcggcgcgcgccgcggtctgggcctgcgcgagaggctgccgcccgcgtcgggcctgggcctacgcgtgtctggcctgggcctgccggtgcaacagcagttgtcgccaccggtcctaggccgcgccgagcgagtcgccgagaggggcgggaagaggggagaggtccgagaccagggagcgggacctaaagggggctttccgcgcccgacaggtccgccggggttagccttcgaggcggggagagggagcggggtccttcaaggaccgcatgttcgcgatagcacatttgagccctggcaggccacctgggccgccttctttcggaaaccttgcggggtttccaagcaaggtttacaatgggaaactttatttcccattgtaagctcttacaaatctcctctggctagatccttccttgcagctctctttgctaggatttatattcccaaacttcttcagacgtgccctaccgcgagggaacgaactggttttcttcccgttttcacctccttgtctggagacaaaggggtgtgagggcgatcccagagctgaacaagcagtttcacgcctccctgcccgctcatgctgtttccgcttgccctgtggtttgctctgcctggaacgccgccccctacctcaactgctaccctgtcattccacaaagcctaccccacctccactaagttttccgtgagccagtgagctccacacagataatgtgccaccamcttttttaatgctcccaccgcaccttatctaaacgtctgttttagcgctctaacacttttgctcatttatttgtctgtctgacttcccccttcagcctttgctagaatgtaagctctttatttaaaggcaaggaccaactcttacccatctttgtattcccagcacctagcccaagtagtaggtgctcaataaatgttttaaagctgaatgaattcatgcatcttccttgaaatctgtctgctcttacgttagtgggggacctctgctagctcgggaatcatttgaagagaagagatgacttatattggctggacccaaagttcactgtaatcctcccagctcagtaagttactggctgttacctacttgtcgggttctctgggatgattccatagagtgctgtctccctctaggcatgcggtttttttagagtgctatgactttgggttcataccatgaaaattatcttctcacacaacacattttcccaaaaaggtaagagtaatcctcttggattttgaaaattctaggtattatactctctgaaccctacaacataagaatttctattctgcttcaaagataactgctatggtttaatgttcatatccctccaaaattcatgttgaaacttaatccccaatgcagtagtattaagaagtgggacctttaggaggtgattcactgccccatgaatggaattagtgcttttataaaagggcttgaggaagtctattatttcctttttgcccttctgtccttctgccacgtgaaggtgcaggaaaaagacaccatcttagaagcagagagaaccagcctttaccagacacagaacctaaccaggctttgatcttgcacttcccggcctccagaactgtgagaaatgtataaattacccagtccaaagtatttcctttatagcagcaggaatggactaagacaataaccctttcctttctcctccctcccaccttttctctcctctggcttccccacctcactccagtcctgacctacacatgataaagtaaaccacaaaaacaaaaaaatcacaaacccagacaaggtctccaattctaagataatagattggcatcccaccaccatgcttaggctcacctaggggggataaacagttttcattaaaatattttttttttttgagacggagtctcgctctgtcgcccaggctggagtgcagtrgcgggatctggactcactgcaagctctgcctcccaggttcacgccattctcctgcctcagcctcccgagtagctgggactacaggcgcccgccaccccgcccgactaattttgtgtatttttagtagagacggggtttcaccgtattagccaggatagtctggatctcctgacatcgtgatcagcccgcatcggcctcccaaagtgctgggattacaggcgtgagccacccgcacccggccattaaaatcttaaatcgcaagggctgtgtgaaaatactggatagcaaactcatctctattttaaaatttaatgggcagaagcaagtgaactgtgtataatttcgaattctgataaaatacgtataaggcttcctcttggaaattcattctagcctggcactgccaatctgcaacctgagaatactgagttactgtttgtttttctcactgaagagattagtcttaaattttctagcacgaaatcgaacacttgagagggcacattaatttggcacatgaagagtctggtgggcaaaaaattattatgcatttcgaacattttcagatatttaagattcctataaaagatttgcccatttaaattaatcaccacttaaagcattttccatggcattgggtatactcctgactttctataaattcctggtaaattacgtatttgaactgaagacctacgcatgtatatcttatytaaagaaattatttttgcagatacttgtaactgtatgaactggatttgtccatttaaaatagaaagcaagtgggaaaaagaaaactatactggaaacagtctgtggacaatgggctggcacctgagaaggtgggatcagacaaacctggcttgaaatacctaatcgctgtgaatttcagaagtcactc

SEQ ID NO: 9976 - DNA, 158834 bp, Homo sapiens
  misc_feature (5011)..(5030): n is a, c, g, or t
  misc_feature (45472)..(46056): n is a, c, g, or t
  misc_feature (76024)..(76528): n is a, c, g, or t
  misc_feature (84484)..(84572): n is a, c, g, or t
  misc_feature (87746)..(88319): n is a, c, g, or t
  misc_feature (89385)..(89771): n is a, c, g, or t
  misc_feature (90872)..(90891): n is a, c, g, or t
  misc_feature (92464)..(92483): n is a, c, g, or t
  misc_feature (95549)..(108857): n is a, c, g, or t
  misc_feature (112118)..(112137): n is a, c, g, or t
  misc_feature (115217)..(115236): n is a, c, g, or t
cacccacctgtagtcccagctactttagaggctgaggcagaaggattacttgagcccaggagttcgaggctacagtgagctaagatcgtaccactgcactccagtctgggcaacagagcaagaccccatctctaaagcaacatattaactttatatcatggtgtttaaatattgttaactttactttaaaaacattgttaactctctaaagaaaatactgttaactcggccaggtgcaatggctcatgcttgtaatccaaggaggccgaggcagcagatcacctgaggtcaggagtttgagaccagcctggccagcatggtgaaaccccgtctttactaaaaatacgaaaattagccaggcatagtggcacatgcctgtagttccagctactcgggaggctgaggcaggagaattgcttgaacccaaaaggcagaggttgcagtgagctgagatcacaccactgcacttcagcctgagcaacagagcaagactccgtctcaaaaaaaaaaaaaawatatatatatatatawagttarctctctaaagaaaatcctaactctgccacttcctggttctgggacctgaggcttgtcatttcacctccttagacttcagtttcttcagctgtaaaatgggaaggatagcacttgtctccccaggttgtggtgaggaccaaggcactccacataacacctgcatgtagcatcttctctgctaatgttttgacccagtagacaagagagcgatgcaacagggaaagatcagagcacattctgwactcaaaggaacatcccaaaggtgtgacatcagtgacagcctggctgcccaaagcaccagaaagcctgtcgtcaccagaggaaccaatgagcccagcattgcccaacaaatagcatcactgaggcgacctttgcaaggtagatgtcaacagcaatcatcaccatggggacaacagccacctccactgccctccaggccacgtctacccagagcagaatttgcaaaatccacaacagccacaccacatagtggatccagatgattcacaacagcagcctcctaaagtcatgaatacagccatgagtatggattctcscagctgagaccacagctactcctggctcagtgattcagtcattgaggacagtctcctgtgccattcctgagtcaatgcaatgtagacrgtgtagctacttccacccatgctgatgctctacttgcaaaacaatctgtgaagatggtagaaggactcccattgtatcatgttctcatgtcttacttgggtcaaagccattatttaacctggaatgcctcacctactgtcatccccaattccccaattcctttttggtctacaaatcatgctttctttctttctttctttytttttttttgaggccgagtctcgctctgtcgcccaggctggagtgcagtggcatgacctcggctcactgcaacctccgccttctgggttcaagcaattatcctacctcagcctcccaagtagctgggattacaggaacgtgccaccactcctggctaatttttggttcaagtggtcctccaacatcagcctcgcgagtagctggaactacaggcaagcaccaccacgcctggttaattttctaaattgttttgtaaagatggggtctttctatattgcccaggctggatttgaacccctggcctcaagtgatcctactgctcagcatcccaaagtgctgggattacaggtgtgaaccatcatgccctgttctgagcttccttacttaggtgctctttccatccttttctcctcacaggaactcacgagcctggggagarttcgtcatccccacatggaacctcagtatggccaacaggcagccctctggtrgaaaaatcaacaatcagtcctgcaggtatgctccaatctcatctcctccacattgttatggtctcccggagctttgttaatctctttgaagacgaacatttttgatcttttccataggggaagtgcaagggacgcctgtgttggagtttgctccccagctacagggctccctaactttttatttaacctccagctttatgaccatgtacaagtatgcaattctaatctttatcttgttttgagattctaatccagagtagttgggggacaggaagcccagcctataacccctgattttttttttttttttttgagacagagtctcattctgtcacccaggctggagtgcagtggcacaatctcagctgactgcaacccctgcctcccgagtttaagcaattttggtgtctcagcctcctgagtagctgggattacaggcgcctgccaccacccccrgctaatttttgtattttttggtagagacggagtttcaccatgttggtcaggctggtcttgaactcctgacctcaagtaatctgctctcctcaggactctcttggaaggatttttttttttttttttttttttagatggaattctgctctttgtctcccaggctggagtgcaatggtgcgatcttggctcactgtaacctccgcctcccaggttcaagtgattctcctgtctcagcctccggagtagctggaattacagccacccgccaccacgcccagctagtttttgtatttttagtagagacggggtttaaccatgttggccaggctggtcttgaactcctgacctcaggtgatccgcccgctttggcctcccaaagtgctgggattacaggcgtgagccactgcgcccagcaggaactcttagttcagaagaagagtgagctaataatgtatatgtcttatagcacttttttgcatctaagttgttttatttgggatcagaagacttttattttcttttttaaaatttagcttttattttaagtttaggggtacatgtgcaggcttgttatataggtaaacttttgccattggggttggttttacagattatttcatcacccaggtattaagcctagtatccattagttatttttcctgatcttctccctcctcccaccctccaccctccaataggcccttaattaaactaaagagcttcygcacagtaaaggaaactatcaacagagtaaacagacaatctacagaatgggagaaaagctttacaaactttgcatctgacaaaggtctaatatccagcatctaaaagaaacgtgccgggtgtggtggctcacacctgtaatcccagcactttggcggatcacctgaggttgggagttcgagaccagcctgcccaacatggagaaagccaatctctactaaaaatacaaaaattagccgggcatggtggcacatgcctgtaattccagctactccaggggctgaggcagaagaatcgcttgaacccggaaggtggaggttgcagtgagccgagattgcaccactgcactccagcctgggtgacagagtgagactccatctcaaaaaaaataaaaaataaaaaataaacgaatttataatttaaaaaaccagcaaaaaacaaaacaaacaaacaaaagaaacattacacagtgggcaaaggacgtggttcttcaatcattttgacctggataaaattggtagctcctgagtagaaaagaagattgggaaagcatgaggaatgaattatagtttcacttaccccaccggcctagggaaaaactcaattcctaggagasgcagcttagaaccaaggtgggcctcatcttgagagaaatccatgagccatgcctatcttagtctgtattgcattgcttatagcagaacagctgaaactgggtaatttacaaagaaaaataatgtatctattacagatatggaggctggaaagttgaaatccagaggggcacacctggtgagagccctgttgctggtggggactctgtggcatccagaggtagacagggcatcacaygtcaagacagctgagtgcgctaatgtgatagcacaggtctcacttcctattttaaagcttttcttttctttttttktttgagatggagtctcaatctgtcacccaggatggagtgcagtgctgcgatcttggctcactgcaacctccacctcctgggttcaagtgattttcctctcttagcctcctgagtagctgggaccacaggtgcgcaccactatgtctggctaatttttgtatttttttgtagagacatggtttcaccatgttggccaggctggtctcgaattcctgacttcaagtaatccacccacctcagcctcccaaagtgctgggattacaagcatgagccaccatgcatggcctaaagcttcttttaaagccaccaagtcccttcccatgttagcccactaatccatggrttagtcatgaatggattaatctattcatayggacagagccctcatcacccaatcacctcttaaaggccccacctctcaatactgccacactggggattaagtttcaacagagttttggaggggacattcaaatcatagtaatgcccaaagtgaaaaatcttccctgcacttttccctcaacaaaaacagccagagatagtgagctgccaggaaattctttttttttttcctcttctgtcctaaatcagcatcgctagacctttacatgattcaacctcatcttcttcaccctctgggtcatgaaattttatttatttatttattattttcttgggacagactctggctctgtcgcccaggctgaagtgcagtggtgtgatcttggctcactgcaacctccgcctcccgggttcaagcgattctcctgcctcagcctcctgagtagctgggattacaggtgggcgccaccacacccagctaattttttgtatttttagtagagatggggtttcaccatattagccaggatggtctccatctacttgacctcgtgatctgcccacctcagcctcccaaaatgctgggattacaggcatgagacaccacgcccagcaggccagggtcatgagattttaatcaagagcaacttgccactgattcctgagagtgcatactgtgggcccctgnnnnnnnnnnnnnnnnnnnntgcactccatcctgggtgacagattgagactccatctcaaaaaaaaaaagaaaagaaaagctttaaaataggaagtgagacctgtgctatcacattagcgcagtttagttgcctccctccctctctctttctctctttctttctttccttctttctttctttctctcttccttccctccctccctccttccttcctttctctttctttctctttctttctttttttccttccttccttccttctttctctttcccttccttccttccttccttccttccttcctttctttctttctttctttctttctttctttctttctttctttctttctttctttctttctttctttctttctttctttcttttctttctttctctttctttttgagacagagctcttattacccatgctggagtgcagtggtgtgaccttggcttactgcaacatctgcctcctagggtcaagtgattctcctgcctcagcctcctaagtagctgggattacagacacatgccaccacacccaatatttatttttattaaaattttttttaaaattatttttaaaaaattaaaaataattttgtatttttagtagagacggggtttctccatgttggtcaggctgatctcaaactcccaacctcaggtgatcctcccacctcacctcccaaagtgctgggattacaggcatgagccaccgtgcccagcctggttcctggtttctaagacatcacacacacacacacacacacacacacacacacacacacwmwcacacactcagagagagagagagagaggatcattaagacatgatacactaagaaattctattctgcagacactgagaatccgttaaaaagtttgaagggaagaattgagatcatcaggtgtttatttgaggaaattgtctgtggttgaactatcctttcctttctctccctgagatttggtcttctcaattagaagcgttgcacaattcccccaacctccatacatacggcagctcttctagacacaggttttcccaggtcaaatgcggggaccccagccatatctcccaccctgagaaattttggagtttcagggagctcagaagctctgcagaggccaccctctctgaggggattcttcttagacctccatccagaggcaaatgttgacctgtccatgctgaaaccctcaggccttcctgggtcatcttctcccacccgctccttgatgacagggagcaggagcactaaagccacaccagaaatggattcaggactgacaggagccaccttgtcacctaagacatctacaggtgcaatcgtggtgacagaacatactctgccctttacttccccagataagaccttggccagtcctacatcttcggttgtgggaagaaccacccagtctttgggggtgatgtcctctgctctccctgagtcaacctctagaggaatgacacactccgagcaaagaaccagcccatcgctgagtccccaggtcaatggaactccctctaggaactaccctgctacaagcatggtttcaggattgagttccccaaggaccaggaccagttccacagaaggaaattttaccaaagaagcatctacatacacactcactgtagagaccacaagtggcccagtcactgagaagtacacagtccccactgagacctcaacaactgaaggtgacagcacagagaccccctgggacacaagatatattcctgtaaaaatcacatctccaatgaaaacatttgcagattcaactgcatccaaggaaaatgccccagtgtctatgactccagctgagaccacagttactgactcacatactccaggaaggacaaacccatcatttgggacactttattcttccttccttgacctatcacctaaagggaccccaaattccagaggtgaaacaagcctggaactgattctatcaaccactggatatcccttctcctctcctgaacctggctctgcaggacacagcagaataagtaccagtgcgcctttgtcatcatctgcttcagttctcgataataaaatatcagagaccagcatattctcaggccagagtctcacctcccctctgtctcctggggtgcccgaggccagagccagcacaatgcccaactcagctatccctttttccatgacactaagcaatgcagaaacaagtgccgaaagggtcagaagcacaatttcctctctgggkactccatcaatatccacaaagcagacagcagagactatccttaccttccatgccttcgctgagaccatggatatacccagcacccacatagccaagactttggcttcagaatggttgggaagtccaggtacccttggtggcaccagcacttcagcgctgacaaccacatctccatctaccactttagtctcagaggagaccaacacccatcactccacgagtggaaaggaracagaaggaactttgaatacatctatgactccacttgagacctctgctcctggagaagagtccgaaatgactgccaccttggtccccactctaggttttacaactcttgacagcaagatcagaagtccatctcaggtctcttcatcccacccaacaagagagctcagaaccacaggcagcacctctgggaggcagagttccagcacagctgcccacgggagctctgacatcctgagggcaaccacttccagcacctcaaaagcatcatcatggaccagtgaaagcacagctcagcaatttagtgaaccccagcacacacagtgggtggagacaagtcctagcatgaaaacagagagacccccagcatcaaccagtgtggcagcccctatcaccacttctgttccctcagtggtctctggcttcaccaccctgaagaccagctccacaaaagggatttggcttgaagaaacatctgcagacacactcatcggagaatccacagctggcccaaccacccatcagtttgctgttcccactgggatttcaatgacaggaggcagcagcaccaggggaagccagggcacaacccacctactcaccagagccacagcatcatctgagacatccgcagatttgactctggccacgaacggtgtcccagtctccgtgtctccagcagtgagcaagacggctgctggctcaagtcctccaggagggacaaagccatcatatacaatggtttcttctgtcatccctgagacatcatctctacagtcctcagctttcagggaaggaaccagcctgggactgactccattaaacactagacatcccttctcttcccctgaaccagactctgcaggacacaccaagataagcaccagcattcctctgttgtcatctgcttcagttcttgaggataaagtgtcagcgaccagcacattctcacaccacaaagccacctcatctattaccacagggactcctgaaatctcaacaaagacaaagcccagctcagccgttctttcctccatgaccctaagcaatgcagcaacaagtcctgaaagagtcagaaatgcaacttcccctctgactcatccatctccatcaggggaagagacagcagggagtgtcctcactctcagcacctctgctgagactacagactcacctaacatccacccaactgggacactgacttcagaatcgtcagagagtcctagcactctcagcctcccaagtgtctctggagtcaaaaccacattttcttcatctactccttccactcatctatttactagtggagaagaaacagaggaaacttcgaatccatctgtgtctcaacctgagacttctgtttccagagtaaggaccaccttggccagcacctctgtccctaccccagtattccccaccatggacacctggcctacacgttcagctcagttctcttcatcccacctagtgagtgagctcagagctacgagcagtacctcagttacaaactcaactggttcagctcttcctaaaatatctcacctcactgggacggcaacaatgtcacagaccaatagagacacgtttaatgactctgctgcaccccaaagcacaacttggccagagactagtcccagattcaagacagggttaccttcagcaacaaccactgtttcaacctctgccacttctctctctgctactgtaatggtctctaaattcacttctccagcaactagttccatggaagcaacttctatcagggaaccatcaacaaccatcctcacaacagagaccacgaatggcccaggcwctatggctgtggcttctaccaacatcycaattggaaagggctacattactgaaggaagattggacacaagccatctgcccattggaaccacagcttcctctgagacatctatggattttaccatggccaaagaaagtgtctcaatgtcagtatctccatctcagtccatggatgctgctggctcaagcactccaggaaggacaagccaattcgttgacacattttctgatgatgtctatcatttaacatccagagaaattacaatacctagagatggaacaagctcagctctgactccacaaatgactgcaactcaccctccatctcctgatcctggctctgctagaagcacctggcttggcatcttgtcctcatctccttcttctcctactcccaaagtcacaatgagctccacattttcaactcagagagtcaccacaagcatgataatggacacagttgaaactagtcggtggaacatgcccaacttaccttccacgacttccttgacaccaagtaatattccaacaagtggtgccataggaaaaagcaccctggttcccttggacactccatctccagccacatcattggaggcatcagaagggggacttccaaccctcagcacctaccctgaatcaacaaacacacccagcatccacctcggagcacacgctagttcagaaagtccaagcaccatcaamcttaccatggcttcagtagtaaaacctggctcttacacacctctcaccttcccctcaatagagacccacattcatgtatcaacagccagaatggcttactcttctgggtcttcacctgagatgacagctcctggagagactaacactggtagtacctgggaccccaccacctacatcaccactacggatcctaaggatacaagttcagctcaggtctctacaccccactcagtgaggacactcagaaccacagaaaacyatccaaagacagagtccgccaccccagctgcttactctggaagtcctaaaatctcaagttcacccaatctcaccagtccggccacaaaagcatggaccatcacagacacaactgaacactccactcaattacattacacaaawttggcagaaaaatcatctggatttgagacacagtcagctccaggacctgtctctgtagtaatccctacctcccctaccattggaagcagcacattggaactaacttctgatgtcccaggggaacccctggtccttgctcccagtgagcagaccacaatcactctccccatggcaacatggctgagtaccagtttgacagaggaaatggcttcaacagaccttgatatttcaagtccaagttcacccatgagtacatttgctatttttccacctatgtccacaccttctcatgaactttcaaagtcagaggcagataccagtgccattagaaatacagattcaacaacgttggatcagcacctaggaatcaggagtttgggcagaactggggacttaacaactgttcctatcaccccactgacaaccacgtggaccagtgtgattgaacactcaacacaagcacaggacaccctttctgcaacgatgagtcctactcacgtgacacagtcactcaaagatcaaacatctataccagcctcagcatccccttcccatcttactgaagtctaccctgagctcgggacacaagggagaagctcctctgaggcaaccactttttggaaaccatctacagacacactgtccagagagattgagactggcccaacaaacattcaatccactccacccatggacaacacaacaacagggagcagtagtagtggagtcaccctgggcatagcccaccttcccataggaacatcctccccagctgagacatccacaaacatggcaytggaaagaagaagttctacagccactgtctctatggctgggacaatgggactccttgttactagtgctccaggaagaagcatcagccagtcattaggaagagtttcctctgtcctttctgagtcaactactgaaggagtcacagattctagtaagggaagcagcccaaggctgaacacacagggaaatacagctctctcctcctctcttgaacccagctatgctgaaggaagccagatgagcacaagcatccctctaacctcatctcctacaactcctgatgtggaattcatagggggcagcacattttggaccaaggaggtcaccacagttatgacctcagacatctccaagtcttcagcaaggacagagtccagctcagctacccttatgtccacagctttgggaagcactgaaaatacaggaaaagaaaaactcagaactgcctctatggatcttccatctccaactccatcaatggaggtgacaccatggatttctytcactctcagtaatgcccccaataccacagattcacttgacctcagccatggggtgcacaccagctctgcagggactttggccactgacaggtcattgaatactggtgtcactagagcctccagattggaaaacggctctgatacctcttctaagtccctgtctatgggaaacagcactcacacttccatgactkacacagagaagagtgaagtgtcttcttcaatccatccccgacctgagacctcagctcctggagcagagaccactttgacttccactcctggaaacagggccataagcttaacattgcctttttcatccattccagtggaagaagtcatttctacaggcataaccycaggaccagacatcaactcagcacccatgacacattctcccatcaccccaccaacaattgtatggaccagtacaggcacaattgaacagtccactcaaccactacatgcagtttcttcagaaaaagtttctgtgcagacacagtcaactccatatgtcaactctgtggcagtgtctgcttcccctacccatgagaattcagtctcttctggaagcagcacatcctctccatattcctcagcctcacttgaatccttggattccacaatcagtaggaggaatgcaatcacttcctggctatgggacctcactacayctctccccactacaacttggccaagtactagtttatctgaggcactgtcctcaggccattctggggtttcaaacccaagttcaactacgactgaatttccactcttttcagctgcatccacatctgctgctaagcaaagaaatccagaaacagagacccatggtccccagaatacagccgcgagtactttgaacactgatgcatcctcggtcacaggtctttctgagactcctgtgggggcaagtatcagctctgaagtccctcttccaatggccrtaacttctagatcagatgtttctggccttacatctgagagtactgctaacccgagtttaggcacagcctcttcagcagggaccaaattaactaggacaatatccctgcccacttcagagtctttggtttcctttagaatgaacaaggatccatggacagtgtcaatccctttggggtcccatccaactactaatacagaaacaagcatcccagtaaacagcgcaggtccacctggcttgtccacagtagcatcagatgtaattgacacaccttcagatggggctgagagtattcccactgtctccttttccccctcccctgatactgaagtgacaactatctcacatttcccagaaaagacarctcattcatttagaaccatttcatctctcactcatgagttgacttcaagaktgacacctattcctggggattggatgagttcagctatgtctacaaagcccacaggagccagtccctccattacactgggagagagaaggacaatcacctctgctgctccaaccacttcccccatagttctcactgctagtttcacrgagaccagcacagtttcactggataatgaaactacagtaaaaacctcagatatccttgasgcacggaaaacaaatgagctcccctcagatagcagttcttcttctgatctgatcaacacctccatagcttcttcaactatggatgtcactaaaacagcctccatcagtcccactagcatctcaggaatgacagcaagttcctccccatctctcttctcttcagatagaccccaggttcccacatctacaacagagacaaatacagccacctctccatctgtttccagtaacacctattctcttgatgggggctccaatgtgggtggcactccatccactttaccaccctttacaatcacccaccctgtcgagacaagctcggccctattagcctggtctagaccagtaagaactttcagcaccatggtcagcactgacactgcctccggagaaaatcctacctctagcaattctgtggtgacttctgttccagcaccaggtacatggrccagtgtaggcagtactactgacttacctgccatgggctttctcaagacaagtcctgcaggagaggcacactcacttctagcrtcaactattgaaccagccactgccttcactccycatctctcagcagcagtggtcactggatccagtgctacatcagaagccagtcttctcactacgagtgaaagcaaagccattcattcttcaccacagaccccaactacacccacctctggagcaaactgggaaacttcagctactcctgagagccttttggtagtcactgagacttcagacacaacacttacctcaaagattttggtcacagataccatcttgttttcaactgtgtccacgccaccttctaaatttccaagtacggggactctgtctggagcttccttccctactttactcccggacactccagccatccctctcactgccactgagccaacaagttcattagctacatcctttgattccaccccactggtgactatagcttcrgatagtcttggcacagtcccagagactaccctgaccatgtcagagacctcaaatggtgatgcactggttcttaagacagtaagtaacccagataggagcatccctggaatcactatccaaggagtaacagaaagtccactccatccttcttccacttccccctctaagattgttgctccacggaatacaacctatgaaggttcgatcacagtgrcactttctactttgcctgcgggaactactggttcccttgtattcagtcagagttctgaaaactcagagacaacggctttggtagactcatcagctgggcttgagagggcatctgtgatgccactaaccacaggaagccagggtatggcyagctctggaggaatcagaagtgggtccactcactcaactggaaccaaaacattttcttctctccctctgaccatgaacccaggtgaggttacagccatgtctgaaatcaccaygaacagactgacagctactcaatcaacagcacccaaagggatacctgtgaagcccaccagtgctgagtcaggcctcctaacacctgtctctgcctcctcaagcccatcaaaggcctttgcctcactgactacagctcccycaacttgggggatcccacagtctaccttgayatttgagttttctgaggtyccaagtttggatactaagtccgcttctttaccaactcctggacagtccctgaacaccattccagactcagatgcaagcacagcatcttcctcactgtccaagtctccagaaaaaaacccaagggcaaggatgatgacttccacaaaggccataagtgcaagctcatttcaatcaacaggttttactgaaacccctgagggatctgcctccccttctatggcagggcatgaacccagagtccccacttcaggaacaggggaccctagatatgcctcagagagcatgtcttatccagacccaagcaaggcatcatcagctatgacatcgacctctcttgcatcaaaactcacaactctcttcagcacaggtcaagcagcaaggtctggttctagttcctctcccataagcctatccactgagaaagaaacaagcttcctttcccccactgcatccacctccagaaagacttcactatttcttgggccttccatggcaaggcagcccaacatattggtgcatcttcagacttcagctctgacactttctccaacatccactctaaatatgtcccaggaggagcctcctgagttaacctcaagccagaccattgcagaagaagagggaacaacagctgaaacacagacgttaaccttcacaccatctgagaccccaacatccttgttacctgtctcttctcccacagaacccacagccagaagaaagagttctccagaaacatgggcaagctctatttcagttcctgccaagacctcsttggttgaaagtaagaatgccctgctccttccccaagtgtgctggggatgaatctggaaataaactacatcttttttattttttaaacttttatatttgaaaatataaatattttaggttcagggaacatgtgcaggtttgttatataggtaaattgcatgtcatgggggcttggggtacagattacatcatcagccaggtaataagcctagtacctgatcagtagattttttttaatcctctccctcctcccagcctccaccctcaattcacatgtctccatgtgtactcaaggtttaattcccacttatgagtgagaacatgcggtatttgtaaactacatctttatttttgctaacctcgaactgaaatttagcatttgttttattgatgaatagaggtaacaaaacaaaccacattaatcctagcagtgcctgtgcctttgccaacaacagaaattccggacactttcatatcctatgacaattgttgcaagcacttttaaaaatcatgtaygactttattcataattatagtggttattaggcttttcaatagatcttatttaatgagttagtaaaakaagtgcctgtattattgtattacatttgtttattaagatcttgataacaacatttcaatataatcatttcctttgttttttaaattttagattcaggggtatatgtgcaggtttgttacgtggatatactgcataatgatgaggtttggcttctagtgaacccatcagccaaatagtgaatgttgtgcccaataagtagtttttcaatcctcacttcactcccagcctcctctattttggagtcccagtgtctattatttctatctttaygtccacatgtacccattggttagctcccacttataagtgagaatgtgcagtatttaattttctgtttttgagttattttgcttaggttgatggccttcakctccagccacgttgctttaaagaacatgatttcattcttttttatggctgcatagtactccgaggtgtatgtgtaccagattttctttatccacaatgatttcctttgtaatctaatattttatattgttattttatgttttattctatatttttattttaatttataaaggaattcatatggttcacaagcctgtcaaagggacctataataaraagaggttaagaatccatgctctaaacagaatattactccattttatttcatttatttttaaagagacagtctcactctgtcatccaggctggagtrcagtggagtgatcatagctcattgcaaccctgaactcttgggcacaagcaattctcctgcttcatcctccagaggagctgggactacaggtgcacatcaccatgcccagctagttttaaaaattattttgtagagatggtgtctcactatcctacccaggctggtctcaaactcctgggctcaggcaatcctcccactttgacctcccaaagtgttgagattacaggggcaagccactgtgcctggccacttgtcacattttaatttgtgattacttataaaatgaaccccttcccatctgagatctgtcagtctttctggtgacggtgcctggtgtctgctttctaccatgtcctgttagactagtgtttgatgggaggtcacctgggcagctgtccagctcactcactgggctctagagcctctgagttgaagcaaaatagaaagatcagtcaatgtaaagaaagctcaaaaactgacattctgaagtaatggatagctaaaccttcctattgcccttttctttcagcaactgatggaacgctagtgaccaccataaagatgtcaagccaggcagcacaaggaaattccacgtggcctgccccagcagaggagacggggascagtccagcaggtaaatatagaccttgtttccatttctgctctgctaatgccacccaagcctttcttttcttttcttttcttttcttttcttttctytycytttcttttctttctytccctttctttctttctttctttctttctttctttctttctttctttctttctttctttctttctttctttctttctttctttctttctttctttctttctttctctttctttcttctttctctctctctctttctttctttctcttgttctttttaaattttttatttttttacttaatttttttcacccaagccttaaggccaatttggaccagatagtgagaccccacctctataaaaaaawtttttwwaaaaaaaataagttgggcatcgtgcaggcctgtagtccctgctactcgagaggccaaggtgggaggacagcttgctgctgactaaaagtgctgcttattgattctgggaagaaaaaatatacaaggcttcagtttcattattttataagtaaatgctagcaacttttcctttctttctctctttctctcttcctctctttctctcctctccttctcttctctctctctctctctctctttctctctcctctccttctcttctcttctttctctctctctctctttcatttatttttgagacatggtctcattctgtcacccaggctggagtacagtggtgtatatttactgcagtactcactgtactcactgcagcctcaaattcctgggctcaagctatcctctcacctcagcctcctgagtagctgggcagcagtccagctcactcactgggctctagagcctctgtgctatgcccagcttattgttgttgtttttttaaatttttttttttgtacagatggggtctcactatgtggcccaaggtggtcttaaactcctggctccaagagatcctcccacctcagcctcccaaagtgcagggattacaggtgtgagccactgtgcccagcctagacmgcattttttttttgaaacagggtctccctctgttgcccaggctggagtgcaatggcgtgttcatggttcactgcagcctcagcctcctcagtctcaagcaatcctccaacttcarcctcccccaacagctagaactgcaggtgatcatcaccaattagcctggttaattgtgtgtgtatttcttaaattttttgtagagatagttctcactatattgcttgggctggtctcaaactcctggactcaagtgattcacctacctcggcctccctaagcactgggattacaggcttgagccaccacacccrgcaaggactaggttttaaaataggttcctaggctgggtgtggtggcttacgcccgtaatcccagcactttgggaggctgaggtgggcggatcacgaggtmrggagttyragaccagyctggcyaacatagtgaaaccctgtctctactaaaaatacaaaaaattagctgggcatagtggcacacacctgtaatcccagctactygggaggctgaggaaggagaatcacttgaacctgggaggcggaggttgcagtgagccgagatcacgccattgctctccagcctgggtgacagagcaagactccatctaaaaaaaaaaaaagttcctttgacttcttgacactcttctctgaggatattgatcatttttccccaatagatgttactaattgaacacttctgttgcttcaacttactaatttacatgatcaatagccaattaattcagcaggagagaatgctacagagtcgattctttctgtactttcttctgctccagagtgaaggatctttctaaatcagagaccatcactgtgttcacagggagggcctaggtgaacctgagatggcaaatgttgcgtttgttactacggaagaagggattatgggytgaagtccttggcagtgccaaattgcttagaaaaatgtgaaatatggtccctaggagtgctcttgggatgtcacatttttctcactcctttgacaggtagatgttattttcctgaaggmcagggaaaggattcagagggaggaatgaatttgaaagaaaatgaaggtgacgagaaagaatgagctcatctcccttatcctctttcttctcaaatccttaagtagctttgcagtgaactaagatttgggggaacctagaggaggctgaaagttggaagctgaaattggyttrgcaagggcaagctccaaagacaaaagtggaaatagtttgggggtagcctyttgcatgggtgaartcctggttcatcacatcctcccttatgcaaagagcccttttatatggggcatggggaaaaactgagctaaaggtgataatttctcctgagcaagccagatggtcaaagctctaacttcaccatctcccttggaatgtttaatgtgttccctggtgtccagaggcttaamgtgtgagaattaaaagctcaacattttctttcccagrgaaggaggaaatagttttaattgaaatcccgggaggaaatgaatgatagtgtcaaaccaaaaaacttcatcttctgtaccayttgcatatactccactgacttactttctaatcacaggcacatccccaggaagcccagaaatgtctaccactctcaaaatcatgagctccaaggaacccrgcatcagcccagagatcaggtccactgtgagaaattctccttggaagactccagaaacaactgttcccatggagaccacagtggaaccagtcacccttcagtccacagccctaggaagtggcagcaccagcatctctcacctgcccacaggaaccacatcaccaaccaagtcaccaacagaaaatatgttggctacagaaagggtctccctctccccatccccacctgaggcttggaccaacctttattctggaactccaggagggaccaggcagtcactggccacaatgtcctctgtctccctagagtcaccaactgctagaagcatcacagggactggtcagcaaagcagtccagaactggtttyaaagacaactggaatggaattctctatgtggcatggctctactggagggaccacaggggacacacatgtctctctgagcacatcttccaatatccttgaagaccctgtaaccagcccaaactctgtgagctcattgacagataaatccaaacataaaaccgagacatgggtmagcaccacagccattccctccactgtcctgaataataagataatggcagctgaacaacagacaagtcratctgtggatgaggcttattcatcaactagttcttggtcagatcagacatctgggagtgacatcacccttggtgcatctcctgatgtcacaaacacattatacatcacctccacagcacaaaccacctcactagtrtctctgccctctggagaccaaggcattacaagcctcaccaatccctcaggaggaaaaacaagctctgcrtcatctgtcacatctccttcaatagggcttgagactctgakggccaatgtaagtgcagtgamaagtgacattgcccctactgctgggcatctatctcagacttcatctcctgcggaagtgagcatcctggacrtaaccacagctcctactccaggtatctccaccaccatcaccaccatgggaaccaactcaatctcaactaccacacccaacccagaagtgggtatgagtaccatggacagcaccccggccacagagaggcrcacaacttctacagaacacccttccacctggtcttccacagctgcatcagattcctggactgtcacagacatgacttcaaacttgaaagttgcaagatctcctggaacaatttccacaatgcatacaacttcattcttagcctcaagcactgaattagactccatgtctactccccatggccgtataactgtcattggaaccagcctggtcactccatcctctgatgcttcagctgtaaagacagagaccagtacaagtgaaagaacattgagtccttcagacacaactgcatctactcccatctcaactttttctcgtgtccagaggatgagcatctcagttcctgacattttaagtacaagttggactcccagtagtacagaagcagaagatgtgcctgtttcaatggtttctacagatcatgctagtacaaagactgacccaaataygcccctgtccacttttctgtttgattctctgtccactcttgactgggacactgggagatctctgtcatcagccacagccactacctcagctcctcagggggccacaactccccargaactcactttggaaaccatgatcagcccagctacctcacagttgcccttctctatagggcacattacaagtgcagtcayaccagctgcaatggcaaggagctctggagttactttttcaagaccagatcccacaagcaaaaaggcagagcagacttccactcagcttcccaccaccacttctgcacatccagrgcaggtgcccagatcagcagcaacaactctggatgtgatcccacacacagcaaaaactccagatgcaacttttcagagacaagggcagacagctcttacaacagaggcaagagctacatctgactcctggaatgagaaagaaaaatcaaccccaagtgcaccttggatcactgagatgatgaattctgtctcagaagataccatcaaggaggttaccagctcctccagtgtrttaaggaccctgaatacgctggacataaacttggaatctgggacgacttcatccccaagttggaaaagcagcccatatgagagaattgccccttctgagtcyaccacagacaaagaggcaattcacccttctacaaacacagtagagaccacwggctgggtcacaagttccgaacatgcttctcattccactatcccagcccactcagcgtcatccaaactcacatctccagtggttacaacctccaccagggaacaagcaatagtttctatgtcaacaaccacatggccagagtctacaagggctagaacagagcctaattccttcttgactattgaactgagggacgtcagcccttacatggacaccagctcaaccacacaaacaagtwttatctcttccccaggttccactgcgatcaccaaggggcctagaacagaaattacctcctctaagagaatatccagctcattccttgcccagtctatgaggtcgtcagacagcccctcagaagccatcwccaggctgtctaactttcctgccatgacagaatctggaggaatgatccttgctatgcaaacaagtccacctggcgctacatcactaagtgcacctactttggatacatcagccacagcctcctggacagggactccactggctacgactcagagatttacatactcagagaagaccactctctttagcaaaggtcctgaggatacatcacagccaagccctccctctgtggaagaaaccagctcttcctcttccctggtacctatcmatgctacaacctcgccttccaatattttgttgacatcacaagggcacagtccctcctctactccacctgtgacctcagttttcttgtctgagacctctggcctggggaagaccacagacatgtcgaggataagcttggaacctggcacaagtttacctcccaatttgagcagtacagcaggtgaggcgttatccacttatgaagcctccagagatacaaaggcaattcatcattctgcagacacagcagtgacgaatatggaggcaaccagttctgaatattctcctatcccaggccatacaaagccatccaaagccacatctccattggttacctcccacatcatgggggacatcacttcttccacatcagtatttggctcctccgagaccacagagattgagacagtgtcctctgtgaaccagggacttcaggagagaagcacatcccaggtggccagctctgctacagagacaagcactgtcattacccatgtgtctagtggtgatgctactactcatgtcaccaagacacaagccactttctctagcggaacatccatctcaagccctcatcagtttataacttctaccaacacatttacagatgtgagcaccaacccctccacctctctgataatgacagaatcttcaggagtgaccatcaccacccaaacaggtcctaytggagctgcaacacagggtccatatctcttggacacatcaaccatgccttacttgacagagactccattagctgtgactccagattttatgcaatcagagaagaccactctcataagcaaaggtcccaaggatgtgtcctggacaagccctccctctgtggcagaaaccagctatccctcttccctgacacctttcttggtcacaaccatacctcctgccacttccacgttacaagggcaacatacatcctctcctgtttctgcgacttcagttcttacctctggactggtgaagaccacagatatgttgaacacaagcatggaacctgtgaccaattcacctcaaaatttgaacaatccatcaaatgagatactggccactttggcagccaccacagatatagagactattcatcctyccataaacaaagcagtgaccaatatggggactgccagttcagcacatgtactgcattccactctcccagtcagctcagaaccatctacagccacatctccaatggttcctgcctccagcatgggggacgctcttgcttctatatcaatacctggttctgagaccacagacattgagggagagccaacatcctccctgactgctggacgaaaagagaacagcaccctccaggagatgaactcaactacagagtcaaacatcatcctctccaatgtgtctgtgggggctattactgaagccacaaaaatggaagtcccctcttttgatgcaacattcataccaactcctgctcagtcaacaaagttcccagatattttctcagtagccagcagtagactttcaaactctcctcccatgacaatatctacccacatgaccaccacccagacagggtcttctggagctacatcaaagattccacttgccttagacacatcaaccttggaaacctcagcagggactccatcagtggtgactgaggggtttgcccactcaaaaataaccactgcaatgaacaatgatgtcaaggacgtgtcacagacaaaccctccctttcaggatgaagccagctctccctcttctcaagcacctgtccttgtcacaaccttaccttcttctgttgctttcacaccgcaatggcacagtacctcctctcctgtttctatgtcctcagttcttacttcttcactggtaaagaccgcaggcaaggtggatacaagcttagaaacagtgaccagttcacctcaaagtatgagcaacactttggatgacatatcggtcacttcagcagccaccacagatatagagacaacgcatccttccataaacacagtagttaccaatgtggggaccaccggttcagcatttgaatcacattctactgtctcagcttacccagagccatctaaagtcacatctccaaatgttaccacctccaccatggaagacaccacaatttccagatcaatacctaaatcctctaagactacaagaactgagactgagacaacttcctccctgactcctaaactgagggagaccagcrtctcccaggagatcacctcgtccacagagacaagcactgttccttacaaagagctcactggtgccactaccgaggtatccaggacagatgtcacttcctctagcagtacatccttccctggccctgatcagtccacagtgtcactagacatctccacagaaaccaacaccaggctgtctacctccccaataatgacagaatctgcagaaataaccatcaccacccaaacaggtcctcatggggctacatcacaggatacttttaccatggacccatcaaatacaaccccccaggcagggatccactcagctatgactcatggattttcacaattggatgtgaccactcttatgagcagaattccacaggatgtatcatggacaagtcctccctctgtggataaaaccagctccccctcttcctttctgycctcacctgcaatgacmacaccttccctgatttcttctaccttaccagaggataagctctcctctcctatgacttcacttctcacctctggcctagtgaagattacagacatattacgtacacgcttggaacctgtgaccagctcacttccaaatttcagcagcacctcagataagatactggccacttctaaagacagtaaagacacaaaggaaatttttccttctataaacacagaagagaccaatgtgaaagccaacaactctggacatgaatcccattcccctgcactggctgactcagagacacccaaagccacaactcaaatggttatcaccaccactgtgggagatccagctccttccacatcaatgccagtgcatggttcctctgagaytacaaacattaagagagagccaacatatttcttgactcctagactgagagagaccagtacctctcaggagtccagctttcccacggacacaagttttctactttccaaagtccccactggtactattactgaggtctccagtacaggggtcawctcttctagcaaaatttccaccccagaccatgataagtccacagtgccacctgacaccttcacaggagagatccccagggtcttcacctcctctattaagacaaaatctgcagaaatgacgatcaccacccaagcaagtcctcctgagtctgcatcgcacagtacccttcccttggacacatcaaccacactttcccagggagggactcattcaactgtgactcagggattcccatactcagaggtgaccactctcatgggcatgggtcctgggaatgtgtcatggatgacaactccccctgtggaagaaaccagctctgtgtcttccctgatgtcttcacctgccatgacatccccttctcctgtttcctccacatcaccacagagcatcccctcctctcctcttcctgtgactgcacttcctacttctgttctggtgacaaccacagatgtgttgggcacaacaagcccagagtctgtaaccagttcacctccaaatttgagcagcatcactcatgagagaccggccacttacaaagacactgcacacacagaagccgccatgcmtcattccacaaacaccgcagtgaccaatgtagggacttccgggtctggacataaatcacaatcctctgtcctagctgactcagagacatcgaaagccacacctctgatgagtaccacctccaccctgggggacacaagtgtttccacatcaactcctaatatctctcagactaaccaaattcaaacagagccaacagcatccctgagccctagactgagggagagcagcacgtctgagaagaccagctcaacaacagagacaaatactgccttttcttatgtgcccacaggtgctattactcaggcctccagaacagaaatctcctctagcagaacatccatctcagaccttgatcggyccacaatagcacccgacatctccacaggaatgatcaccaggctcttcacctcccccatcatgacaaaatctgcagaaatgaccgtcaccactcaaacaactactcctggggctacatcacagggtatccttccctgggacacatcaaccacacttttccagggagggactcattcaaccgtgtctcagggattcccacactcagagataaccactcttcggagcagaacccctggagatgtgtcatggatgacaactccccctgtggaagaaaccagctctgggttttccctgatgtcaccttccatgacatccccttctcctgtttcctccacatcaccagagagcatcccctcctctcctctccctgtgactgcacttcttacttctgttctggtgacaaccacaaatgtattgggcacaacaagcccagagmccgtaacgagttcacctccaaatttaagcagccccacacaggaragactgaccacttacaaagacactgcgcacacagaagccatgcatgcttccatgcatacaaacactgcagtggccaacgtggggacctccattkctggacatgaatcacaatcttctgtcccagctgattcasacacatccaaagccacatctccaatgggtaycaccttcrccatgggggatacaagtgtttctacatcaactcctgccttctttgagactagaattcagactgaatcaacatcctctttgattcctggattaagggacaccaggacstctgaggagatcaacactgtgacagagaccagcactgtcctttcagaagtgcccactactactactactgaggtctccaggacagaagttatcacttccagcagaacaaccatctcagggyctgatcattccaaaatgtcaccctacatctccacagaaaccatcaccaggctctccacttttcctkttgtaacaggatccacagaaatggccatcaccaaccaaacaggtcctatagggactatctcacaggctrcccttaccctggacacatcaagcacagcttyctgggaagggactcactcacctgtgactcagagatttccacactcagaggagaccactactatgagcagaagtactaagggcgtgtcatggcaaagccctccctctgtggaagaaaccagttctccttcttccccagtgcctttacctgcaataacctcacattcatctctttattccgcagtatcaggaagtagccccacttctgctctccctgtgacttcccttctcacctctggcaggaggaagaccatagacatgttggacacacactcagaacttgtgaccagctccttaccaagtgcaagtagcttctcaggtgagatactcacttctgaagcctccacaaatacagagacaattcacttttcagagaacacagcagaaaccaatatggggaccaccaattctatgcataaactacattcctctgtctcaatccactcccagccatccggacacacacctccaaaggttactggatctatgatggaggacgctattgtttccacatcaacacctggttctcctgagactaaaaatgttgacagagactcaacatcccctctgactcctgaactgaaagaggacagcaccgccctggtgatgaactcaactacagagtcaaacactgttttctccagtgtgtccctggatgctgctactgaggtctccagggcagaagtcacctactatgatcctacattcatgccagcttctgctcagtcaacaaagtccccagacatttcacctgaagccagcagcagtcattctaactctcctcccttgacaatatctacacamaagaccatcgccacacaaacaggtccttctggggtgacatctcttggccaactgaccctggacacatcaaccatagccacctcagcaggaactccatcagccagaactcaggattttgtagattcagaaacaaccagtgtcatgaacaatgatctcaatgatgtgttgaagacaagccctttctctgcagaagaagccaactctctctcttctcaggcacctctccttgtgacaacctcaccttctcctgtaacttccacattgcaagagcacagtacctcctctcttgtttctgtgacctcagtacccacccctacactggcgaagatcacagacatggacacaaacttagaacctgtgactcgttcacctcaaaatttaaggaacaccttggccacttcagaagccaccacagatacacacacaatgcatccttctataaacacagcagtggccaatrtggggaccaccagttcaccaaatgaattctattttactgtctcacctgactcagacccatataaagccacatccgcagtagttatcacttccacctcgggggactcaatagtttccacatcaatgcctagatcctctgcgatgaaaaagattgagyctgagacaaytttctccctgatatttagactgagggagactagcacctcccagaaaattggctcatcctcagacacaagcacggtctttgacaaagcattcactgctgctactactgaggtctccagaacagaaytcacctcctctagcagaacatccatccaaggcactgaaaagcccacaatgtcaccggacacctccacaagatctgtcaccatgctttctacttttgctggcctgacaaaatccgaagaaaggaycattgccacccaaacaggtcctcatagggcgacatcacagggtacccttacctgggacacatcaatcacaacctcacaggcagggacccactcagctatgactcatggattttcacaattagatttgtccactcttacgagtagagttcctgagtacatatcagggacaagcccaccctctgtggaaaaaaccagctcttcctcttcccttctgtctttaccagcaataacctcaccgtcccctgtacctactacattaccagaaagtaggccgtcttctcctgttcatctgacttcactccccacctctggcctagtgaagaccacagatatgctggcatctgtggccagtttacctccaaacttgggcagcacctcacataagataccgactacttcagaagacattaaagatacagagaaaatgtatccttccacaaacatagcagtaaccaatgtggggaccaccacttctgaaaaggaatcttattcgtctgtcccagcctactcagaaccacccaaagtcacctctccaatggttacctctttcaacataagggacaccattgtttccacatccatgcctggctcctctgagattacaaggattgagatggagtcaacattctccctggctcatgggctgaagggaaccagcacctcccaggaccccatcgtatccacagagaaaagtgctgtccttcacaagttgaccactggtgctactgagacctctaggacagaagttgcctcttctagaagaacatccattccaggccctgatcattccacagagtcaccagacatctccactgaagtgatccccagcctgcctatctcccttggcattacagaatcttcaaatatgaccatcatcactcgaacaggtcctcctcttggctctacatcacagggcacatttaccttggacacaccaactacatcctccagggcaggaacacactcgatggcgactcaggaatttccacactcagaaatgaccactstcatgaacaaggacyctgagattctatcatggacaatccctycttctatagagaaaaccagcttctcctcttccctgatgccttcaccagccatgacttcacctcctgtttcctcaacattaycaaagaccattcacaccactccttctcctatgacctcactgctcacccctagcctagtgatgaccacagacacattgggcacaagcccaraacctacaaccagttcacctmcaaatttgagcagtacctcacatgagatactgacaacagatgaagacaccacagctatagaagccatgcatccttccacaascacagcagcgactaatgtggaaaccaccagttmtggacatgggtcacaatcctctgtcctagctgactcagaaaaaaccaaggccacagctccaatggataccacctccaccatggggcatacaactgtttccacatcaatgtctgtttcctctgagactacaaaaattaagagagagtcaacatattccttgactcctggactgagagagaccagcatttcccaaaatgccagcttttccactgacacaagtattgttctttcagaagtccccactggtactactgctgaggtctccaggacagaagtcacctcctctggtagaacatccatccctggcccttctcagtccacagttttgccagaaatatccacaagaacaatgacaaggctctttgcctygcccaccatgacagaatcagcagaaatgaccatccccactcaaacaggtccttctgggtctacctcacaggatacccttaccttggacacatccaccacaaagtcccaggcaaagactcattcaactttgrctcagagatttccacactcagagatgaccactctcatgagcagaggtcctggagatatgtcatggcaaagctctccctctctggaaaatcccagctctctcccttccctgctgtctttacctgccacaacctcacctcctcccatttcctccacattaccagtgactatctcctcctctcctcttcctgtgacttcacttctcacctctagcccggtaacgaccacagacatgttacacacaagcccagaacttgtaaccagttcacctccaaagctgagccacacttcagatgagagactgaccactggcaaggacaccacaaatacagaagctgtgcatccttccacaaacacagcagcgtccaatgtggagattcccagctctggacatgaatccccttcctctgccttagctgactcagagacatccaaagccacatcaccaatgtttattacctccacccaggaggatacaactgttgccatatcaacccctcacttcttggagactagcagaattcagaaagagtcaatttcctccctgagccctaaattgagggagacaggcagttctgtggagacaagctcagccatagagacaagtgctgtcctttctgaagtgtccrttggtgctactastgagatctccaggacagaagtcacctcctctagcagaacatccatctctggttctgctgagtccacaatgttgccagaaatatccaccacaagaaaaatcattaagttycctacttcccccatcctggcagaatcatcagaaatgaccatcaagacccaaacaagtcctcctgggtctacatcagagagtacctttacattagacacatcaaccactccctccttggtaataacccattcgactatgactcagagattgccacactcagagataaccactctkgtgagtagaggtgctggggatgtgccacggcccagctctctccctgtggaagaaacaagccctccatcttcccagctgtctttatctgccatgatctcaccttctcctgtttcttccacattaccagcaagtagccactcctcttctgcttctgtgacttcacttctcacaccaggccaagtgaagactactgaggtgttggacgcaagtgcagaacctgaaaccagttcacctccaagtttgagcagcacctcagttgaaatactggccacctctgaagtcaccacagatacggagaaaattcatcctttctcaaacacggcagtaaccaaagttggaacttccagttctggacatgaatccccttcctctgtcctacctgactcagagacaaccaaagccacatcggcaatgggtaccatctccattatgggggatacaagtgtttctacattaactcctgccttatctaacactaggaaaattcagtcagagccagcttcctcactgaccaccagattgagggagaccagcacctctgaagagaccagcttagccacagaagcaaacactgttctttctaaagtgtccactggtgctactactgaggtctccaggacagaagccatctcctttagcagaacatccatgtcaggccctgagcagtccacaatgtcacaagacatctccataggaaccatccccaggatttctgcctcctctgtcctgacagaatctgcaaaaatgaccatcacaacccaaacaggtccttcggagtctacactagaaagtacccttaatttgaacacagcaaccacaccctcttgggtggaaacccactctatagtaattcagggatttccacacccagagatgaccacttccatgggcagaggtcctggaggtgtgtcatggcctagccctccctttgtgaaagaaaccagccctccatcctccccgctgtctttacctgccgtgacctcacctcatcctgtttccaccacattcctagcacatatccccccctctccccttcctgtgacttcacttctcacctctggcccggcgacaaccacagatatcttgggtacaagcacagaacctggaaccagttcatcttcaagtttgagcaccacctcccatgagagactgaccacttacaaagacactgcacatacagaagccgtgcatccttccacaaacacaggagggaccaatgtggcaaccaccagctctggatataaatcacagtcctctgtcctagctgactcatctccaatgtgtaccacctccaccatgggggatacaartgttctcacatcaactcctgccttccttgagactaggaggattcagacagagctagcttcctccctgacccctggattgagggagtccagyggctctgaagggaccagctcaggcaccaagatgagcactgtcctctctaaagtgcccactggtgctactactgagatctccaaggaagacgtcacctccatcccaggtcccgctcaatccacaatatcaccagacatctccacaagaaccgtcagctggttctctacatcccctgtcatgacagaatcagcagaaataaccatgaacacccatacaagtcctttaggggccacaacacaaggcaccagtactttggmcacgtcaagcacaacctctttgacaatgacacactcaactatatctcaaggattttcacactcacagatgagcactcttatgaggaggggtcctgaggatgtatcatggatgagccctccccttctggaaaaaactagaccttccttttctctgatgtcttcaccagccacaacttcaccttctcctgtttcctccacattaccagagagcatctcttcctctcctcttcctgtgacttcactcctcacgtctggcttggcaaaaactacagatatgttgcacaaaagctcagaacctgtaaccaactcacctgcaaatttgagcagcacctcagttgaaatactggccacctctgaagtcaccacagatacagagaaaactcatccttcttcaaacagaacagtgaccgatgtggggacctccagttctggacatgaatccacttcctttgtcctagctgactcacagacatccaaagtcacatctccaatggttattacctccaccatggaggatacgagtgtctccacatcaactcctggcttttttgagactagcagaattcagacagaaccaacatcctccctgacccttggactgagaaagaccagcagctctgaggggaccagcttagccacagagatgagcactgtcctttctggagtgcccactggtgccactgctgaagtctccaggacagaagtcacctcctctagcagaacatccatctcaggctttgctcagctcacagtgtcaccagagacttccacagaaaccatcaccagactccctacctccagcataatgacagaatcagcagaaatgatgatcaagacacaaacagatcctcctgggtctacaccagagagtactcatactgtggacatatcaacaacacccaactgggtagaaacccactcgactgtgactcagagattttcacactcagagatgaccactcttgtgagcagaagccctggtgatatgttatggcctagtcaatcctctgtggaagaaaccagctctgcctcttccctgctgtctctgcctgccacgacctcaccttctcctgtttcctctacattagtagaggatttcccttccgcttctcttcctgtgacttctcttctcamccctggcctggtgataaccacagacaggatgggcataagcagagaacctggaaccagttccacttcaaatttgagcagcacctcccatgagagactgaccactttggaagacactgtagatacagaagmcatgcagccttccacacacacagcagtgaccaacgtgaggacctccatttctggacatgaatcacaatcttctgtcctatctgactcagagacacccaaagccacatctccaatgggtaccacctacaccatgggggaaacgagtgtttccatatccacttctgacttctttgagaccagcagaattcagatagaaccaacatcctccctgacttctggattgagggagaccagcagctctgagaggatcagctcagccacagagggaagcactgtcctttctgaagtgcccagtggtgctaccactgaggtctccaggacagaagtgatatcctctaggggaacatccatgtcagggcctgatcagttcaccatatcaccagacatctctactgaagcgatcaccaggctttctacttcccccattatgacagaatcagcagaaagtgccatcactattgagacaggttctcctggggctacatcagagggtaccctcaccttggacacctcaacaacaaccttttggtcagggacccactcaactgcatctccaggattttcacactcagagatgaccactcttatgagtagaactcctggagatgtgccatggccgagccttccctctgtggaagaagccagctctgtctcttcctcactgtcttcacctgccatgacctcaacttcttttttctccacattaccagagagcatctcctcctctcctcatcctgtgactgcacttctcacccttggcccagtgaagaccacagacatgttgcgcacaagctcagaacctgaaaccagttcacctccaaatttgagcagcacctcagctgaaatattagccacstctgaagtcaccaaagatagagagaaaattcatccctcctcaaacacacctgtagtcaatgtagggactgtgatttataaacatctatccccttcctctgttttggctgacttagtgacaacaaaacccacatctccaatggctaccacctccactctggggaatacaagtgtttccacatcaactcctgccttcccagaaactatgatgacacagccaacttcctccctgacttctggattaagggagatcagtacctctcaagagaccagctcagcaacagagagaagtgcttctctttctggaatgcccactggtgctactactaaggtctccagaacagaagccctctccttaggcagaacatccaccccaggtcctgctcaatccacaatatcaccagaaatctccacrgaaaccatcactagaatttctactcccctcaccacgacaggatcagcagaaatgaccatcacccccaaaacaggtcattctggggcatcctcacaaggtacctttaccttggacacatcaagcagagcctcctggccaggaactcactcagctgcaactcacagatctccacactcagggatgaccactcctatgagcagaggtcctgaggatgtgtcatggccaagccgcccatcagtggaaaaaactagccctccatcttccctggtgtctttatctgcagtaacctcaccttcgccactttattccacaccatctgagagtagccactcrtctcctctccgggtgacttctcttttcacccctgtcaygatgaagaccacagacatgttggacacaagcttggaacctgtgaccacttcacctcccagtatgaatatcacctcagatgagagtctggccacttctaaagccaccatggagacagargcaattcagctttcagaaaacacagctgtgactcagatgggcaccatcagygctagacaagaattctattcctcttatccaggyctcccagagccatccaaagtgacatctccartggtcacctcttccaccataaaagacattgtttctacaaccatacctgcttcctctgagataacaagaattgagatggagtcaacatccaccctgacccccacaccaagggagaccagcacctcycaggagatccactcagccacaaagccaagcactgttccttacaaggcactcactagtgccacgattgaggactccatgacacaagtcatgtcctctagcagaggacctagccctgatcagtccacaatgtcacaagacatatccactgaagtgatcaccaggctctctacctcccccatcaagrcagaatctacagaaatgaccattaccacccaaacaggttctcctggggctacatcaaggggtacccttaccttggacacttcaacaacttttatgtcagggacscaytcaactgcatctcaaggattttcacactcacagatgaccrctcttatgagtagaactcctggagakgtgccatggctaagccatccctctgtggaagaagccagctctgcctctttctcactgtcttcacctgtcatgacctcatcttctcccgtttcttccacattaccagacagcatccactcttcttcgcttcctgtgacatcacttctcacctcagggctggtgaagaccacagagctgttgggcacaagctcagaacctgaaaccagttcacccccaaatttgagcagcacctcagctgaaatactggccaycactgaagtcactacagatacagagaaactggagatgaccaatgtggtaacctcaggttatacacatgaatctccttcctctgtcctagctgactcagtgacaacaaaggccacatcttcaatgggtatcacctaccccacaggagatacaaatgttctcacatcaacccctgccttctctgacaccagtaggattcaaacaaagtcaaagctctcactgactcctgggttgatggagaccagcatctctgaagagaccagctctgccacagaaaaaagcactgtcctttctagtgtgcccactggtgctactactgaggtctccaggacagaagccatctcttctagcagaacatccatcccaggccctgctcaatccacaatgtcatcagrcacctccatggaaaccatcactagaatttctacccccctcacaaggaaagaatcaacagacatggccatcacccccaaaacaggtccttctggggctacctcgcaggrtacctttaccttggactcatcaagcacagcctcctggccaggaactcactcagctacaactcagagatttccacrgtcagtggtgacaactcctatgagcagaggtcctgaggatgtgtcatggcyaagcccgctgtctgtggaaaamaacagccctccatcttccctggtatcttcatcttcagtaacctcaccttcgccactttattccacaccatctgggagtagccactcctctcctgtccctgtcacttctcttttcacctctatcatgatgaaggccacagacatgttggatgcaagtttggaacctgagaccacttcagctcccaatatgaatatcacctcagatgagagtctggccrcttctaaagccaccacggagacagaggcaattcasgtttttgaaaatacagcarcgtcccatgtggaaaccaccagtgctacagaggaactctattcctcttccccaggcttctcagagccaacaaaagtgatatctccagtggtcacctcttcctctataagagacaacatggtttccacaacaatgcctggctcctctggcattacaaggattgagatagagtcaatgtcatctctgacccctggactgagggagaccagaacctcccaggacatcacctcatccacagagacaagcactgtcctttacaagatgycctctggtgccactcctgaggtctccaggacagaagttatgccctctagcagaacatccattcctggccctgctcagtccacaatgtcactagacatctccgatgaagttgtcaccaggctgtctacctctcccatcatgacagaatctgcagaaataaccatcaccacccaaacaggttattctctggctacatcccaggttacccttcccttgggcacctcaatgacctttttgtcagggacccactcaactatgtctcaaggactttcayactcagagatraccaatcttatgagcagggrtcctgaaagtctgtcatggacgagccctcgctttgtggaaacaactagatcttcctcttctctgacatcattacctctcacgacctcactttctcctgtgtcctccacattactagacagtagcccctcctctcctcttcctgtgacttcacttatcctcccaggcctggtgaagactacagaagtgttggatacaagctcagagcctaaaaccagttcatctccaaatttgagcagcacctcagttgaaataccggccacctctgaaatcatgacagatacagagaaaattcatccttcctcaaacacagcggtggccaaagtgaggacctccagttctgttcatgaatctcattcctctgtcctagctgactcagaaacaaccataaccataccttcaatgggtatcacctccgctgtggasgataccactgttttcacatcaaatcctgccttctctgagactaggaggattccgacagagccaacattctcattgactcctggattcagggagactagcacctctgaagagaccacctcaatcacagaaacaagtgcagtcctttwtggagtgcccactagtgctactactgaartctccatgacagaaatmatgtcctctaatagaayacacatccctgactctgatcagtccacgatgtctccagacatcatcactgaagtgatcaccaggctctcttcctcatccatgatgtcagaatcaacacaaatgaccatcaccacccaaaaaagttctcctggggctacagcacagagtactcttaccttggccacaacaacagcccccttggcaaggacccactcaactgttcctcctagatttttacactcagagatgacaactcttatgagtaggagtcctgaaaatccatcatggaagagctctcyctttgtggaaaaaactagctcttcatcttctctgttgtccttacctgtcacgacctcaccttctgtttcttccacattaccgcagagtatcccttcctcctctttttctgtgacttcactcctcaccccaggcatggtgaagactacagacacaagcacagaacctggaaccagtttatctccaaatctgagtggcacctcagttgaaatactggctgcctctgaagtcaccacagatacagagaaaattcatccttcttcaagcatggcagtgaccaatgtgggaaccaccagttctggacatgaactrtattcctctgtttcaatccactcggagccatccaaggctacatacccagtgggtactccctcttccatggctgaaacctctatttccacatcaatgcctgctaattttsagaccayaggatttgaggytgagccattttctcatttgacttctggayttaggaagacmaacatgtccctggacaccagctcagtcacaccaacaaatacaccttcttctcctgggtccactcaccttttacagagttccaagactgatttcacctcttctgcaaaaacatcatccccagactggcctccagcctcacagtatactgaaattccagtggacataatcaccccstttaatgcttctccatctattacggagtccactgggataacctccttcccagaatccaggtttactatgtctgtaacagaaagtactcatcatctgagtacagatttgctgccttcagctgagactatttccactggcacagtgatgccttctctatcagaggccatgacttcatttgccaccactggagttccacgagccatctcaggttcaggtartccattctctaggacagagtcaggccctggggatgctactctgtccaccattgcagagagcctgccttcatccactcctgtgccattctcctcttcaaccttcactaccactgattcttcaaccatcccagccctccatgagataacttcctcttcagctaccccatatagagtggacaccagtcttgggacagagagcagcactactgaaggacgcttggttatggtcagtactttggacacttcaagccaaccaggcaggacatcttcatcacccattttggataccagaatgacagagagygttgagctgggaacagtgacaagtgcttatcaagttccttcactctcaacacggttgacaagtaaggacccacagcccctacaatcccattattgggggctcataggaaatgaccccttcctaagaagcaaaaaaagagttaactagtttattcctgtaccagaaattctcttagcaaacatgtgtttatctaatttcactcctaggcactgggttaaggaattggagaaacaaaaataagcaaataattgaatcattacagtatcgtgataggtgctctaatattactactagtaatgatgatgatgacaataagaatgacaacagaaaatatttataacagtacttactctgtttcaagtgcagttttattaagctatttgatcctcaattgtaacactaattgaagtagagattattagaagcctattttggagatgaagacatttaggcacagggagattaagtaactttcttaagkccatatagctagaaagcaatagaactaggataagaactcaaattgtgtgtcactaggaactcatgctcctaactgctgggctaaacaggagtggtcagagaggtaacagaaaaggcaagaagttctggcatcacagaagccacaggaggggagggttttaggaaggagaaatggtaagttctgttaaataccacagaattgccaagttgaaatgaggtgagaagtgctttggcaacatgggggttctcagggattctaatgaagggagcatcagtgaggtatagggcattagaagaacagctaaaatactacgtagacgtaagggagggtttctccctttgagttgagcaagagacaaaagggataagtgaaaggaaaaagtgaattaatgaaaatagagggaacaaagtacctaagaaggtagaagrcacccagagcctagaaggaggaaacactacttccaagaggtcagtagataaaggaaggaacttcttggggattccattcctctgaaagggttgagcttggcaccaacttttgttctggacacaaatccaaagaggccctccaacgactcgagtttctgcctcactggacaatatctccaggagaatgatttgctccctctccttcttcacattattttgtaattcacactaaatttagacacattggtggctattgacccatatgttactatgtgactcagtagttgagtcacgggtgttcagtaagcaagtgatgaatggcatggcgagaagggagaagtgtagttggatggataaaaggaagaatggagagaagagtgaatggaaggaagcaaagatgaagcggaggaaggatagatgcacagaaggaaggatgaaaagaaagaaagatgatggaagacaggattgaaggggatatagattgaaggaaagaaaggtagaaggatgaaatgaagtaaagattgaagaaaagatggatggaaagaagaaaggagggtgcacaaaaaatctcacacttcaccacatatgattcatccatataagaaaaaaccacttgtaccctcaaagctattgaaatacaaacttttaaattaaaattttaaaaagcaagagaaaggaaagaagggaggaaagacaaaaggaagaatgggtgatagaaggaaagaataaaaggaagaaaaaatggaagaatagatgatcagatctagggatgaatgaaagraaggatggacaaatctataggtaggtggatggatctatggacaggtgtggccacttatggcacatagtcccagctccagttcatactgatggacttgaggagtgtttgtggccaatgaagtggatccatttagacagtgctcttcttctgaatgagatgagttaccccagtttttctccccaccttcatcttcaggaactgatggcattatggaacacatcacaaaaatacccaatgaagcagcacacagaggtaccataagaccagtcaaaggccctcagacatccacttcgcctgccagtcctaaaggtaggtttaactttgcttacctcccagtaatgccactcgtgaccatatttcctcctccagagagacaaaatgtttgtattctttagagagagaattgtgtgtggttgtcataggtttccctgtctgaactgagtctttatctaatggttaccaggcagatgttaccacttctctttctcctcatggcatgctgagtgagttttgtccaacatcaaatattcacaaatttgtccatattaaccaaattttaaaaatgctcattaaaaacttactatgagctgggcgcagtggctcatgcctgtaatcccaatactttgggaggctgaggtgggtggatcacctgaggtcaaaaattcgagaccagtctgaccaaaatggtgaaactccatctctactgaaaatataaaaattagccgggcatggtggcacacacctgtaatcacagctactcaggaggctgaggcaagagagtcacttgaacccaggaggtagaggctgcagtgagctgagattgtgccaatgcactccagcctgggtggcagagcaagactccagctcaaaaataaataaataaawaatatatatatatatattttatttaaataaaatatactatatatatayrtatatatatgtatrtrtatatryatatrtatgtatatatatatatatatatatatatatagagagakagagagagagagagagagagagagagagagacagagtatgtctgaaaatgcatcccaatagttctagcaaatgtaggaaaaggaagtataaattaacagcctttatgtatgccctggttgaaaaacagacataactctcttgtaagagaaacttcamaaaaatatctaggattatatctcccatgatgaaaaatttggaactgtacattttttttaactgtcacttaaataaagaagatgggtgagctcctgggttatttttgtttgtcatcactggagagctaaatcacaatatgtaagtacaatggggggaataaaaacacgatataaatgtaagatggtttatgacatcactgttatatgttttctttgtcacaatatttagtaattcctccttctgttttgaataaagtctgaaacaaaattttcactttaaaaggcagtaatatgaaatacataaataaataaaaatctgggtttctcaactttgacactattgtcatttggggcagatacttctctgcgatgggggctgtgctgtgcgttgtaggatgtttaccagcctctctggcctctgttctagatgccataccttctgcccacacacagttgtgacaaccaaaaatatctccagacattgttaagtgtcccctggaagcaaaactgcccctggttgagaaccactgaactggagaatgtatcctaagatccatcttactagatgggcgttttcacctcacttcattctctttccattctggtccccacaagatccagaagttcctttagtgaattaatataatgcaatggttaataatatgggtttaggatttagatacgatgatgttcaagtttttgccctgtcaatagctgtgtgtgaccttggtaaattgtggtctctggatttctctttctctcctgtaaaatgacaagaattatacaatgtgcattttattttattttatctcactttatttatttatttannnnnnnnnnnnnnnnnnnnnnnnnnnnnnnnnnnnnnnnnnnnnnnnnnnnnnnnnnnnnnnnnnnnnnnnnnnnnnnnnnnnnnnnnnnnnnnnnnnnnnnnnnnnnnnnnnnnnnnnnnnnnnnnnnnnnnnnnnnnnnnnnnnnnnnnnnnnnnnnnnnnnnnnnnnnnnnnnnnnnnnnnnnnnnnnnnnnnnnnnnnnnnnnnnnnnnnnnnnnnnnnnnnnnnnnnnnnnnnnnnnnnnnnnnnnnnnnnnnnnnnnnnnnnnnnnnnnnnnnnnnnnnnnnnnnnnnnnnnnnnnnnnnnnnnnnnnnnnnnnnnnnnnnnnnnnnnnnnnnnnnnnnnnnnnnnnnnnnnnnnnnnnnnnnnnnnnnnnnnnnnnnnnnnnnnnnnnnnnnnnnnnnnnnnnnnnnnnnnnnnnnnnnnnnnnnnnnnnnnnnnnnnnnnnnnnnnnnnnnnnnnnnnnnnnnnnnnnnnnnnnnnnnnnnnnnnnnnnnnnnnnnnnnnnnnnnnnnnnnnnnnnnnnnnnnnnnnnnnnnnnnnnnnnnnnnnnnnnnnnnnnnnnnnnnnnnnnnnnnnnnnncccacctcgtcctcccaaaatgctgggattacaggcatgagccaccgcgcctggccagaatgtgccatttaatgttcttgtgaggttcaaaaagacagtgcatgtcaagtgctttgcaattgctcctcctcctccttcccatcaacataatcaccatcatggtcaccattattgttagatacacatgaagcacttgagagtgcattctcagacatattgtttttagaggatatccagcaacacagggacactgctccataatcagagtcaaaatccctttcattttaccccctttctctaccaagctccagtaggctttgtgggctttatagagaagcctccagtttttcctcttccctaggaaccattttctaaagcctggtcagcagctgctgtctcatcaatgctactggaatcttgttcaaaggtattccagtcaccttggtcagctctggtagtgtctagtgtggttggtggagaattctatttagcaaatgtttattttgtagtagaattattagtagtgacagtagtaatggtaagtagtagtggtagtaacaatagcagcaatagcactagtaagtagtagtaactrtagcaataaccatagcaataagcagtaatactagtagtaatagtagtgataatggcagtaatggtatgtagagttgtgttggtagtaacagtagtagyagtaggtagtagcagtggtagtagtgacagtagaaatcataagtaatagtgstagcaacaatagtaktaatagtagtaaccatagtaataacatagtaataaccatagcaataggcagtaatattagtagtaacagtagtaataacagcagtaatgacagagcactaccattactgctgttactctactgtaggtagagtagtaatattaagtggtagtgrtagtaayaatagtaatagcaacagcagtagtaatagtaagtagcagtaaccatagtaataaccatagtgataggtagtaatagttgtggtaacagtagtaataactgcagtaatggtaggtagagtggtggtagtagtaacagtagyagtagcagtggtagcagtaacagtagcaatagtaatagtggtagtaacagtagtagtagcagtactagtagtagtaatcatagtaataaccattgcartaggtagtagtaacagtagcaataacagcagtaatggtaggtggagaagtgatagtaataacagtagcaatagcaggtcatagtcgtggtaatagtagtaatgtcttatcgtgacccaggaggcactgtgcttggcgcctttttacyaacactttgagatggccattgtacttatccccactttatagaygggaaaatggaggtccagcaatattttttaacttaaagagccacccatctcttyagagaaagagccagaatcccaggcagggctatcttattccagagcccaagctctcaaacacatgatacacaatacttaatctctctcaagtcagaggagatccacttaagtatacatccatccacatattcattcattcaatcattcaacaaatattagttgagcacttaccgtatgccaaacagtcaracgtgaatagctgttacaaatgagactgtgaaggatggtacaacgcagattcagacagtgtgataaggaaatattgagaagcaaagatgagttctggagtgaatttgtaaaggtggatgtgggcttggatttcaataatggcagaacttaaggaatctgatgagaagtgggcacttcaggcagagagaagagcttgaacaaggctcagaggctgacagtgcaggaaacacatgggaagagggaatagagtagcggtcaagaattcacagaggagttataggtgaagatgcaaccaagttacagaccaaggtaagataggggaataccaatcacaatctcttttcccattccagaagcatcccagacacatcctagtaaccgagagacatttctctccctttcctcctgtggagaataaataagctattgcaagtccagtaagtgtaatcattttgttcaaattgtgtgcccattccccaatttacaggactacacacaggagggacaaaaaraatggagaccaccaccacagctctgaagaccaccaccacagctctgaagaccacttccagagccaccttgaccaccagtgtctatactcccactttgggaacactgamtcccctcaatgcatcaatgcaaatggccagcacaatccccacagaaatgatgatcacaaccccatatgttttccctgatgttccagaaacgacatcctcattggctaccagcctgggagcagaaaccagcacagctcttcccaggacaaccccatctgttttcaatagagaatcagagaccacagcctcactggtctctcrttctggggcagagagawgtccggttattcaaactctagatgtttcttctagtgagccagatacaacagcttcatgggttatccatcctgcagagaccatcccaactgtttccaagacaacccccaattttttccacagtgaattagacactgtatcttccacagccaccagtcatggggcagaygtcagctcagccattccaacaaatatctcacctagtgaactagatgcactgaccccactggtcactatttcggggacagatactagtacaacattcccaacactgactaagtccccacatgaaacagagacaagaaccacatggctcactcatcctgcagagaccagctcaactattcccagaacaatccccaatttttctcatmatgaatcagatgccacaccttcaatagccaccagtcctggggcagaaaccagttcagctattccaattatgactgtctcacctggtgcagaagatctggtgacctcacaggtcactagttctggsacagacagaaatatgactattccaactttgactctttctcctggtgaaccaaagacsatagcctcattagtcayccatcctgaagcacagacaagttcggccattccaacttcaactatctcgcctgctgtatcacggttggtgacctcaatggtcaccagtttggcggcaaagacaagtacaactaatcgagctctgacaaactcccctggtgaaccagctacaacagtttcattggtcacgcatyctgcacagaccagcccaacagttccctggacaacttccatttttttccatagtaaatcagacaccacaccttcaatgaccaccagtcatggggcagaatccagttcagctgttccaactccaactgtttcaactgaggtaccaggagtagtgacccctttggtcaccagttctagggcagtgatcagtacaactattccaattctgactctttctcctggtgaaccagagaccacaccttcaatggccaccagkcatggggaagaagccagttctgctattccaactccaactgtttcacctggggtaccaggagtggtgacctctctggtcactagttctagggcagtgactagtacaactattccaattctgactttttctcttggtgaaccagagaccacaccttcaatggscaccagtcatgggacagaagctggctcagctgttccaactgttttacctgaggtaccaggaatggtgacctctctggttgctagttctagggcagtaaccagtacaactcttccaactctgactctttctcctggtgaaccagagaccacaccttcaatggccaccagtcatggggcagaagccagctcaactgttccaactgtttcacctgaggtaccaggagtggtgacctctctggtcactagttctagtggagtaaacagtacaagtattccaactctgattctttctcctggtgaactagaaaccacaccttcaatggccaccagtcatggggcagaagccagctcagctgttccaactccaactgtttcacctggggtatcaggartggtgacccctctggtcactagttccagggcagtgaccagtacaactattccaattctaactctttcttctagtgagccagagaccacaccttcaatggccaccagtcatggggtagaagccagctcagctgttctaactgtttcacctgaggtaccaggaatggtgacctytctggtcactagttctagagcagtaaccagtacaactattccaactctgactatttcttctgatgaaccagagaccrcaacttcattggtcacccattctgaggcaaagatgatttcagccattccaactttagstgtctcccctactgtacaagggctggtgacttcactggtcactagttctgggtcagagaccagtgcgttttcaaatctaactgttgcctcaagtcaaccagagaccatagactcatgggtcgctcatcctgggacagaagcaagttctgttgttccaactttgactgtctccactggtgagccgtttacaaatatctcattggtcacccatcctgcagagagtagctcaactcttcccaggacaacctcaaggttttcccacagtgaattagacactatgccttctacagtcaccagtcctgaggcagaatccagctcagccatttcaacaactatttcacctggtataccaggtgtgctgacatcactggtcactagctctgggagagacatcagtgcaacttttccaacagtgcctgagtccccacatgaatcagaggcaacagcctcatgggttactcatcctgcagtcaccagcacaacagttcccaggacaacccctaattattctcatagtgaaccagacaccacaccatcaatagccaccagtcctggggcagaagccacttcagattttccaacaataactgtctcacctgatgtaccagatatggtaacctcacaggtcactagttctgggacagacaccagtataactattccaactctgactctttcttctggtgagccagagaccacaacctcatttatcacctattctgagacacayacaagttcagccattccaactctccctgtctcccctgrtgcatcaaagatgctgacctcactggtcatcagttctgggacagacagcactacaactttcccaacactgacggagaccccatatgaaccagagacaacagccatacagctcattcatcctgcagagaccaacacaatggttcccaggacaactcccaagttttcccatagtaagtcagacaccacactcccagtagccatcaccagtcctgggccagaagccagttcagctgtttcaacgacaactatctcacctgatatgtcagatctggtgacctcactggtccctagttctgggacrgacaccagtacaaccttcccaacattgagtgagaccccatatgaaccagagactacagccacgtggctcactcatcctgcagaaaccagmacaacggtttctgggacaattcccaacttttcccataggggatcagacactgcaccctcaatggtcaccagtcctggagtagacacgaggtcaggtgttccaactacaaccatcccacccagtataccaggggtagtgacctcacaggtcactagttctgcaacagacactagtacagctattccaactttgactccttctcctggtgaaccagagaccacagcctcatcagctacccatcctgggacacagactggcttcactgttccaattcggactgttccctctagtgagccagatacaatggcttcctgggtcactcatcctccacagaccagcacacctgtttccagaacaacctccagtttttcccatagtagtccagatgccacacctgtaatggccaccagtcctaggacagaagccagttcagctgtactgacaacaatctcacctggtgcaccagagatggtgacttcacagatcactagttctggggcagcaaccagtacaactgttccaactttgactcattctcctggtatgccagagaccacagccttattgagcacccatcccagaacagagacaagtaaaacatttcctgcttcaactgtgtttcctcaagtatcagagaccacagcctcactcaccattagacctggtgcagagactagcacagctctcccaactcagacaacatcctctctcttcaccctacttgtaactggaaccagcagagttgatctaagtccaactgcttcacctggtgtttctgcaaaaacagccccactttccacccatccagggacagaaaccagcacaatgattccaacttcaactctttcccttggtttactagagactacaggcttactggccacmagctcttcagcagagaccagcasgagtactctaactctgactgtttcccctgctgtctctgggctttccagtgcctctataacaactgataagmcccaaactgtgacctcctggaacacagaaacctcaccatctgtaacttcagttggacccccagaattttccaggaytgtcacaggcaccactatgaccttgataccatcagagatgccaacaccacctaaaaccagtcatggagaaggagtgagtccaaccactatcttgagaactacaatggttgaagccactaatttagctaccacaggttccagtcccactgtggccaagacaacaaccaccttcaatacactggctggaagcctctttactcctctgaccacacctgggatgtccaccttggcctctgagagtgtgacctcaagaacaagtaagaataacttttttattgtggtaaaatataaatactataaaamttgccattctaaacattttaattgtacaactcagcagtactaatacattcacattgttgtgcaaccctcaccactatctgttttcaaaactttttttatcaccccaaacaggactgaaggaataatttcccattccccattctccctagtgcagtggtgcaatctcggctcaccacaacctctgaacctctgtctcctgggttcaagcaattctcctgcatcagcctcctgagtagttgggactacaggtgcacgccaccgtgcctggctaatttttgtatttttagtacagacagggtttyaccatgttggtcaggctggtctcaaactcctgacctcaggtggtccacacgccttggcctcccaaagtgctgggattacaagtgtgagacactgtgcccggccatatstgttagatcttactaatcctgtcaagaggattcagtgtccttttttttttttctttcttttttttgatagagtctccctctggcacccaggctggagtgcagtggtacggtcttggctcactgcagcctccacctcccagaytgaagcgattctcctgcctcagcctcccgaatagctgggactacaggygcgtgccaccacgcccarctaatttttgcatttttagtagagatgggatttcactatgttggccaggctggtctcaaactcctgwtctcaagtgatccgcccargggcctcccaaagtactgggattacaggtaggagccacctcacctggccctattttcggaatggatttttttttaatgtttaaaatgtcacctaagattattgtgaagatcaaataagataaaatcctaataacccaagtaaaccacagggctccacttggaccagtctcagaagtttcaagaaaatcagtcagaccatcaaatgtaaaataagtctaaattttctttgcactattcacagagtgccaaagaggatctaattcatgtttcagaacataccctacttactaaaatccccttttcctcatttcttctcattctgcaactttatcatctcctgcggaccccctagcctctcccctccccatagtcagtctctctctctctctttccctcccctcttattatctcaatttcacacgaaagaattccagaaactatactgccaaaagtctttcctgtctttgaaaagttgggaaagaggaraaactcagacagcaatgacaaaattatacgtaatggatgaaggaaacacaaataaggctggaaacagaaaattttgtccccatcatttatttaatgaaggtggcagtattccagccacatagtgaacccccacaataagaaggggcctctggcgattgattattgtcattgttgttaatgataatgagggtgaggatatcatgagcatcagtgtaggaggcagttaactaataagaccaagctgttggctgggcgtgctggttcacacctgcagtcccagcactttgggaggccaaagtgggtggatcacttgaggtcaggagttcaagactagcctggccaacatggtgaaacctggtctctaccaaaaatacaaaaattagtcaggtgtggtggcgtgtgcctgtaatgacaactacttgggaggctgaggcaggagaatcacttgaacctgggaggcggaggctgcagtgagatgagcttgarccrctgcactccagcccgggcaacagagagagactcttgtctcaaaaaacaaaacaaacaaacaaaaactaaaccaaacaaaaaaagactagctgttattcatttatttatttatttatttagagacggagtctygctctgtcacccaggctggagtgcagyggcacaatcttggctcactgcaacctctgcctcccaggttcatgtgattctcccgcctcagcctccccagctgttgttattcatgaatgaacctcagagaaagcacacaggagggttggtgcacctgtgttttgagttctacccctccttcctctcttaacttcctcctgtcttctcactctgattcgttcttccttcctctccctctctctytgcaggttataaccatcggtcctggatctccaccaccagcagtgagtaaacatggccctgaagtccctatgccctgggaattcttcctccctaagcctgccttccaggaggaaagtatcycccattccctaggttctcatccccacagaaactccagaatagcaaaagtctcaggctgagccaaggcacagatgccagtgctcaccaagagtcctattctcccctcgctaaatgataggacccaacaaacccgattcacgctgcgttttctttcagctccgatgacctccatgttctctccaaggcctctcgtatctgtgagccccacccccagcgctacaggtaggaatctggcttccagctcccatgaaacgtcggctgccattcagtggctgattaattgctgtgtggtctgagtcctgatgcccaccaagtctcagcgtgtycccctctgtccaatctcatccaacaatttaagctaatgcttgwttaatgatgtcctcactataccaccttggacactttctttttgcctggatttaaagcttccatttctttccttccttccttcyttcttctttcttccttccttccttccttccttccttccttccttccttccttcctccttccttccttcctttcttcctttcttcctgtctttttctttctttcyttcttttggcagagtctcactctgtcgcccaggctggagtgcratggtgcaatctcggttcactgcaacctctgcctcccaggttcaagcgattctcatgccacrtgccactatgcctggctaatttttgtttttttgttttttggggggttttttgagacagagtctcagtctgttgcccaagctggagtgcagtggcatgatctcrggtcactgcaacctccttctcccaggttcaagcgattttcctgcctcagcctcctgagtagctggaactacaggcacgcaccatcacaccggctaattttttgtgtttttagtagagacgacggttttgcaatgtgggccaggcttgtctcgaactcctgacctcaagtgatcckccagcctcggcctctcaaagtgctgggattacaagtgtgagccactgcaccaggccaaaaacttgtatttcaatagtcattgaggctgggtgcagtggctcacgcctgtaatcccagcactttgggaggctgaggccagtggatcatgaggtcaggagatcaagaccaccctggctaacacagtgaaaccccatctctactaaaaatacacacaaaaattagccgggcatggtggcaagatgcctgtagtcccagctactcaggaggctgaggcaggagaatggcgtgaacctgggaggcagagcttgcagtgagcggagatcgcaccgctgcactccagcctgggcaacagagagcgactctgtctcaaaaaaaaaaatatatatatatatatatatatattcattgagaccgactctgacttaaaagcagtaatgaatggtgtaggttttggtaaattacaggtcttgctttaagtcctggtcctctcttttgctcactgtgtggccccggaagagccatgtaacctctccaggcttcagtgtccatttttagaacggagtaagtgaataagctgtgtccaatcatctctggccatatcagcttcattttttttttcctccagggtccaaacatccctccaccctcagagtctttgcacctggtgttcttgtccttcaaatctcagcytggatcaccctttataaagtagcatttccccygtatacgcatcttgcacacagccaatctctattctacctctatgctcacttccttcctggcaattattactacagctgggcccttgaacagcatgagggttcagggtgctgacccctatgcattcaaaaatccacatataactttttttttttttgagatgkagtttcacacttgttgcccaggctggagtgcagtggcgccatcttggctcactgcaaamtctgcctcctgggttcaagtgattctcctgcctcagcctcctgagtwgctgggattacaggcatgtgccaccatgcccagctaattttgtatttttagtagagatgaggtttctccatgttsgccaggctgctcttgaactcctgacttcaggtgatccgcctgccttggcctcccaaagtgctgggattacaggcatgagccatgatgcccggccatttgctaatggcatctagtaagtagaggccagagatgttgcaraacatccaacaatgcacaaagcagcctcctatcaaaacacattatccagaccaaaatgtcaatagggctgaggttgagcatctgctgtacacagattccaagttctggtacaaatctcgtagttctctgagggctcatctttcaatgcctagcacatcaaaggaggccaatttcctcttccctttcacctcctggtatgaaatgtttcctcctccaccttgatcctgtaagagcccagctggagtttgcagacgacggggaaagaaatgggtgagggagggtcctatggttgagtctccgcagtgggcmctgggtgcccagttcaccctcctccccttcattttctccatcatgacaactcaaggcaaattctcagtttccatgggccagtggaatccactgacttcatgaaataaccccaccctgagcaaatacccctcaaataataactgtttacacaacatcagtggcaacaatgacccaagcagcaatgccaccaccagaatagcaaccataacagcagctcattttcatcaaaaggaaactgtagggccaggcacagtggctcacacctatattcccagcattttgggaggctgaggcaggcagatcmcctgaggtcaggagttcaagaccagcccagccaacatggtgaaaccccatctctactaaaaatacaaaaactagccaggcttggtggcatgtgcctgtaatcctagctactcgggaggctgaggcaggagaattgcttgaaccygggaggcagaggttgcagtgagctgagattgtgccactgcactccagcctgggcgacagagcaagactccgtytgaaaaaaaaaaaaaaaggaattgtgccaggaattgtgatgagaactttatatgcattatctcctattaatattacccaaacctccgtgagttactatactcatttctacagagagcatttatgcatccagggaggaagtaattagcccagaattactcagttatgacacaggacagtatgaaaactccaaccgaagattggagactcatgaaaactccaggctcctaactacaagacatcactgtggatcgtccaaatagagcaagccccaatctcaggacaggaatgaggcatgaatggcctctatgctaatgatctaacctaatgctgaatttgttacttcccttctgaatccacttggagatttcctttatatctgacttgaaatagaggwtatatactcctctmtccttgacataggagataatacacagaaagtatttcattgtagtatcaagtacacatcctgttctgtgtccataggattatgactaatttagggcatggcttaacagtgtggtactattgaatgacagacagatgtctgttttgttggatgcaggacaagccatgtaacctccccagactttagtgtcccctctgtggaatggaataaaaatactacgtgggattgttctgataatcaaatgagataattcaggaacaacccagataaataacagggctgccctgggttctgtctttccttgtatctctcacagagcctcaaaggagatgcaatccatgacctagagaaacactcaggacaaattctcttttccccagttcctttcttgctccaatggcaacaccacccctctcatcctgragtctcttgtttttaccaccacacctattttgccaaattttctccaatattccaaaccatatgaaacctttctttctttcttttatttcmttcctttccttcctttccttctttctttcttttttctcttcttttcttttctttttsagacatggtctcactctgttgcacaggctggagtgcaatggcacgatctytgctcactgcaacctccgcctcccaggttcaagagattctcttgcctcagcctcctgagtagctgggattacaggcgcccaccgccacrcmacrctaatttttgtgttcttagtggagacggggtttcgccatgttggccaggctggtcttgaactcctgacctcaagtgatttgcccatctyggtctcccaaagtgctaggattacaggygtgagccaccaagcccggccccatatgaaccrtttctatccctcatttctctgtacttttacctaaaaacaccactcccttcacccatcrcatttttgtcaattctacatcacacacacacacatacacacacacacacacacacacagagaaagtaagttggaaaaaaattatactatcatgaaattttgtgaaaggaggtaagctgagagagtaagaatcaaactaaattatctttatgggtagaaagcacactcatccatacatgtgtctttccacccttgtaatgtatttattattattgtttgtryatactagattcccaataaatagggacagctattatggtatttttatttcaggaataataatagtgatgatttccaccattattgtcaaaggacaaagcacaaaatatgtaccaaataaaatatagccattatcckttattcacaaaagatcttggccccacctcttctcaatgaaatgtccatgacttgttcaactttggccactctgggctgagagatggaggttcccttgcragctgaagtcacacatcgaaggtggaagcccctcccctccctctggctggctgagggatagcccagatgggctcatcatgaaagtttcccattatttccatttctggatctaccatcttcccctcccctacctctcacccatcataattgtccttctttactctttcctccctatctgcaggttataaccgtcggtactggacccctgccaccagcagtgagtattcaaacctgtgatattccaatgcccttgggacccttcctccccaaggtgcattcctcagaagagaaactgatcattctccctccctacgtgcccagccacagcctcagagcagcccctaacccgtcaaggtcttggtgtgagtcaagatagaagtccaaattccaatgagcagttcctgtcccatattcctttaggaagacacccaatcatttctccatgttctttttttctcagctccagtgacttctacattctccccagggatttccacatcctccatccccagctccacaggtaggaagctcctctctggcatctatgaaatttaacactgcatggtctgttccctgctgaccacccagactcagcctgttccactcgccctctcactctctctctctctcttttttttttttttttttttttttttttacggagtcttgctctgtcacccaggctggagtggaatggtgtgatctcggctcactgcaaccttcgcctcccaggttcacgtgattctcctgcctcagcctccggagtagctgggattacaggtgcacaccaccatgcctggctaattttttgtatttttagtagagacggggtttcaccatgttggccaggctggtcttgaactcctgacctcaagtgatctacccacyttggcctcccaaagtgctgggattataggcatgagccaccacgccaggcccactctctaaattttgaccaccctgccttgagtggtcttctagcaccctaacctctgtctaacctcgrgagctttgcactagcgattcctggggaccagctatggttggtatcttctcaactttctaatttttttwaaattattattattattattattattttaaatggagtctcgctctgtcacccaggctggagtgcagtggcaccatctcggctcattgcaacctctacctcccgggttcatgcaattttcctgcctcagccagaaattttctcagtggtcgagattgtgccactgcactccagcctgggcaatggagctaggctccatctcaaaaaaaaaaaaaaaaagacggaggtcgggcattcctaacccttaaccctgccttgtgattctggagttatgagatagaacctggtgtcccgtaattaaaattccgccttcaggccttatgttttgtgagtcacaacactgcaaactttttacatgctgtagmcaggatgttcactctccacttcctcactgctctgctctaatcaattcaaccatttatgtgacatgcctaacccctctgggcttgtacgtatgtaacatgtattacaaagcaagtcattccatgatcaatgctgtcactttttctaggtgctttcaaaatttgttcttcatcattgattttcagtagtttgattacgatgtgtctgggcatggttttctttgagtttatcctgcttaaagtgttctcagcttcttgagtctcaaagtgtttattttctgctctgattctttctccccttcggacctccaatgaaatgatgttgcccgaagagaccctgaggttctgttcattttgttatttatcaatcttttttcctctccgaatttcaggtttaataatttttttttttttttgagacggagtctcgctctgtcgcccaggctggagtgcagtggcgcgatctcggctcaccgcaagctccgccycctgggttcacgccattctcctgcctcagcctccggagtagctgggattacaggcacccgccaccatgcccggctaattttttgtattttttagtagagacggggtttcaccgtattagccaggatggtctcaatctcctgacctcgtgatccgcccgcctcagcctcctaaagagctgggattacaggcgtgagccactgcgcccggcccaggtttaataatttttatagaatattttcacaatcaccaagccttttctctaccagctccattctgcccatccattgaattctttttatctcagttactttatgtttcagttcgaaagtttctacttggttagatagatagatgttatatcatatattatatgttatataaaaatatatttatggttatacatataacatatatgttatatatagttatttatatagccataactatatatagccatatatatagttatatataaccatatatatagttaccatatagtaaccacatatataaaacatatatatatagtgtctctctatatatagttatatatatagtttctatatctgtaactatatatagttatatatgtatgtttctctgtatataaatatatatatttctatatatatagttatacamattatatatataactgggagatgttggtaaaggatggcgtgaggaaacctggagcagtcatggtaatcctcgctctgctccgaactcctcaagagcaggagaagggtcctcctcattctccagccatgttgactttgagcaatttactcatcctctcagtacctcagtttcctcacctgccaattgaggataataatatttcataaattgtttgcaaatgttatatgcaactctacgtaagaacacctagcacaggggctaccagggaatttggtttaacaaatatttatcaggcacctattstgggctgggcaggggggataagatgttgactaagtcaaatgcagtccctcccctcaccaagtttacagtgtattgggcaagactgaaatggaacaagcaattacaattgacaataaaagacaaccaagttattgagcacttactatatggcatgccatatgctatgtattttttttatttttaacttttcattttgaaataaataataaatataaagtaaataataatataaataaataataaataacttttcattttgaaataaataataaataaattcaggagatgttgcgaaaatagtgtagcattcccctgtatccttcacccagtttctccccaatggctacatcttacataactctaatacaatatcaaaagcaggaaactgacattgttaaaatccattttactggttttacacgcgtgtgtgcatatgtgagcttgtgtatgtgcgtgtgtgtgcaggcatgtgtgtgcatgcacgcctgtgtgtgcatatgtgcatgtgtgcatgcgtgtgtgcatgtgtgcatgtgtgtgtgcatgcgtgcgtgcrtgcgtgcatctgtgtgcatgtatgcacatgtgtgtgtgtctgtgcacgtgtgtgcatgcatgtgtgtgtgcgtgtgtgttggtagccctatgcaatttttatcacatgggcatagccctataatcaccaccaccatcaagattcagaactgttccattcccccaaagattcccctcatgctagccttcgtaatcatgcccactgagcccaacactattgcatagaatagctattctactctccatctccatctctgkctctacaattttcttttgaagatgttatataaatggaaatgtacaacatgtcacctttgaaattggcttcttttccactcagtgtaatgccctggagatgtgctctttttaacagtcatgtaaccttcctaatttccctccaaaatatcattatgcccctcgccgccttttttttttttttttttttttgagacagagtctcgctctgttgcccaggctggagtgcagtggtataatctcagctcactgcagcctccgtctcccgggttcaagggattcccctgcctcagcctcccaagtagccaggattacaagtgcatgccaccacgcctggctaatttttgtatttttagtcgagacggggtttcattgtgttggccaggctggtctcgaattcctgacctcaagtgatctgcccgccttggcctcccaaagtgctgggattacaggtgtgagccaccgcgcccgrcccatattgcccattgtattacagcggaagaaactgaggtatggacaggtaacatgtccatggtcacttggctggtgaggggcagagaggagatttgaaaccaaatctgactcactagtgtggccgtaaccatggtaactatgtctctctaccatgtggtctcctctttattaaaggaagggcaagttctgggagttttgggagttttgggcttgagtggggaagggtagccaagtaaagcaggtgagagaaggtctgctttaaggactgctgtttgatttttattgttgttgttcagtgttcaatgggattgagttgactcttttttcccttcttgttccccaaagcatgagactgttccggtccttttcccttttaacttctcagctagagtttgttagggcgggtatgggcacctggcagagtctgagacctcagcttccagtaggcacacgttctgacccaatacacctaccctggtcccctaacctgcttctggtcccctaacctgcttctgggcccaggtaatgcattttaggaacatcccacttttctccttacctggctttccattatccgtccaaactaaagcacccacctgtctgcttcagactcttgcttcaagcactccgtctgggtcctcagaaattgacttacagtcagttcagatctgactcaggcgtggccttcttttctccttccttgcagcagccacagtcccattcatggtgccattcaccctcaacttcaccatcaccaacctgcagtacgaggaggacatgcggcaccctggttccaggaagttcaacgccacagagagagaactgcagggtctggtgagagccccgcccaccgtactcctccctcgcccacttagacaaaccagcccacctcacaytgcctcgcccactgatgccagccacgcccacctcatccaaccccagacacctttcccygccccacccactgattttagccaagcccacctcaccccacccagcctactgatgccagccacgcccacctttccctgccccgcccactgatttcagccacgcccacctcaccmtggtccacccctccaatgccccactcttcctggcttcccgcagctgttgtttctcacctcccctctccttccttgcagctcaaacccttgttcaggaatagcagtctggaatacctctattcaggctgcagactagcctcactcaggtgagaygctccttaagaaaaacacagcccaacaggtgaatatgaccctagtctctgggctccctgactctgttcatacttggaacaactattgcccatggatactaagcatcaccaccagcagcagcagataactattcctaagacccaaggcactgcattatgtactttatatttaatgcctcatcagtgcttgcaacagcctcatgaagcaggagcagaaggggaaactgaggcccagattaagtggcttgtgccaggacacacaaagcaactgcagcacttcaggttctatatccaaactcctatcccttaggtggcacttcctcctctgcccccattatgaacttgcagcatgtggaaaaccccaatctgacttccctctaagggaacttgcccagagaatctaagaggggaggaaaggaaggcgttcagcccttacaggcaggaggtcagctcctgagtggctcagatgcagccacagagggcctggccggtctgagggtgactgagaggcaccgagggcactgtccctgagtgctggaaagggcaggtcttttagggtagacagcggttgatatcatttcctgcctggcattctcaccttccacacctctctcacagaatctccaagtgtggctctcccaagagagagtgtcagtcatctacctccagcttcctttccttcccagggggaagaggggacaggggggccctagtggctaagagcattggtgaactcaggcagacctcagttctgaaccaacccagctctgccatttactatctgtgactctgagcaagtgcctgaagccttctgtgccctatttcctgacatattatatatataaaatacatatattatatatagacatattttatatacatattgaggcatattttataaacatgtttatagacacatttttatatgcatatgttatataygtatataacatatgttatatataatgtatatattatacatattgttatattgtatacatgttatatatgttatagcatatatagtacaagttatatataacacatacattatgttacatataatgtatatgttatatatgatatattatatataattatatattatataaaactgttatatataattatatataatatatagttgttatatataattatataattgttatatattatatacaacatataacatacattatatattgttatatataayataatatatacatatataacatatgtataacttttatgttatacataatgtatataacatatatgtgtatgtgtgatgtacataacatatctgacattaacatataacatatgatataacaatattatatgttataacataatatatgttataatataacaatattatatgttataacttatactgtcatatgtaacatatacataatattttataaatcagtttaatatacattatgttacatataatgtatgttatatatgatatattatatataattatattatacataattgttatatataatgcatacattgtatttgttacgtattatatgcaacatataacatatacattatgtattgttatatataatgtaatatatacatacataacatatgtataacttatatgttatatataatgtatataacatatatgtgtatgtgatgtatataacatatctgacattaacatataacatatgttataatatgacatattatatatattacatataacgtatatcatgtataatataatgtgtatatataatatattaaagtatataagtataaatacatgtaatatttaaatatatattatatatagtatacatgtggatacatacaacttctacatatacctagtatatattctatatataaacagtccatgaattacaatgattcaacttatgatttttcaaactttgtgataatgccatagcaatatgcattcagtagaaagcataccttcaacacccatgcaaccattctgtcattcactttcagtacaatattcaataaattatatgagatattcaacagtttattataaaataggctttgtgttaggtgattttgcccacatgtaggctaatgtaagggttcagagcatgtttaaggtaggataggctaacctatcatgttctgtaggttaggtatagtcgatttttatttttatttttatttttgagacagagtcttgctctgtcacccagactggaatgcactggtgcgatcatagctcactgcagccttgaactcctgggctcaagtgatcctcctacctcagcctcctgagtagctgggactacaggtgtgtgccaccacacctggctattttttttttaatttttttttttttgtggagaggagggtcttgccatgttgcccaggtggccttgaactcctgggytcaaggaatcctcccaccttggcctcccaaaatcctgggattacaggtrtgagccatcacgcccggctacagggcatttttgacttatgacattttcagttcacaatggatttgtcagggctgggcatgatggctcacacctgtcatcccagcactttgggaggctgaggcaggtggatcacttgaggccaggagtttgagaccaggctgtccaaatggcaaaatcttgtctctactaaaaatacaaaaattagccaggcgtggtgtgacaactgtagttccagctactcgggagactgaagcgtgagaatcacttgaacttaggagatggaagttacagtgagtcaagatcacaccaccgcactccagcctggatgacagagcaagactcttgtctccaaaaaacaaaaaacaggctgggtgcatggctcatgcctgtaatcccagcagtttgggaagctgaggcaggtttatcacctgaggtcagtagttcacgatcagcttggcaaacatggagaaaacccatctctactaaaaatacaaaaattagctggatgtggtggtgggtacctgtagtcccagctactcgggaggctgaggcaggagaatggattgaacctgggaggcagaggttgcagtgagccaagatcacaccattgaactccagcctgggcaacagagtgagactccatctccaaaaacaaaagaaagcaaaaacaaaaaaataaaataaaaaacctgtgtttatcaggacataataccatcatgagtcaagaagcatctaaatgtacatggtagttatataaaaatagttatatagttatatacaatagttatatataaaccagtttaatatatgttaagtagaggtatatggtagttatataaaaaatagttatataatagttatagagttatataattatataaaatagttatatataaaccagtttaatatatgttaggtagaggtataataatatatattgtatatactatataatatagtaatgtataaaatgcaaaacgatatcatatatttctatattaagtttatatttacagatctacattttatatattttaygttatatacaattgtgttatacataatataattagtatagtactgacttggggaattgagcagtaccaacccatagggatgtttgaggatgaaaatatgtgattatgaatacaaaatgctgggcctgctgcataggaagtatttaataaatggtagttgttactataaagtcgttcctactatagagctactcacaaccctgggacayagggaaagagcccgtttccctctaatcactcaatagtgggtggctaggtaggtgagtccacatcctgtggccgggaacaggtgctgagacatgaagaccttctgactgcatgttggaccagccacagtttcagacggaccagccaaaaagggcattttccccaagccatttagctcccttgagtctcataacaaatctcctagccctgctggtccataggatctagagaggatgacttgaaccttctgatcccaccatttgaaaacgccatgccatgggcaccagtaggagggccactgctacgtgcaccagtacaagggccactgccatggattacagattaaccctaagtatagctgtcgcacacctagtacttcaggaggcttattcggggccatgcagatccctggcattattatcctaggatcctacaccaagcaaagcaggagctgcccctcctcataaacccataagccctcctcttgagcaaagcagctgggaaggccagaagttattcaagctcccctctgccccggttccaaagacagacagctcaagcctacatgcagcaaaccctataaaagtgtcacctcttggcatttctgccatggtaatgctttctgcttccactaataatcctagtaatttgtttatggtgggcatctctctgatgagaaccacattctttttttttttttttttttttttttgagatagagtctcactctgttgcccagactggagtgcagtggcgcgatctcggctcactgtaacctttggctcctaggttcaagcaattctcctgcctcagcctcccaagtagctgggactgcaggcacgtaccaccatgcccagctaatttttgtatttttagttgagacggggtttcaccatgttagccaggatggtctcaatctcttgacctcatgatccacctgccttggcctcccaaagtgttgggattacaggcatgagccaccatgcctagcctgagagccacattcttgttaaccacaattttctcagagtctgcattaggggttgacaaagagtggaaaggaaggacaaaaggatggagargtggatggactaagcatatgtaggttcttacccaggccagagaaggatagctcagccayggcagtggatgccatctgcacacatcgccctgaccctgaagacctcggactggacagagagcgactgtactgggagctgagcaatctgacaaatggcatccaggagctgggcccctacaccctggaccggaacagtctctatgtcaatggtgagcagctgtgatgtggttggaggctcttcctccttgctgagcagcctgtaatcactggcttgaggtcacactcactgtcaggcaattgaaaatttggtcctgtgctctacatgggatgactaatttccggacttcatggtatcttttttttttttttttttttttgagatggagtctcgctctgtcaccaggctgaggtgcagtggcatgatctcagctcactgcaacctccgcctcccggattcaagcaattctcctgcctcagcctcctgagtagctgggactacaggtgcatgccaccacacccagctaatttttgtatttttagtagagacagggtttcaccatgttggtcaggatggtctcaatctcttgaccttctactccaccttgccttggcctcccaaagtactgggattacaggcttgagccaccacacctggccaggacttcatggtttcttcatcatcatggaatgaattccatcagggcattcttccctgatgtgagggcactgataggaaatctttaatggtccctgctgcatgaaactgcttccattgcaccagggtagccctgacccctatttggtcccccacatctccttgtaacttacccacactcctccctccttctctgtgcaggtttcacccatcgaagctctatgcccaccaccagcagtgagtattcaactcatgtccacatgcccatgatcctacaccaagcaaagcaggagctgcccctcytcataaacccataagtcctcctcttgagcaaagtagctgggaaggcagaagttattcaagctcccctctgccccagtttcaaagacagactcagctcaagcccacatgcagcaaaccctataaaagtctcacctcttggcatttmtgccatggtaatgctttctgctctcactaatgaggacttctcctcagctcctgggacctccacagtggatgtgggaacctcagggactccatcctccagccccagccccacgagtawgtaccagtcaatggcatctctattagagcatgctatctctgtcatttttactcagatgaagatggaaaatcatagcaaatctactgatagtgagtggaccaacgaaatttgttggccacctagtgtgtaccagatcctagagatacaggagggaaaacaaaaccaatacaaaatttctgctctcagtgagcttgtattcttgtcatgatgatgatgttggtggtggtgctgttgatgacgatgatgatgatgatgatgatgatgatgctggtgatactgttgatggtgatagtgatgttgatgacaatgatgatgatgatgatgttgaagaaaatgatgctggtgatggtggtgggggttattatggtaataatgatatgttgagtgtgacgatgatggtggtggtgttgatgatgatgatkattattattatgctagtgacattgatgatggtaatggtgatatcaacgacagtgacaatgatggtgatgaggatgatgtcggtgatggtggtggggttatgatggtaatgatatgttgaatgtgatgatggtgatgatgatrtttgtggttcatgatggggattgtcatggtggtgctggtggtacttgtgatgacaataatgataataatgatgacaatgatagtgatgatggtgatggtgataataaagataacagatatcaccttacaatattgagcactaaatatgtaccaagagctatgctcagtatctaactactattatataatctactttagaaaatgaattgtatcatagataagaaaggcgtggaaaatatttattatgtcactcaatttaattgctgcatatggttattacaaagtgctattctctctactttgaacataatgtttatttcacactcccactatagctgctggccctctcctgatgccgttcaccctcaacttcaccatcaccaacctgcagtacgaggaggacatgcgtcgcactggctccaggaagttcaacaccatggagagtgtcctgcagggtctggttagtgtcctgccctccacactctgccctgctcatgatacccagtccctcttacatcatccatgccagggcaatggaagaatatcaaacccaactcacttttgccccaagagatgcaagcctcagccaggagcggtggctcacgcctgtaataccagcatttgggaggccaaggcgggtggatcacctgaggtcaggagtttgtgaccagcctggccaacatagtgaaacctcatccctactaaaatacaaaaattagccaagcatggtggtgcatgcctgtaatcccagctacttgggagggtgaggcaagagaatcacttgaatcaaggaggcagaggttgcagtgagtcaagatcatgccactttactccagcctaggcaaaaaagcgaaactccatctcacaaaaaaaagaaaaaaagagagagatgcaagcctcccccaccaaggccagccctgcccacctcacttctgcctggctcttacataaaacttagccctcctactcactgccctctccctcctccacagctcaagcccttgttcaagaacaccagtgttggccctctgtactctggctgcagattgaccttgctcaggtgagaacttagaatttccagcctggctgccccacttgtactcactccaaaagactttgcactgcttccttgctgcacttcctagggatatcctcaccaaaggtggaattcaggagtcacaggcttcaggatcagtgtgtttcctgacagtaacacccctacactccacctcaacagagagaatctgcatggcccatcatcaggattgagcctctccctttatcatccctctgaattccctccattccctgtgcctccctttcctttacatgttaaattctgtccccaggatttctttcaggacaatcatgccttatccacgtgatttcatcctcatttcgagctcttcactgggctcaagtccggctccccgtcccgtccatgaaagtgtcagtttcatcttgtcactgtatccgtgactccactcacagtcctcagcaagccaatagtccatgcactaagagtcgatgtggcttctcacctctttcccaggtttctcatttctctggtccttgctgtccttccctcagcaatcgcaagacccttcctagataaacttttcattgtgatttttcccactgaccctccccaggcccgagaaagatggggcagccactggagtggatgccatctgcacccaccgccttgaccccaaaagccctggactcaacagggagcagctgtactgggagytaagcaaactgaccaatgacattgaagagctgggcccctacaccctggacaggaacagtctctatgtcaatggtgagtggctgtgatgtggttgaaatctcttcccccttgctgggcagcctctaatctctaactagagrtcacactccctgcctggcctttgaaaattctgtcatgtgctctacatgggatgactaaggtctggacttcatggtttccttaccatcatggactgtgttccctcagggcattctttcctgatgtgaggatgctgatagaaaatcttcaattgtccctgtaccatgaaactcggttcattgcaccagggtagcattgacctccatttggtcccccacctctccttgtctcttacccactctcctccctccttctctatgcaggtttcacccatcagagctctgtgtccaccaccagcagtgagtattcaactcatatccacatgcctcggttcctacaccaagaggagcaggagctggcccctcctcataaacccattaagtcctcttcataagcaaaggatttaggagggcagaagttatttaagtgtccctctgcccagctcaagagaccgacccagctcaagctacacatgcaacaaaccccataaatagtctcccctcttgccatttctgccaagagagtgctttatgctttcactgatgagaacttttcctcagctcctgggacctccacagtggatctcagaacctcagggactccatcctccctctccagccccacaagtaagtatcagtcaatgacatctctatgagagcatacctgattagtgtaaacatctctgtcattttcactcaaataaagatggaaaatcatagtaaatctagtgatactgagtggacaaatttgtttgtttgttttttctcatccttttcactttttttattatactttaagttttagggtacrtgtgcacaatgtgcagtttagttacacatgtatacatgtgccatgctggtgtgctgcacccatttgctcgtcatttagcattargtatatgtcctaatgctatccctccccccctccccccaccctgcaacagtccccagagtgtgatgttccccttcctgtgtccacatgttctcattgttcaattcccacctatgagtgagaacatgcggtatttgkttttttgtccttgcgatagtttactgagaatgatgatttccaatttcatccatgtccctacagagacatgaactcatcattttttatggctgcatagtattccatggtgtgtatgtgccacattttcttaatccagtctatcattgttggacatttgggttggttccaagtctttgctattgtgaatagtgccacaataaacatacgtgtgcatgtgtctttatagcggcatgatttataatcctttgggtatatacycagtaatgggatggctgggtcaaatggtatttctagttctagatccctgaggaayygccacactgacttccacaatggttgaactagtttacagtcccaccaacagtgtraaagtgttcctatttctccacatcctctccagcacctgttgtttcctgactttttaatgattgccattctaactrgtgtgagatggtatctcattgtggttttgatttgcatttctctgatagccagtgatggtgagcattttttcatgtgttttttggctgcataaatgtcttcttttgagaagtgtctgttcatgtccttctcccactttttgttggggttgtttgctttttccttgtaaatgtgtttgagttcattgtagattctggatattagccctttgtcagatgagtaggttgtgaaaattttctcccattttataggttgcctgttcactccratggtagtttcttttgctgtgcagaagctctttagtttaattagatcccatttgtcaattttggcttttgttgccattgtttttggtgttttagacatgaagtccttgctcatgcctatgtcctaaatggtaatgcctaggttttcttctagggtttttatggttttaggtctaacgtttaagtctttaatccatcttgaattaatttttgtataaggtgtaaggaagggatccagtttcagctttctacatatggctagccagttttcccagcaccatttattaaatagggaatcctttccccattgctcagatttgtcaaagatcagatagttgtagatatgtggyattatttctgagggctctgttctgttccattgatctatatctctgttttggtaccagtaccatgctgttttggttgctgtagccttgtagtatagtttgaagtcaggtagcatgatgcctccagctttgttcttttggcttaggattgacttggcgatgcgggctcttttttggttccatgtgaactttaaagtagttttttccaattttgtgaagaaagtcatcggtatcttgatggggatggcattgaatctataaattaccctgggcagtatggccatttttcccgatattgattcttcctaccccatnnnnnnnnnnnnnnnnnnnnnnnnnnnnnnnnnnnnnnnnnnnnnnnnnnnnnnnnnnnnnnnnnnnnnnnnnnnnnnnnnnnnnnnnnnnnnnnnnnnnnnnnnnnnnnnnnnnnnnnnnnnnnnnnnnnnnnnnnnnnnnnnnnnnnnnnnnnnnnnnnnnnnnnnnnnnnnnnnnnnnnnnnnnnnnnnnnnnnnnnnnnnnnnnnnnnnnnnnnnnnnnnnnnnnnnnnnnnnnnnnnnnnnnnnnnnnnnnnnnnnnnnnnnnnnnnnnnnnnnnnnnnnnnnnnnnnnnnnnnnnnnnnnnnnnnnnnnnnnnnnnnnnnnnnnnnnnnnnnnnnnnnnnnnnnnnnnnnnnnnnnnnnnnnnnnnnnnnnnnnnnnnnnnnnnnnnnnnnnnnnnnnnnnnnnnnnnnnnnnnnnnnnnnnnnnnnnnnnnnnnnnnnnnnnnnnnnnnnnnnnnnnnnnnnnnnnnnnnnnnnnnnnnnnnnnnnnnnnnnnnnnnngttatgatggtaattatgatgtattgagtgtgatgataatagtgatagtgttgctgtttataatgatgatagtggtgatccttgatgatggtggtggtgatgatgacaatgatgatggtgatgaggatgatgcaggtgatggtggtggaggttgtgatggtaatgatgtcgtattgagtgtgatggtgatgatgatggtggtagtgttgctgtttataatgatcatgataatgatagtgttgatgttgatgttgatggtggtggtgatgtcgatgacaatgatgatgatggtgataaggatgattcaggtgatggtggtggggttatgatggtaatgatgatgtgttgagagtgatgatgtttgtggtggtcatgatggggattatcatggtggtgatgatgataataatgatggtgacggtgacaatgatggtgatggtgatgatgatgataataaagttaacagaaaatgtcagacagtattgagcaataaatattcaccaacagctatgctcagcatctactattatataatatacttttayaaaaataaattatattattataggcaagggaggcatggaaaatattttgtcastcaatttaaattctgcatatattgaaagataagtctattgcaaactcctattttctctgctttgaacatagtgtttatttcccattccagttatggctgctggccctctcctggtaccattcaccctcaacttcaccatcaccaacctgcagtatggggaggacatgggtcaccctggctccaggaagttcaacaccacagagagggtcctgcagggtctggtgagagccccacccactttactcctgccccatcccagatacatcatctatgccagggctatggaagaagattgtatccatctcacccttgcccacaaaagatgcaagccctgctcactgaggccagccatgcccactggtgcctgctccacccacctgacttctgccccacacacatgcaccttagmcctcctactcactttcctctcgctcctccacagcttggtcccatattcaagaacaccagtgttggccctctgtactctggctgcagactgacctctctcaggtgagaccttagaagatccagcctggctgccccagttgttcccactccagtagattttgctctgcttccttgctgcacctcctagggatatcctcaccmaaaggggaattcaggagtcactggcttctggaccaatgtstttcctgatagtaacactcccacacctcacctcaacagggagaatctgcatggtccatcatcaggattgagcctctatcctgatcatccctcggaattccctgcccctccctttcatttaggtgttaaattctgtccccagaatttctctcaagacaatcatgcctcatccaagtgctttcatccctgtttctagctcttcactggtctcaagtctgggctctcctgtccccatgctatgagaatgcaggtttcaccttgcacttttataagcatggttgtatctgtgactctgtgcacagtcccaagcaagccagtagtccatgcactcagagaatctaagtgtagcttctcacctctttcccaggtttctcatttcctctggttctttactgtctttccatcagcagtctcargacacaacctaagtaatcttttcatagtcattctccccacctaccttccccaggtcygagaaggatggagcagccactggagtggatgccatctgcatccatcatcttgaccccaaaagccctggactcaacagagagcggctgtactgggagctgagccaactgaccaatggcatcaaagagctgggcccctacaccctggacaggaacagtctctatgtcaatggtgagcagctgtgatgtggttggagtcttttccttctagagtctggaaagaatctaatctgtggcttgaagtcacactccctgcctggccattgaatattctgtcatgtggtgtagatgggatgacaaagttctggacttcacagtttcttcattgtcgtgaactgtgttccctcagggcactcttccctgttgtgaggatactgataggaattctttaatggccccagtcccatgaaactcattgtcccatgaaactcatttaattgcattgggattgccatgacccttattgtgtccctcatatctccttaacgcttaccaagtctcctccctccttctctatgcaggtttcacccatcggacctctgtgcccaccascagcagtgagtattcaactcatgtccacatgcccctgatcctacattaagtggagcaggagctggcccctcctcttaaacccataagtcctcctcttgagcaaaggagctgggaaggcagaagttattgaagctcccttccaccctagctccaaagacaggcccagctcatgcccrtatgcagcagacctcataatagtctaccttcttgccatttctgccatgagattattttctgctttcactgatgagcactttttctcagctcctgggacctccacagtggaccttggaacctcagggactccattctccctcccaagccccgcaagtaagtactagtcaatggcatctcccttagattatgcctgatgagtgtgaacatctgtgccattttcactcaaatgaaaatagaaaatcatagtaaatctagtgatactgagtgaaccaaaaaaatttattggccacttacagtgtaccagaccttagagatacaaggaaaagaaaactaataaaagcacctctgccctcagtgagcttgtgttcatgtgatgatggtggtggtggttatgatagtaataatgacatgttgagtgtgatgatgattgatgatgatggtgatgctgttgatgatgatggtggtgatgttactggcaatgatgatgatggacataaggatgttgtcagtgatggctgtgaaggttatgatggtaatgatggtgtgtggagtgtgatgatgatgatgatgttgctgtttatgatggtgaaagtgatagcaacaatcatgatggccagtcatcataaatataacagataacatcagacaatattgagcactgaatatgcatgattagctatgctcagcatctaactactattatataacatactttcataaaaataaattgtattattataggcaagggagacatggtaaatattttgtttctcaatttaaattttgcacatgtttaaagataagtctattctaaacccctatttcttgactttgaacatagtgtttattttcaattcccactacagctgctggccctctcctggtgctgttcaccctcaacttcaccatcaccaacctgaagtatgaggaggacatgcatcgccctggctccaggaagttcaacaccactgagagggtcctgcagactctggttagtgcccttccctcctcactctgcccagccccagatatccagtcccttctacatcatccatgccagggtgatgaaagaagatagcaacaacttccccccttccccccaagagatgcaagccccacccacagagaccagtcctgcttattggtgcctgctccacccacctcacatctgccccgacacacacacaccttagccccactactcacctccctctccctcctctacagcttggtcctatgttcaagaacaccagtgttggccttctgtactctggctgcagactgaccttgctcaggtgagactttagaagagccagcctgggtgcccaacttgttcccactctaaaagactttgcactgcttccttgctgcacttcctaggtatatcttcaccamaaggggaattcaggagtcattggcttgagaaccagttgtttcctgatagtaacacccccatgccccaactcaacatgcaaaatcttcatggttcatcatcaggattgagacactaccctgattacccatctgaattccctcctttccctgcccctccctttcatttaggtgttaaattctgtccccaggatttctctcaagataaccatgcctcatccacatacatgcatccgcctttcaagctcatcactagtctgaagtctgggttctcctgttcccatgccatgagaatgcaggtttcaccttgcacttttataaaaattattatatccatgactctgcttgcagtcccaaccaagatagtggtctatgtactcagataatctaagtgcagattctcacctctttcccagatttctcatttcctctggttccttgatatgtttccctcagcaatctcaagacaagtcctaggcaatcttttcattgtcattccccctcctaccttcctcaggtccgagaaggatggagcagccactggagtggatgccatctgcacccaccgtcttgaccccaaaagccctggagtggacagggagcagctatactgggagctgagccagctgaccaatggcatcaaagagctgggcccctacaccctggacaggaacagtctctatgtcaatggtgagcagctgtgatatggtaggggtctcttcctcctggctgtgcaacctctaatctctggcttgggggcacactccctgcctggccattgaaaattctgtcacgtgctctacatgggatgactaagttctggacttcatggtttctttgttatcatgagaggcattccctctgggcactcttccctgttgtgaggatgctgataggaaatctttaatgacccctgtcccatgaaactcatttaattgcaccagggtagtcctgaactctatcgcgtcccccacatctccttaacccttacccagtctcctccctccttctctatgcaggtttcacccattggatccctgtgcccaccagcagcagtgagtattcaactcatgtccatgatgcccctgatcctacatcaagtggagcaagagctggcccctcctctttaacccataagtcctcctcttgagcaaatgagctgggaaggcagaagttactcaagctcccctctgccccagctccaaagacagacccagctcaagcccacatgcagcagacctcataatagtctatcttcttgccatttctgccatgagagtgctttctgctttcactgatgaggacttttttcagctcctgggacctccacagtggaccttgggtcagggactccatcctccctccccagccccacaagtaagtaccagccaatggtatctgtattagatcatgcctgatgaatgcaaacatctgtgccattttcagtcaaatgaaaatggaaaatcataataaatctagtgatactgagtgaaccaaaaaaaatgtattggccacctacagtgtaccagaccctagggatatagcaaggaaaatagaaccaataaaaacatctctgccctcagtgagcttgtgttcatgtgatgatatgatggtggtggtggtggtaatagtaataatgacatattcagtttgatgataatttatgattatggtgttgctgttgatgatggtggtggtgatgttactgacaatgatgatgacggacatgaggatgttgtcagtgatggttgtgaaggttatgatggtaatgatgtgttgagtgtgatgatgatgatgatggtggtggtgctgttgatgatggtgaccatggtactgatggtgttgatgatggtagtggtgacgttgatgacaataacaataatggtgatgaggatgatgccagtgatggtcatgtggttattatgataatgatgatgtgttgagtgtggtgatgattatgtttgtggtgatcatgatggggattatcatggtgatgatgataataatgatggtgatggtgacaatgatagcaacaatgattatggccataataaagataacagataacatcagacaatattgagcactgaatatgcacaactagctatgctcagcatctaactactattatataatatatttttataaaaataaattgtattattataggcaagggagacataaatatttttctctcaatttaaattttgtatatgtttaaagtataagtctattccaaacccctattttctctactttgaacatagtgtttattttcaattcccactacagctgctggccctctcctggtgccgttcaccctcaacttcaccatcaccaacctgaagtacgaggaggacatgcattgccctggctccaggaagttcaacaccacagagagagtcctgcagagtctggttagtgcccttccctcctcactctgccagccccagatatccagtcccttctacatcatagatgccaaggtgatgaaagaagatagcaccaacctcacccctgcccctgagagatggaagtcccgcccacagagaccagccctgctcattggtgcctactcctcccacctcacatctgcccckaacacacacactccttagccctcctactcacctctctctccctcctccacagcttggtcccatgttcaagaacaccagtgttggccctctgtactctggctgcagactgaccttgctcaggtgagactttagaagagccagcttggctgccacaattgttctcactttaaaagactttgcactgtctccttgctgcacttcctagggatatcatcaccaaaaagggaattcaggagtcactggcttgagaaccagttgtttcctgatagtaacaccaccattccccacctcaacaggcagaattttcgtgatccatcatcaggattgaggcactaccctgatcactcctctgtattccctcctttgcctgcccctccctttcatttagtgttaaattctgtccccaggactgctcttaagacaatcatacctcatccacatacatccatccccctttcaagctcttcactagtctgaagtctgggttctcctgtccccatgccatgagaatgcaggtttcaccttgcacttttataaaaattattatatccatgactctgcttgcagtcccaaccaagatagtggtctatgtactcagataatctaagtgcagattctcacctctttcccagatttctcatttcctctggttccttgatatgtttccctcagcaatctcaagacaagtcctaggcaatcttttcattgtcattccccctcctaccttcctcaggtccgagaaggatggagcagccactggagtggatgccatctgcacccaccgtcttgaccccaaaagccctggagtggacagggagcagctatactgggagctgagccagctgaccaatggcatcaaagagctgggtccctacaccctggacagaaacagtctctatgtcaatggtgaggagctgcaatatggtaggaatctcttcctccttgctgggcagcctctaatctctggcttgggggcacactycctgcctggccattgaaaattttgtcatgtgctctacatggggtgactaagttctggacttcatggtttcttcatcatcatgaactgcattcccttggggcactcttcccttttgggagaatgctgataggaaatcttaatggccccatcccatgaaactcatttaattgcaccagggtagccctgaaccctattgcatctcccacatctccttaacccttacccagtctcctccctccttctctacgcaggtttcacccatcagacctctgcgcccaacaccagcagtgagtattcaactcatgtccacatgcccctgatcctatattaagtggagcaggagctggcccctcctcttaagcccataagaactcctcttgagcaaaggagctaggaaggcagaagttactcaagctcccctctgcccctactccaaagacagtcctagctcaagcccacatgcagcagaccttataatagtctaccctctttccatttctgccatgagagtgctttctgctttcactgatgaggacnnnnnnnnnnnnnnnnnnnnnnnnnnnnnnnnnnnnnnnnnnnnnnnnnnnnnnnnnnnnnnnnnnnnnnnnnnnnnnnnnnnnnnnnnatactgatgaaccaaaaaaagtattggccacctacattgtaccagaccctagggatacagcaaggtaaaataaaaccaataaaaacatctctgccctcagtgagcttgtgttcatgtgacgatgatagtgatggtggttatgatagtaataatgacatgttgagtgggatgctgttgatgatggtgatgctgttgatgatggtgatgctgttgatgatggtgatgctgttgatgatggcggtggtgatattactgatgatgatggtgatggacttgaggatattgtccgtgatggtcgtgaagattatgatgataatgatgatgtgttaagtgtgatgatgatgatgactgtggtgatgctgtttaggatgctgaccgtggtacygatgatattgatgttggtcgtggttatgttgatgacaatgacaatgatggtgatgaggataatgccagtgatggtgtggkgttatgatgatgatgatgtgttgaatgtggtgatgataatgttygtggtggtcgtgatgggcattactatggcagtgatggtcataataatgatggtgatggtgacaatgatagcaaggatgatgatggcaataaagatagtacataacatcagacaatattgagctctgaatatgcaccacgaggagtgctcagcatctaaatactattatataatatatttttgtaaaaataaattgtattgttttaggcaagggaagcatggtaaatattttgtcactcaatttaaattctgcatatgtttaaagataagtctattgcaaactcctattttctctactttggacatagtgtttgtttcccacctccactacagctgctggccctctcctggtgccattcaccctcaacttcaccatcaccaacctgcagtacgaggaggacatgcatcacccaggctccaggaagttcaacaccacggagcgggtcctgcagggtctggttagtgctccaccctcctcactccgccccaccccagagagtcagtacctcctacatcatccatgccaggtgatggaacaagatcatacccacctcacccttgccccaagagatgcaagccatgcccattgaaaccagccccactcactgatgcctgttctgcccacctgacttctgccctacacacccacacacgcaacttagccctcctactcatctccttctccctcctccacagcttggtcccatgttcaagaacaccagtgtcggccttctgtactctggctgcagactgaccttgctcaggtgagaccttagaagatcaagcttggctgccccacttgttctcactccaatcgactttgcactgcttccttgctgcacttcctagggatatcctcaccaaaggtggaattcaggagtcactggcttcatgaccaatgtgttttctgatagtaacacccccaaaccccacctcaacagggagaatctgaatggcccatcatcaggattgagcctctaccctgatcatccctctgaattccctcctgtccctgcacctccctttcctttaggtcttaaattctgtccccaggatttctctcaagatgatcgtgcctcatccacaggctttcatgcccatttccagctcttcattggtctcacgtctggtgtctctgtccccatgccatgagaatgcaggttttaacttgcacttttttattttattttattttattttattttattttattttattttattttattatttcattgttgaaacatagtcttactgcacaccaggctggtctcagctcagtgcaacctccgccttccatgttcaagtgattctcctgcctcagcctcccaagtagctgggattacaggcacccaccactatactcagcaaatttttgtattttttgtagagactgggtttcaccatgttgaccaggctagtcttgaactcctgacctcaagtgatctgcccgccttggcctcccaaagtgctgggattacagacatgaggcactgtgccaagccactttgcactttcataaaaattcttgtattcattaccctgcttgcagttcaaagcaagccagtagtcggtgcattcagagaatctaagtgtgatttctcacctctttcccagacttctcatttcctctggttccttgcagtccttccctcagcaatctcaaaacccttcctagttaatcttttgattgcattcctcccaccttccttccccaggcctgagaagaatggggcagccactggaatggatgccatctgcagccaccgtcttgaccccaaaagccctggactcaacagagagcagctgtactgggagctgagccagctgacccatggcatcaaagagctgggcccctacaccctggacaggaacagtctctatgtcaatggtgaacagatgtgatgtggttggagtctcttcctccctgctgagcagactctaatctctggcttgggggcatactctctgcctggccattgaaaattctgttatgtgctctacatgggatgactaagttctggacttcatggtttcttcgtcatcgtgaactgcattccctcagggcattcttctctgttgtgaggatgccgataggaaacttttaatggtccctgtcccatggcaccaggatagccatgacccctattgcatcccccacatctccttaatccttacacaattttctccctccttctctatgcaggtttcacccatcggagctctgtggcccccaccagcagtgagtattcaactcaagtccacatgcccctgatcctacaccaagcacagcagaagctgcccctcctcataaacccataagtcctcctcatgagcaaaggagctgggaaggctgaagttattgaagctcccttccaccccagctccaaagacaggcccagctcatgcccacatgcagcagacctcataatagtcccctgtttggccatttctgccatgagagtgcttctgctttcactgatgaggacttttcctcagctcctgggacctccacagtggaccttgggacctcagggactccattctccctccccagccccacaagtaagtaccagtcaatgacatctctattacagcatgcctgatgagtgtgaacatctctgccattttcactcaaataaagatgtaaaattatagtaaatctgnnnnnnnnnnnnnnnnnnnnnnnnnnnnnnnnnnnnnnnnnnnnnnnnnnnnnnnnnnnnnnnnnnnnnnnnnnnnnnnnnnnnnnnnnnnnnnnnnnnnnnnnnnnnnnnnnnnnnnnnnnnnnnnnnnnnnnnnnnnnnnnnnnnnnnnnnnnnnnnnnnnnnnnnnnnnnnnnnnnnnnnnnnnnnnnnnnnnnnnnnnnnnnnnnnnnnnnnnnnnnnnnnnnnnnnnnnnnnnnnnnnnnnnnnnnnnnnnnnnnnnnnnnnnnnnnnnnnnnnnnnnnnnnnnnnnnnnnnnnnnnnnnnnnnnnnnnnnnnnnnnnnnnnnnnnnnnnnnnnnnnnnnnnnnnnnnnnnnnnnnnnnnnnnnnnnnnnnnnnnnnnnnnnnnnnnnnnnnnnnnnnnnnnnnnnnnnnnnnnnnnnnnnnnnnnnnnnnnnnnnnnnnnnnnnnnnnnnnnnnnnnnnnnnnnnnnnnnnnnnnnnnnnnnnnnnnnnnnnnnnnnnnnnnnnnnnnnnnnnnnnnnnnnnnnnnnnnnnnnnnnnnnnnnnnnnnnnnnnnnnnnnnnnnnnnnnnaataataaagataacaggtaacatcagagaatattgagcactgaatatgaaccaagagctatgctcagcatctaactactattttatataatatcctttaaaaaataaattctgtcattgaaggcaagggatgcatggtaaatatttattttgtcagtcaattaaatactgcctatatttaaagataactatattgcaaactcctattttctctcctttgaacatagtgtttatttccccctcccactacagcagctgttcctctcctggtgccgttcaccctcaactttaccatcaccaatctgcagtatggggaggacatgcgtcaccctggctccaggaagttcaacaccacagagagggtcctgcagggtctggttagtgccctgccctcctcactctgccctgaccaagatactcagtccctcctacaacatccaagccagggtaatgggagaagaatgtacccacttcgtccttgcccccagagatgcmagactcacccactgaggccagccacgcccactgaagctagcctcacccactaggccctgcctcactcaccttatttctgcacccacacacagggaccttagccctcctactcatctctctgtcccttttccacagcttggtcccttgttcaagaactccagtgtcggccctctgtactctggctgcagactgatctctctcaggtgaggctagaatagccagcctagctgtcccaattattctcactccaaaaggctttgcactgcttccttgctgcacttcctagagatatcctcaccaaaggtgggwttcagcagtcactggcttcaggaccagtgtgtctcctgatagtaacacccccacactccacctcaacagagagaatctgcattgtccatcatcagaattgagcccctaccctggtcatcactctgaattccctcctttccctgcccctccctttcatttaggtgttaaattctgtccccaggatttctctcaagacaatcatgcctcagccacgtgctttcatcctcatttacagctcttcactggcctcaagtctgggctnnnnnnnnnnnnnnnnnnnnnnnnnnnnnnnnnnnnnnnnnnnnnnnnnnnnnnnnnnnnnnnnnnnnnnnnnnnnnnnnnnnnnnnnnnnnnnnnnnnnnnnnnnnnnnnnnnnnnnnnnnnnnnnnnnnnnnnnnnnnnnnnnnnnnnnnnnnnnnnnnnnnnnnnnnnnnnnnnnnnnnnnnnnnnnnnnnnnnnnnnnnnnnnnnnnnnnnnnnnnnnnnnnnnnnnnnnnnnnnnnnnnnnnnnnnnnnnnnnnnnnnnnnnnnnnnnnnnnnnnnnnnnnnnnnnnnnnnnnnnnnnnnnnnnnnnnnnnnnnnnnnnnnnnnnnnnnnnnnnnnnnnnnnnnnnnnnnnnnnnnnnnnnnnnnnnnnnnnnnnnnnnnnntcaccttgcacttttatcaaaactgttgtattcatgactctgctcacagtctctaacaagccagtagtctgcgcactcagagaatctaagtgtggcttctcacctctttcccaggtttctcatatcctctggttccttgccgtccttctctcagcaatctcaagacccatcctaggtaatcttttcattgtcattctccccacctaccttccccaggtctgagaaggatggggcagccactggagtggatgccatctgcacccaccaccttaaccctcaaagccctggactggacagggagcagctgtactggcagctgagccagatgaccaatggcatcaaagagctgggcccctacaccctggaccggaacagtctctacgtcaatggtgagtggctgtgatgtggttgaagtctcttcctccttgctgagcagcagctaatctctaactagaggtcacacttcctgcctggcaattgaaaattctgtcacttgttttacatgggatgactaagttctggacttcatagtttctttatcaccgtagattgtgttccctcagggcattctttgctgatatgaggatgctgataggaaatcttcaaatgccccgtaccatgaaattcattcctttgcaccagggtagccttgacccctatttggttgccaatgtctccttaacccttacgcactctcctgcctccttccctatgcaggtttcacccatcggagctctgggctcaccaccagcagtgagtattcaactcatgtccacatgcccctgattctacaccaagcggaacaggagctacycctcctcataaacccataggtcytcttcttcagcaaaggagataagagggcagcagttactcaagctctgctctgccccagctccaaagactgacccatctctagccacacaggcagcggaccccatagtctcccctcttgccatttctgtcatgagagtgcttcctgctttcactgatgaggactttttctcagctccttggacttccacagttgaccttggaacctcagggactccatcccccgtccccagccccacaagtaagtaccagtcaatggcatctctnnnnnnnnnnnnnnnnnnnngccttcttccccccatatgagggtgctggtgagggatcccaaatgaccatgcttcatgaaactttcctcattgcacaagggtaaccctgacccctatttggtctgacttctcccttaacccttacccagtctcctccctccctctctctgcaggcttcacccatcggagctctgtgccaaccaccagtagtgagtattttactgatgttccagtccccccaatcctacaccaagcagkgcaggagctgaccttacctcttatccccttacatcctcttcttatgggaaaaggcttggagggcacaatttatttccttttccctgtgtcctagcttcatagagaggctcagctcaaacctcaaatgcagtggggcccataatagttttacctgctggcatttccaccatgagagggtttgctgctttcagtaatgagggcttattctcagttcctgggacctctgcagtgcacctggaaacctctgggactccagcctccctccctggccacacaggtgagcaccagtcaatggcacctctgttagatcatgcctgagcgtgccaacatctctgccactgttgactcaaataaagatgaaaagtaatggcaaatctagtgacggtaaatcaagtcacaaactttaatgcccggggatacagcagggaacagaaaagagataaaataactgcattcagagagcttatatttccatgatgatgatgattaagtgggtgttggtgatgataatggtgatgatcatgatgatgatgactgtgatgatgatgataatggtgatgctgatgatagtggtggtaatgagaaggacaagaataatggtggtagtgaggatgatggtgatgatgatgatagtagaaacaaagagaatagataatttttggcaatattgagcactgaatatgcatcaagagctatgctcagtatttacctactattgtatgctttctacaaaattctatcactttaaatgctgcatatggttttttgtttgtttgtttcgtttttttgagacagagtctcactctgtcgccaggctggagtgcagtggcgcgatctcagctcattgcaacctccacctcgtgggttcaagtgattcttgtgcctcagccccccaaatatctgggattacagacgtgccaccacacccagctcatttttgtatttttttttttaagtaaagacggggtttcatcatgttggctaggatggtcttgatctcccaacctcgtgatccacccacctcggcctcccaaagtgctgggattacaggcgtgataaattctgcacgtgtttaaaaataagtccgttgcaatatcatatttttcctacttttgaacatagtgtttacttcccactcccactgcagcccctggccctctcctggtgccattcaccctcaacttcactatcaccaacctgcagtatgaggaggacatgcgtcaccctggttccaggaagttcaacaccacggagagagtcctgcagggtctggtgagagccctaccattttgccagtcccacctacatcatctatgccagggccacaaaggatcnnnnnnnnnnnnnnnnnnnnctctgaatatacaccaagagctacgctcagcatctaactactattataaaacatcctttaaaaaataaattatgtcgggccgggtgtggtggctcacgtctataatctcagcactttgggaggccaaggtgggtagatcacgaggtcaagagatcaagactctcctggccaacatggcgaaaccccatctctactaaaaatacaaaaattagccggccgtggtggtacatgcctgtcccagctacttgggaggctgagtcaggagaatcgtttgaatccaggaggtggagattgcagtgaggtggagattgcagtgagccgagatggcaccactgcactctagcytggtgacggagcgagactccatctcaataaataaataaataaataaattctgtcatagggaagggatgcayggtaaatatttatttagtcattcaatttaaatgttgyacatgtttaaagataagtctgttgcaaactcttattttctccactttgaacatagtgtttatttccccctcccactacagctgctggccctctcctggtgccattcaccctmaacttcaccatcaccaacctgcagtatgaggaggacatgcatcgccctggatctaggaagttcaacrccacagagagggtcctgcagggtctggttagyaccctgccctcttcactctcccccgccctggatgccgagcccctcatacaacattcatgccagggcaatggaagaatatcgcaccaaccttgccctcatccccagagatgcaagcctcacccactgaggccagccactctcatgggtgtctgccccacccacctcacttttgtccccacacagggaccttagccctcmtacttacctctctctccctcccccacagcttagtcccatwttcaagaactccagtgttggccctctgtactctggctgcagactgacctctctcaggtgaggctagaacagccagcctggctgccccaattattmtcaccccaatagacttcgcacatcttcctttatacacttcctagggataccctcaccaaaggtggaattcaggagtcactagcttcaggacccagtgtgtttcctgatagtaacaaccccacacctcacctcaacggaatctgcatggtccatcatcaggrttgagctcctaccctgatcattcctctgaattccctcctttccctccatctccctttcctttaggtgttaaattctgtccccaggatttctctcaagacaatcatgcctcagccacgtgctttcatccccatttcaagatcttcactggtctcaagtctgggctcttttttctcatgccatgagatgcaagtttcacccttgcacttttatgagaattgttgtatccatgactctactcacggtcccaagcaagctggtagtctgtgcactcagagaatctaagtgtggcttctcacctctttcccasgtttctcattttctcttctcctttgctgtccttccatcagcaatctcaagacctgtcctaggtaatcttttcattgtcattcccccaacctcctttccccaggcccgagaaggatggggcagcaactggaatggatgctgtctgcctctaccaccctaatcccaaaagacctgggctggacagagagcagctgtactgggagctaagccagctgacccacaacatcactgagctgggcccctacagcctggacagggacagtctctatgtcaatggtgagcagctgtgatgtggttggaggctcttcctctctgatgggcaacctctactccctggcttgaggtcacactcactgcctggccattgaaagcttgaccatgttgtctatatttgatagttgacgtcagaacatcatggtttcttctttatgttggagactgggtctaycctcagggttttcttccctgatgtgagggtcctgatagaaaatgtccagcagccccggttccatttcaccagggtagccctgacccctattttgttatccacctctaccttaaccttactcaggttactccctctttctgtgcaggtttcacccatcagaactctgtgcccaccaccagtagtgagtattcaactgataatctcatgcccctgattctacacaaagcagagcagaagctgaccctcctccttataaatccatagctcctcttcttaagagaaggagctgggaaggcagaagtgattcatactcccttctgacccagctacaaactgatctaggtcaagccccatatgcatcaagtttcataatagtcttacgtgctggcatttctgccatgaggggacttgctgctttcactgatgagagcttcttctcagctcctgggacctccacagtgtactgggcaaccactgggactccatcctccttccccggccacacaggtgagcacccagtcaatgataccagtcgatggtgagtgtctgcatctctgtcattttcatgcaaattaagatgaaaaatcatagcagatcaaatctagtgttgctgatgcaaccaacacactttactgagcacccactctgcgccaggcccatggattatggcagggaatacaaaagagataaaaatgtcttccttcagagagcttatattcttgtgatgatgaggatgataagggtggtggtgatgatgatggtggagatggagatgatgatgatatgatggagatgactataaagatggtgatgctgctgatgatgttggtgatggtgacggtgattatggagatggtgatgaagatgatggtgataatggtgatgctggttataacaggaatgatgatgtgatggtggtgatgtgatgattgtggtgatagtggtgatgtttgagatgattgtggtgatgatgatgattgccaatgatgattgtgatgttcacaatgagaataatgaagatgatgacaatgatgatcatgatgatgattgtgttggtggttatcctggtaatgataatattatgatggtgctggtggtaatgatgctgattatgatcactgtggtggtgatggtgatgaggatggtggtaatnnnnnnnnnnnnnnnnnnnnnnnnnnnnnnnnnnnnnnnnnnnnnnnnnnnnnnnnnnnnnnnnnnnnnnnnnnnnnnnnnnnnnnnnnnnnnnnnnnnnnnnnnnnnnnnnnnnnnnnnnnnnnnnnnnnnnnnnnnnnnnnnnnnnnnnnnnnnnnnnnnnnnnnnnnnnnnnnnnnnnnnnnnnnnnnnnnnnnnnnnnnnnnnnnnnnnnnnnnnnnnnnnnnnnnnnnnnnnnnnnnnnnnnnnnnnnnnnnnnnnnnnnnnnnnnnnnnnnnnnnnnnnnnnnnnnnnnnnnnnnnnnnnnnnnnnnnnnnnnnnnnnnnnnnnnnnnnnnnnnnnnnnnnnnnnnnnnnnnnnnnnnnnnnnnnnnnnnnnnnnnnnnnnnnnnnnnnnnnnnnnnnnnnnnnnnnnnnnnnnnnnnnnnnnnnnnnnnnnnnnnnnnnnnnnnnnnnnnnnnnnnnnnnnnnnnnnnnnnnnnnnnnnnnnnnnnnnnnnnnnnnnnnnnnnnnnnnnnnnnnnnnnnnnnnnnnnnnnnnnnnnnnnnnnnnnnnnnnnnnnnnnnnnnnnnnnnnnnnnnnnnnnnnnnnnnnnnnnnnnnnnnnnnnnnnnnnnnnnnnnnnnnnnnnnnnnnnnnnnnnnnnnnnnnnnnnnnnnnnnnnnnnnnnnnnnnnnnnnnnnnnnnnnnnnnnnnnnnnnnnnnnnnnnnnnnnnnnnnnnnnnnnnnnnnnnnnnnnnnnnnnnnnnnnnnnnnnnnnnnnnnnnnnnnnnnnnnnnnnnnnnnnnnnnnnnnnnnnnnnnnnnnnnnnnnnnnnnnnnnnnnnnnnnnnnnnnnnnnnnnnnnnnnnnnnnnnnnnnnnnnnnnnnnnnnnnnnnnnnnnnnnnnnnnnnnnnnnnnnnnnnnnnnnnnnnnnnnnnnnnnnnnnnnnnnnnnnnnnnnnnnnnnnnnnnnnnnnnnnnnnnnnnnnnnnnnnnnnnnnnnnnnnnnnnnnnnnnnnnnnnnnnnnnnnnnnnnnnnnnnnnnnnnnnnnnnnnnnnnnnnnnnnnnnnnnnnnnnnnnnnnnnnnnnnnnnnnnnnnnnnnnnnnnnnnnnnnnnnnnnnnnnnnnnnnnnnnnnnnnnnnnnnnnnnnnnnnnnnnnnnnnnnnnnnnnnnnnnnnnnnnnnnnnnnnnnnnnnnnnnnnnnnnnnnnnnnnnnnnnnnnnnnnnnnnnnnnnnnnnnnnnnnnnnnnnnnnnnnnnnnnnnnnnnnnnnnnnnnnnnnnnnnnnnnnnnnnnnnnnnnnnnnnnnnnnnnnnnnnnnnnnnnnnnnnnnnnnnnnnnnnnnnnnnnnnnnnnnnnnnnnnnnnnnnnnnnnnnnnnnnnnnnnnnnnnnnnnnnnnnnnnnnnnnnnnnnnnnnnnnnnnnnnnnnnnnnnnnnnnnnnnnnnnnnnnnnnnnnnnnnnnnnnnnnnnnnnnnnnnnnnnnnnnnnnnnnnnnnnnnnnnnnnnnnnnnnnnnnnnnnnnnnnnnnnnnnnnnnnnnnnnnnnnnnnnnnnnnnnnnnnnnnnnnnnnnnnnnnnnnnnnnnnnnnnnnnnnnnnnnnnnnnnnnnnnnnnnnnnnnnnnnnnnnnnnnnnnnnnnnnnnnnnnnnnnnnnnnnnnnnnnnnnnnnnnnnnnnnnnnnnnnnnnnnnnnnnnnnnnnnnnnnnnnnnnnnnnnnnnnnnnnnnnnnnnnnnnnnnnnnnnnnnnnnnnnnnnnnnnnnnnnnnnnnnnnnnnnnnnnnnnnnnnnnnnnnnnnnnnnnnnnnnnnnnnnnnnnnnnnnnnnnnnnnnnnnnnnnnnnnnnnnnnnnnnnnnnnnnnnnnnnnnnnnnnnnnnnnnnnnnnnnnnnnnnnnnnnnnnnnnnnnnnnnnnnnnnnnnnnnnnnnnnnnnnnnnnnnnnnnnnnnnnnnnnnnnnnnnnnnnnnnnnnnnnnnnnnnnnnnnnnnnnnnnnnnnnnnnnnnnnnnnnnnnnnnnnnnnnnnnnnnnnnnnnnnnnnnnnnnnnnnnnnnnnnnnnnnnnnnnnnnnnnnnnnnnnnnnnnnnnnnnnnnnnnnnnnnnnnnnnnnnnnnnnnnnnnnnnnnnnnnnnnnnnnnnnnnnnnnnnnnnnnnnnnnnnnnnnnnnnnnnnnnnnnnnnnnnnnnnnnnnnnnnnnnnnnnnnnnnnnnnnnnnnnnnnnnnnnnnnnnnnnnnnnnnnnnnnnnnnnnnnnnnnnnnnnnnnnnnnnnnnnnnnnnnnnnnnnnnnnnnnnnnnnnnnnnnnnnnnnnnnnnnnnnnnnnnnnnnnnnnnnnnnnnnnnnnnnnnnnnnnnnnnnnnnnnnnnnnnnnnnnnnnnnnnnnnnnnnnnnnnnnnnnnnnnnnnnnnnnnnnnnnnnnnnnnnnnnnnnnnnnnnnnnnnnnnnnnnnnnnnnnnnnnnnnnnnnnnnnnnnnnnnnnnnnnnnnnnnnnnnnnnnnnnnnnnnnnnnnnnnnnnnnnnnnnnnnnnnnnnnnnnnnnnnnnnnnnnnnnnnnnnnnnnnnnnnnnnnnnnnnnnnnnnnnnnnnnnnnnnnnnnnnnnnnnnnnnnnnnnnnnnnnnnnnnnnnnnnnnnnnnnnnnnnnnnnnnnnnnnnnnnnnnnnnnnnnnnnnnnnnnnnnnnnnnnnnnnnnnnnnnnnnnnnnnnnnnnnnnnnnnnnnnnnnnnnnnnnnnnnnnnnnnnnnnnnnnnnnnnnnnnnnnnnnnnnnnnnnnnnnnnnnnnnnnnnnnnnnnnnnnnnnnnnnnnnnnnnnnnnnnnnnnnnnnnnnnnnnnnnnnnnnnnnnnnnnnnnnnnnnnnnnnnnnnnnnnnnnnnnnnnnnnnnnnnnnnnnnnnnnnnnnnnnnnnnnnnnnnnnnnnnnnnnnnnnnnnnnnnnnnnnnnnnnnnnnnnnnnnnnnnnnnnnnnnnnnnnnnnnnnnnnnnnnnnnnnnnnnnnnnnnnnnnnnnnnnnnnnnnnnnnnnnnnnnnnnnnnnnnnnnnnnnnnnnnnnnnnnnnnnnnnnnnnnnnnnnnnnnnnnnnnnnnnnnnnnnnnnnnnnnnnnnnnnnnnnnnnnnnnnnnnnnnnnnnnnnnnnnnnnnnnnnnnnnnnnnnnnnnnnnnnnnnnnnnnnnnnnnnnnnnnnnnnnnnnnnnnnnnnnnnnnnnnnnnnnnnnnnnnnnnnnnnnnnnnnnnnnnnnnnnnnnnnnnnnnnnnnnnnnnnnnnnnnnnnnnnnnnnnnnnnnnnnnnnnnnnnnnnnnnnnnnnnnnnnnnnnnnnnnnnnnnnnnnnnnnnnnnnnnnnnnnnnnnnnnnnnnnnnnnnnnnnnnnnnnnnnnnnnnnnnnnnnnnnnnnnnnnnnnnnnnnnnnnnnnnnnnnnnnnnnnnnnnnnnnnnnnnnnnnnnnnnnnnnnnnnnnnnnnnnnnnnnnnnnnnnnnnnnnnnnnnnnnnnnnnnnnnnnnnnnnnnnnnnnnnnnnnnnnnnnnnnnnnnnnnnnnnnnnnnnnnnnnnnnnnnnnnnnnnnnnnnnnnnnnnnnnnnnnnnnnnnnnnnnnnnnnnnnnnnnnnnnnnnnnnnnnnnnnnnnnnnnnnnnnnnnnnnnnnnnnnnnnnnnnnnnnnnnnnnnnnnnnnnnnnnnnnnnnnnnnnnnnnnnnnnnnnnnnnnnnnnnnnnnnnnnnnnnnnnnnnnnnnnnnnnnnnnnnnnnnnnnnnnnnnnnnnnnnnnnnnnnnnnnnnnnnnnnnnnnnnnnnnnnnnnnnnnnnnnnnnnnnnnnnnnnnnnnnnnnnnnnnnnnnnnnnnnnnnnnnnnnnnnnnnnnnnnnnnnnnnnnnnnnnnnnnnnnnnnnnnnnnnnnnnnnnnnnnnnnnnnnnnnnnnnnnnnnnnnnnnnnnnnnnnnnnnnnnnnnnnnnnnnnnnnnnnnnnnnnnnnnnnnnnnnnnnnnnnnnnnnnnnnnnnnnnnnnnnnnnnnnnnnnnnnnnnnnnnnnnnnnnnnnnnnnnnnnnnnnnnnnnnnnnnnnnnnnnnnnnnnnnnnnnnnnnnnnnnnnnnnnnnnnnnnnnnnnnnnnnnnnnnnnnnnnnnnnnnnnnnnnnnnnnnnnnnnnnnnnnnnnnnnnnnnnnnnnnnnnnnnnnnnnnnnnnnnnnnnnnnnnnnnnnnnnnnnnnnnnnnnnnnnnnnnnnnnnnnnnnnnnnnnnnnnnnnnnnnnnnnnnnnnnnnnnnnnnnnnnnnnnnnnnnnnnnnnnnnnnnnnnnnnnnnnnnnnnnnnnnnnnnnnnnnnnnnnnnnnnnnnnnnnnnnnnnnnnnnnnnnnnnnnnnnnnnnnnnnnnnnnnnnnnnnnnnnnnnnnnnnnnnnnnnnnnnnnnnnnnnnnnnnnnnnnnnnnnnnnnnnnnnnnnnnnnnnnnnnnnnnnnnnnnnnnnnnnnnnnnnnnnnnnnnnnnnnnnnnnnnnnnnnnnnnnnnnnnnnnnnnnnnnnnnnnnnnnnnnnnnnnnnnnnnnnnnnnnnnnnnnnnnnnnnnnnnnnnnnnnnnnnnnnnnnnnnnnnnnnnnnnnnnnnnnnnnnnnnnnnnnnnnnnnnnnnnnnnnnnnnnnnnnnnnnnnnnnnnnnnnnnnnnnnnnnnnnnnnnnnnnnnnnnnnnnnnnnnnnnnnnnnnnnnnnnnnnnnnnnnnnnnnnnnnnnnnnnnnnnnnnnnnnnnnnnnnnnnnnnnnnnnnnnnnnnnnnnnnnnnnnnnnnnnnnnnnnnnnnnnnnnnnnnnnnnnnnnnnnnnnnnnnnnnnnnnnnnnnnnnnnnnnnnnnnnnnnnnnnnnnnnnnnnnnnnnnnnnnnnnnnnnnnnnnnnnnnnnnnnnnnnnnnnnnnnnnnnnnnnnnnnnnnnnnnnnnnnnnnnnnnnnnnnnnnnnnnnnnnnnnnnnnnnnnnnnnnnnnnnnnnnnnnnnnnnnnnnnnnnnnnnnnnnnnnnnnnnnnnnnnnnnnnnnnnnnnnnnnnnnnnnnnnnnnnnnnnnnnnnnnnnnnnnnnnnnnnnnnnnnnnnnnnnnnnnnnnnnnnnnnnnnnnnnnnnnnnnnnnnnnnnnnnnnnnnnnnnnnnnnnnnnnnnnnnnnnnnnnnnnnnnnnnnnnnnnnnnnnnnnnnnnnnnnnnnnnnnnnnnnnnnnnnnnnnnnnnnnnnnnnnnnnnnnnnnnnnnnnnnnnnnnnnnnnnnnnnnnnnnnnnnnnnnnnnnnnnnnnnnnnnnnnnnnnnnnnnnnnnnnnnnnnnnnnnnnnnnnnnnnnnnnnnnnnnnnnnnnnnnnnnnnnnnnnnnnnnnnnnnnnnnnnnnnnnnnnnnnnnnnnnnnnnnnnnnnnnnnnnnnnnnnnnnnnnnnnnnnnnnnnnnnnnnnnnnnnnnnnnnnnnnnnnnnnnnnnnnnnnnnnnnnnnnnnnnnnnnnnnnnnnnnnnnnnnnnnnnnnnnnnnnnnnnnnnnnnnnnnnnnnnnnnnnnnnnnnnnnnnnnnnnnnnnnnnnnnnnnnnnnnnnnnnnnnnnnnnnnnnnnnnnnnnnnnnnnnnnnnnnnnnnnnnnnnnnnnnnnnnnnnnnnnnnnnnnnnnnnnnnnnnnnnnnnnnnnnnnnnnnnnnnnnnnnnnnnnnnnnnnnnnnnnnnnnnnnnnnnnnnnnnnnnnnnnnnnnnnnnnnnnnnnnnnnnnnnnnnnnnnnnnnnnnnnnnnnnnnnnnnnnnnnnnnnnnnnnnnnnnnnnnnnnnnnnnnnnnnnnnnnnnnnnnnnnnnnnnnnnnnnnnnnnnnnnnnnnnnnnnnnnnnnnnnnnnnnnnnnnnnnnnnnnnnnnnnnnnnnnnnnnnnnnnnnnnnnnnnnnnnnnnnnnnnnnnnnnnnnnnnnnnnnnnnnnnnnnnnnnnnnnnnnnnnnnnnnnnnnnnnnnnnnnnnnnnnnnnnnnnnnnnnnnnnnnnnnnnnnnnnnnnnnnnnnnnnnnnnnnnnnnnnnnnnnnnnnnnnnnnnnnnnnnnnnnnnnnnnnnnnnnnnnnnnnnnnnnnnnnnnnnnnnnnnnnnnnnnnnnnnnnnnnnnnnnnnnnnnnnnnnnnnnnnnnnnnnnnnnnnnnnnnnnnnnnnnnnnnnnnnnnnnnnnnnnnnnnnnnnnnnnnnnnnnnnnnnnnnnnnnnnnnnnnnnnnnnnnnnnnnnnnnnnnnnnnnnnnnnnnnnnnnnnnnnnnnnnnnnnnnnnnnnnnnnnnnnnnnnnnnnnnnnnnnnnnnnnnnnnnnnnnnnnnnnnnnnnnnnnnnnnnnnnnnnnnnnnnnnnnnnnnnnnnnnnnnnnnnnnnnnnnnnnnnnnnnnnnnnnnnnnnnnnnnnnnnnnnnnnnnnnnnnnnnnnnnnnnnnnnnnnnnnnnnnnnnnnnnnnnnnnnnnnnnnnnnnnnnnnnnnnnnnnnnnnnnnnnnnnnnnnnnnnnnnnnnnnnnnnnnnnnnnnnnnnnnnnnnnnnnnnnnnnnnnnnnnnnnnnnnnnnnnnnnnnnnnnnnnnnnnnnnnnnnnnnnnnnnnnnnnnnnnnnnnnnnnnnnnnnnnnnnnnnnnnnnnnnnnnnnnnnnnnnnnnnnnnnnnnnnnnnnnnnnnnnnnnnnnnnnnnnnnnnnnnnnnnnnnnnnnnnnnnnnnnnnnnnnnnnnnnnnnnnnnnnnnnnnnnnnnnnnnnnnnnnnnnnnnnnnnnnnnnnnnnnnnnnnnnnnnnnnnnnnnnnnnnnnnnnnnnnnnnnnnnnnnnnnnnnnnnnnnnnnnnnnnnnnnnnnnnnnnnnnnnnnnnnnnnnnnnnnnnnnnnnnnnnnnnnnnnnnnnnnnnnnnnnnnnnnnnnnnnnnnnnnnnnnnnnnnnnnnnnnnnnnnnnnnnnnnnnnnnnnnnnnnnnnnnnnnnnnnnnnnnnnnnnnnnnnnnnnnnnnnnnnnnnnnnnnnnnnnnnnnnnnnnnnnnnnnnnnnnnnnnnnnnnnnnnnnnnnnnnnnnnnnnnnnnnnnnnnnnnnnnnnnnnnnnnnnnnnnnnnnnnnnnnnnnnnnnnnnnnnnnnnnnnnnnnnnnnnnnnnnnnnnnnnnnnnnnnnnnnnnnnnnnnnnnnnnnnnnnnnnnnnnnnnnnnnnnnnnnnnnnnnnnnnnnnnnnnnnnnnnnnnnnnnnnnnnnnnnnnnnnnnnnnnnnnnnnnnnnnnnnnnnnnnnnnnnnnnnnnnnnnnnnnnnnnnnnnnnnnnnnnnnnnnnnnnnnnnnnnnnnnnnnnnnnnnnnnnnnnnnnnnnnnnnnnnnnnnnnnnnnnnnnnnnnnnnnnnnnnnnnnnnnnnnnnnnnnnnnnnnnnnnnnnnnnnnnnnnnnnnnnnnnnnnnnnnnnnnnnnnnnnnnnnnnnnnnnnnnnnnnnnnnnnnnnnnnnnnnnnnnnnnnnnnnnnnnnnnnnnnnnnnnnnnnnnnnnnnnnnnnnnnnnnnnnnnnnnnnnnnnnnnnnnnnnnnnnnnnnnnnnnnnnnnnnnnnnnnnnnnnnnnnnnnnnnnnnnnnnnnnnnnnnnnnnnnnnnnnnnnnnnnnnnnnnnnnnnnnnnnnnnnnnnnnnnnnnnnnnnnnnnnnnnnnnnnnnnnnnnnnnnnnnnnnnnnnnnnnnnnnnnnnnnnnnnnnnnnnnnnnnnnnnnnnnnnnnnnnnnnnnnnnnnnnnnnnnnnnnnnnnnnnnnnnnnnnnnnnnnnnnnnnnnnnnnnnnnnnnnnnnnnnnnnnnnnnnnnnnnnnnnnnnnnnnnnnnnnnnnnnnnnnnnnnnnnnnnnnnnnnnnnnnnnnnnnnnnnnnnnnnnnnnnnnnnnnnnnnnnnnnnnnnnnnnnnnnnnnnnnnnnnnnnnnnnnnnnnnnnnnnnnnnnnnnnnnnnnnnnnnnnnnnnnnnnnnnnnnnnnnnnnnnnnnnnnnnnnnnnnnnnnnnnnnnnnnnnnnnnnnnnnnnnnnnnnnnnnnnnnnnnnnnnnnnnnnnnnnnnnnnnnnnnnnnnnnnnnnnnnnnnnnnnnnnnnnnnnnnnnnnnnnnnnnnnnnnnnnnnnnnnnnnnnnnnnnnnnnnnnnnnnnnnnnnnnnnnnnnnnnnnnnnnnnnnnnnnnnnnnnnnnnnnnnnnnnnnnnnnnnnnnnnnnnnnnnnnnnnnnnnnnnnnnnnnnnnnnnnnnnnnnnnnnnnnnnnnnnnnnnnnnnnnnnnnnnnnnnnnnnnnnnnnnnnnnnnnnnnnnnnnnnnnnnnnnnnnnnnnnnnnnnnnnnnnnnnnnnnnnnnnnnnnnnnnnnnnnnnnnnnnnnnnnnnnnnnnnnnnnnnnnnnnnnnnnnnnnnnnnnnnnnnnnnnnnnnnnnnnnnnnnnnnnnnnnnnnnnnnnnnnnnnnnnnnnnnnnnnnnnnnnnnnnnnnnnnnnnnnnnnnnnnnnnnnnnnnnnnnnnnnnnnnnnnnnnnnnnnnnnnnnnnnnnnnnnnnnnnnnnnnnnnnnnnnnnnnnnnnnnnnnnnnnnnnnnnnnnnnnnnnnnnnnnnnnnnnnnnnnnnnnnnnnnnnnnnnnnnnnnnnnnnnnnnnnnnnnnnnnnnnnnnnnnnnnnnnnnnnnnnnnnnnnnnnnnnnnnnnnnnnnnnnnnnnnnnnnnnnnnnnnnnnnnnnnnnnnnnnnnnnnnnnnnnnnnnnnnnnnnnnnnnnnnnnnnnnnnnnnnnnnnnnnnnnnnnnnnnnnnnnnnnnnnnnnnnnnnnnnnnnnnnnnnnnnnnnnnnnnnnnnnnnnnnnnnnnnnnnnnnnnnnnnnnnnnnnnnnnnnnnnnnnnnnnnnnnnnnnnnnnnnnnnnnnnnnnnnnnnnnnnnnnnnnnnnnnnnnnnnnnnnnnnnnnnnnnnnnnnnnnnnnnnnnnnnnnnnnnnnnnnnnnnnnnnnnnnnnnnnnnnnnnnnnnnnnnnnnnnnnnnnnnnnnnnnnnnnnnnnnnnnnnnnnnnnnnnnnnnnnnnnnnnnnnnnnnnnnnnnnnnnnnnnnnnnnnnnnnnnnnnnnnnnnnnnnnnnnnnnnnnnnnnnnnnnnnnnnnnnnnnnnnnnnnnnnnnnnnnnnnnnnnnnnnnnnnnnnnnnnnnnnnnnnnnnnnnnnnnnnnnnnnnnnnnnnnnnnnnnnnnnnnnnnnnnnnnnnnnnnnnnnnnnnnnnnnnnnnnnnnnnnnnnnnnnnnnnnnnnnnnnnnnnnnnnnnnnnnnnnnnnnnnnnnnnnnnnnnnnnnnnnnnnnnnnnnnnnnnnnnnnnnnnnnnnnnnnnnnnnnnnnnnnnnnnnnnnnnnnnnnnnnnnnnnnnnnnnnnnnnnnnnnnnnnnnnnnnnnnnnnnnnnnnnnnnnnnnnnnnnnnnnnnnnnnnnnnnnnnnnnnnnnnnnnnnnnnnnnnnnnnnnnnnnnnnnnnnnnnnnnnnnnnnnnnnnnnnnnnnnnnnnnnnnnnnnnnnnnnnnnnnnnnnnnnnnnnnnnnnnnnnnnnnnnnnnnnnnnnnnnnnnnnnnnnnnnnnnnnnnnnnnnnnnnnnnnnnnnnnnnnnnnnnnnnnnnnnnnnnnnnnnnnnnnnnnnnnnnnnnnnnnnnnnnnnnnnnnnnnnnnnnnnnnnnnnnnnnnnnnnnnnnnnnnnnnnnnnnnnnnnnnnnnnnnnnnnnnnnnnnnnnnnnnnnnnnnnnnnnnnnnnnnnnnnnnnnnnnnnnnnnnnnnnnnnnnnnnnnnnnnnnnnnnnnnnnnnnnnnnnnnnnnnnnnnnnnnnnnnnnnnnnnnnnnnnnnnnnnnnnnnnnnnnnnnnnnnnnnnnnnnnnnnnnnnnnnnnnnnnnnnnnnnnnnnnnnnnnnnnnnnnnnnnnnnnnnnnnnnnnnnnnnnnnnnnnnnnnnnnnnnnnnnnnnnnnnnnnnnnnnnnnnnnnnnnnnnnnnnnnnnnnnnnnnnnnnnnnnnnnnnnnnnnnnnnnnnnnnnnnnnnnnnnnnnnnnnnnnnnnnnnnnnnnnnnnnnnnnnnnnnnnnnnnnnnnnnnnnnnnnnnnnnnnnnnnnnnnnnnnnnnnnnnnnnnnnnnnnnnnnnnnnnnnnnnnnnnnnnnnnnnnnnnnnnnnnnnnnnnnnnnnnnnnnnnnnnnnnnnnnnnnnnnnnnnnnnnnnnnnnnnnnnnnnnnnnnnnnnnnnnnnnnnnnnnnnnnnnnnnnnnnnnnnnnnnnnnnnnnnnnnnnnnnnnnnnnnnnnnnnnnnnnnnnnnnnnnnnnnnnnnnnnnnnnnnnnnnnnnnnnnnnnnnnnnnnnnnnnnnnnnnnnnnnnnnnnnnnnnnnnnnnnnnnnnnnnnnnnnnnnnnnnnnnnnnnnnnnnnnnnnnnnnnnnnnnnnnnnnnnnnnnnnnnnnnnnnnnnnnnnnnnnnnnnnnnnnnnnnnnnnnnnnnnnnnnnnnnnnnnnnnnnnnnnnnnnnnnnnnnnnnnnnnnnnnnnnnnnnnnnnnnnnnnnnnnnnnnnnnnnnnnnnnnnnnnnnnnnnnnnnnnnnnnnnnnnnnnnnnnnnnnnnnnnnnnnnnnnnnnnnnnnnnnnnnnnnnnnnnnnnnnnnnnnnnnnnnnnnnnnnnnnnnnnnnnnnnnnnnnnnnnnnnnnnnnnnnnnnnnnnnnnnnnnnnnnnnnnnnnnnnnnnnnnnnnnnnnnnnnnnnnnnnnnnnnnnnnnnnnnnnnnnnnnnnnnnnnnnnnnnnnnnnnnnnnnnnnnnnnnnnnnnnnnnnnnnnnnnnnnnnnnnnnnnnnnnnnnnnnnnnnnnnnnnnnnnnnnnnnnnnnnnnnnnnnnnnnnnnnnnnnnnnnnnnnnnnnnnnnnnnnnnnnnnnnnnnnnnnnnnnnnnnnnnnnnnnnnnnnnnnnnnnnnnnnnnnnnnnnnnnnnnnnnnnnnnnnnnnnnnnnnnnnnnnnnnnnnnnnnnnnnnnnnnnnnnnnnnnnnnnnnnnnnnnnnnnnnnnnnnnnnnnnnnnnnnnnnnnnnnnnnnnnnnnnnnnnnnnnnnnnnnnnnnnnnnnnnnnnnnnnnnnnnnnnnnnnnnnnnnnnnnnnnnnnnnnnnnnnnnnnnnnnnnnnnnnnnnnnnnnnnnnnnnnnnnnnnnnnnnnnnnnnnnnnnnnnnnnnnnnnnnnnnnnnnnnnnnnnnnnnnnnnnnnnnnnnnnnnnnnnnnnnnnnnnnnnnnnnnnnnnnnnnnnnnnnnnnnnnnnnnnnnnnnnnnnnnnnnnnnnnnnnnnnnnnnnnnnnnnnnnnnnnnnnnnnnnnnnnnnnnnnnnnnnnnnnnnnnnnnnnnnnnnnnnnnnnnnnnnnnnnnnnnnnnnnnnnnnnnnnnnnnnnnnnnnnnnnnnnnnnnnnnnnnnnnnnnnnnnnnnnnnnnnnnnnnnnnnnnnnnnnnnnnnnnnnnnnnnnnnnnnnnnnnnnnnnnnnnnnnnnnnnnnnnnnnnnnnnnnnnnnnnnnnnnnnnnnnnnnnnnnnnnnnnnnnnnnnnnnnnnnnnnnnnnnnnnnnnnnnnnnnnnnnnnnnnnnnnnnnnnnnnnnnnnnnnnnnnnnnnnnnnnnnnnnnnnnnnnnnnnnnnnnnnnnnnnnnnnnnnnnnnnnnnnnnnnnnnnnnnnnnnnnnnnnnnnnnnnnnnnnnnnnnnnnnnnnnnnnnnnnnnnnnnnnnnnnnnnnnnnnnnnnnnnnnnnnnnnnnnnnnnnnnnnnnnnnnnnnnnnnnnnnnnnnnnnnnnnnnnnnnnnnnnnnnnnnnnnnnnnnnnnnnnnnnnnnnnnnnnnnnnnnnnnnnnnnnnnnnnnnnnnnnnnnnnnnnnnnnnnnnnnnnnnnnnnnnnnnnnnnnnnnnnnnnnnnnnnnnnnnnnnnnnnnnnnnnnnnnnnnnnnnnnnnnnnnnnnnnnnnnnnnnnnnnnnnnnnnnnnnnnnnnnnnnnnnnnnnnnnnnnnnnnnnnnnnnnnnnnnnnnnnnnnnnnnnnnnnnnnnnnnnnnnnnnnnnnnnnnnnnnnnnnnnnnnnnnnnnnnnnnnnnnnnnnnnnnnnnnnnnnnnnnnnnnnnnnnnnnnnnnnnnnnnnnnnnnnnnnnnnnnnnnnnnnnnnnnnnnnnnnnnnnnnnnnnnnnnnnnnnnnnnnnnnnnnnnnnnnnnnnnnnnnnnnnnnnnnnnnnnnnnnnnnnnnnnnnnnnnnnnnnnnnnnnnnnnnnnnnnnnnnnnnnnnnnnnnnnnnnnnnnnnnnnnnnnnnnnnnnnnnnnnnnnnnnnnnnnnnnnnnnnnnnnnnnnnnnnnnnnnnnnnnnnnnnnnnnnnnnnnnnnnnnnnnnnnnnnnnnnnnnnnnnnnnnnnnnnnnnnnnnnnnnnnnnnnnnnnnnnnnnnnnnnnnnnnnnnnnnnnnnnnnnnnnnnnnnnnnnnnnnnnnnnnnnnnnnnnnnnnnnnnnnnnnnnnnnnnnnnnnnnnnnnnnnnnnnnnnnnnnnnnnnnnnnnnnnnnnnnnnnnnnnnnnnnnnnnnnnnnnnnnnnnnnnnnnnnnnnnnnnnnnnnnnnnnnnnnnnnnnnnnnnnnnnnnnnnnnnnnnnnnnnnnnnnnnnnnnnnnnnnnnnnnnnnnnnnnnnnnnnnnnnnnnnnnnnnnnnnnnnnnnnnnnnnnnnnnnnnnnnnnnnnnnnnnnnnnnnnnnnnnnnnnnnnnnnnnnnnnnnnnnnnnnnnnnnnnnnnnnnnnnnnnnnnnnnnnnnnnnnnnnnnnnnnnnnnnnnnnnnnnnnnnnnnnnnnnnnnnnnnnnnnnnnnnnnnnnnnnnnnnnnnnnnnnnnnnnnnnnnnnnnnnnnnnnnnnnnnnnnnnnnnnnnnnnnnnnnnnnnnnnnnnnnnnnnnnnnnnnnnnnnnnnnnnnnnnnnnnnnnnnnnnnnnnnnnnnnnnnnnnnnnnnnnnnnnnnnnnnnnnnnnnnnnnnnnnnnnnnnnnnnnnnnnnnnnnnnnnnnnnnnnnnnnnnnnnnnnnnnnnnnnnnnnnnnnnnnnnnnnnnnnnnnnnnnnnnnnnnnnnnnnnnnnnnnnnnnnnnnnnnnnnnnnnnnnnnnnnnnnnnnnnnnnnnnnnnnnnnnnnnnnnnnnnnnnnnnnnnnnnnnnnnnnnnnnnnnnnnnnnnnnnnnnnnnnnnnnnnnnnnnnnnnnnnnnnnnnnnnnnnnnnnnnnnnnnnnnnnnnnnnnnnnnnnnnnnnnnnnnnnnnnnnnnnnnnnnnnnnnnnnnnnnnnnnnnnnnnnnnnnnnnnnnnnnnnnnnnnnnnnnnnnnnnnnnnnnnnnnnnnnnnnnnnnnnnnnnnnnnnnnnnnnnnnnnnnnnnnnnnnnnnnnnnnngtgcatgccccatgcccagctaatttttatatttttagtagagatggagcttcaccatattggtcaaactgatctcgaactcctgacctcgtgatctgtctgccttggccccccaaagtgctgggattacaggcgtgagccaccgcacctggcctacaactccaccattttcactcaaataaaaatgaaaagtcctagtgaatctagtgatgacaagtcaaccgacaaattttgttgagcgtctggcttcttcggggccctagggataaggcagggaacacaaaagaaataaaaatctctatcctcaggaaggttatattgttgtgatgatgataatgatagggatgatggacatgatgacaacaatgatggtgttgctgatgatggtgatgatgatgatgatggtggtggtagtggttttgatggtgatgatgatgatagtggtggtgatgattatgggaaggatgatagtggtggtggtgatgtgatggttctgatggcaattgacaatgtgatcatgatgttgacaatgaggataatgatggtggtgatgatgataatgatgttggtggtgatggtggttatgatagtaagaatgatataatggtgttagtgaccatgtgctagtggtgattatatggatgatgatggttgtggtgctggtggtgtaatgatgatgatgggtggggatcatagggaytatgatggtcatggttttggtgctgatgctggtggtgatgacaataatgatagcgatgktcacagtgttgctgatgttgatgatgatcgtggtgttggcaaaggtagtagataatgtctagtagtatggaatactgaatatgcaccaagagctrtgcttagcatctaactactattatttagtatgctctatgagaactatgtaccattacagtgaagggaggcgtgaaaaccttttattttgtcactttaaatcatgttgcatatgtttagaaacaattctatcacaaattcttaagtgttagtctacttttgaacactgtttatttcccatcttcactatagccgccagccctctcctggtgctattcacaattaacttcaccatcactaacctgcggtatgaggagaacatgcatcaccctggctctagaaagtttaacaccacggagagagtccttcagggtctggtaagagccccacatacctcattctaccccactcaccatgtttagtcctgcccacctcacctattgcagagcatggaagatctcatctacctcatcttgcccccagatatgcatascccaaccactgatgccagccccaccaactgttgccagccctgcccacctcccttctaccacacccctatgacttcagtcctcccactcacctccctctccctcctccacagctcaggcctgtgttcaagaacaccagtgttggccctctgtactctggctgcagactgaccttgctcaggtgagaactgagaacagccagtctgactgatctgagcagtttgacctgcttcccttctgcactccctggagatgtccgcagccaggtggaatccaggaggcagtggctctaagaccaatgtgcttcctgttcccaccacctcccacctcaamtgagagatgcagagcccatcagcaggactgagcttctaccttggtcatccctctgaattccctcctttcccctacctgcctttccacaagtggttcaattctgttcccaggatttctcccaagaaaaacatgcctcgtccacttgctttcatccccaaacctagctcttcacctgtctcaagtatgagttctccttaccccatgctacaagaatgcagtttccactttgcaattttataaaaatccttgcatccatgattctgctcatagttgctaagagtcagtgcactcagagaatggaagtatggcttctcacttckctaccaggcttctcatttcctctggccccctcctgtcctgccctgtgggatctcagaacccctccctaggcaatccgtgtattgtctttccccaatcttgccctccccaggcccaagaaggatggggcagccaccaaagtggatgccatctgcacctaccgccctgatcccaaaagccctggactggacagagagcagctatactgggagctgagccagctracccacagcatcactgagctgggcccctacaccctggacagggacagtctctatgtcaatggtgagtagttgtgatgtggttggagtctcttcctccttgctgggcagcctctactctctgccttgaggtcacgctccctgyctggctattgaatgctcatccatgttgtctgtatgtgatggctgaggttggaacttcatggtttctatttcatcttggactgagttcatcctcaggatctgctttctggatctgagggtgctgatagagaatcttcaatggttcgtgttctgggaaattccttccattgcaccagggtaccctgacccctatatagttccccaccactcccttaacccttacccaccctcttccctccctctctatgcaggtttcacacagcggagctctgtgcccaccactagcagtgagtatccactgatttccagtgctcctgatcctacatcatgcagggcaagaactgacccctcctcacatgcccctatgtcctctatgagcaaaggagctgggacagcacaagttactccctttcccttctggcccaagtctcttcagagagagacccagctcaagccccacatgcagcaaggtccataaatactcctacctgctggcatttctgccatgagagggttcaacactttcactaatgaggccttctcctcagttcctgggacccccacagtggacctgggaacatctgggactccagtttctaaacctggtccctcgggtaagtacaaatcaatcgcatctctgttagagcatgcctgatgactgtcaacatctctgccattttcacttaaataaagataaaaaatcctagtgaatctacggatgaggagtcatccagcaaacttaattgagtgcctagtttctgcagggctctagggataaggaaggggacacaaaacagttaaaaatatctgctgcaagaaagcttattttattgtgagggtgatgggagttggtggtggtgaagttactggagatgatgacaataagaatggtgatgctagtgatgatgatggtgataaggatgataattatgaagatggtggtggtgatgatgatgatggtnnnnnnnnnnnnnnnnnnnnatgattatgctggtggtaatcatggtaagaatgatggtggtggtggggattacaattgacaataattatggggattttgacaataatgataataataatgatgatgatgacggttgtgttgattgtggtgatgatgttggagtgatgatgataacaatggtgatgatgatggtaaagattatgatggttgtttggatgatgacagtaatgttgctggttatgatgctaatgatgatgtgattatggtgatgatgatgatgtttgtggtggtgttgatgtggattgtgacattcgtgatggtgaggatgacaatagtgatggcgatagtgattatgatgacaatgatcgtgatgatgattattcagataatgacagtgatgatgattatgatggtaatgatgatatgactatggtgataatgatgtttgtggtagtattgatggggattatcgttgtggtgatggtcttggtgctgatgctgacaatrrtgrtgatgatgatgatgatgatgataatggtgatgacaaaggtaacaggtaatatctgatatttttcagcactgaatatgcaccaaaagctgggctcagaatctaacaaatattatgtaatatgctttttaaaaaaataatttctatcaagaagggcatggaaacctttaattttgtcattcattttaaattctgttgcatatgattaaaaataaacttattgcaaactcttcaagtctattgcaaaagtcgagaaacttgaggagtttgcaatagacttatttttaactatatgmaacagattaaaaatacaaacaaacacaatagtgtttgtttccmcaccttttactacagccactggccctgtcctgctgccattcaccctcaattttaccatcaytaacctgcagtatgaggaggacatgcrtcgccctggctccaggaagttcaacaccacggagagggtccttcagggtctggtgagacccctgtccaacttactctgcccctcccacgttacctggtcccaacaacatcacccatgccagggccatggaagaaaatctcatccatctcccctagagacacaagccctgcccactggtgccagctgcactcgccacacttgtgccccaccactatatccccagccctcctagtcacctccctctccctcttccacagcttatgcccttgttcaagaacaccagtgtcagctctctgtactctggttgcagactgaccttgctcaggtgagactttagaagagctagcctagctgccccaattgttcctagtcgcaaagagtttggattgttttttttttcctgccatccctgtgaatgtcctcacaacagatggaattcgggaagcattggcttcaaaactaatctgtctcctgataccatcagcaccaccccaatcaactgcgagattctgcagagtccatgaggagaattgtgcttctaccttggtcatccctctgaattccctcctttccacccacctccctttcctccagttgttaaattctgtccccaggatttctcacaagacaagcatgcctcatccacttgctttcatccccaattccagctcttcatctgtctcatgtctgagtactcttgtctccaygccatgagaatgcaggctttactttgcaattttataaaaagttcttgcatctatgactctgttcacagtcctgggctggctggcagccgggacactcagagaatctaaatgtgacttattacctctttcccaggcttctcatttcctctggccccttcctgtctggccccaggaaatctcagaactcctcctgaggcaatttttaaattgttatttgcttcatctgccctccctaggcctgagaaggatggggcagccaccagagtggatgctgtctgcacccatcgtcctgaccccaaaagccctggactggacagagagcggctgtactggaagctgagccagctgacccacggcatcactgagctgggcccctacaccctggacaggcacagtctctatgtcaatggtgagcaactttgatgtggttggagtctcttcctccttgctggacagcctctattctctgrcctgaggtcacacttcccgtctggctattgaaggctcaaccatgttgtctgtatgtggtggctaaggtcaaaacttcgtggtttcttcttcatctcaaactgaatttaccctcaggatctgctttctaaatctgagggtgctgatagagaatcttcaatggcccgtgttctgggaaattccttctgttgcaccagggtaccccaccactcccttaacacttacccactctcgtccctccatctcaatgcaggtttcacccatcagagctctatgacgaccaccagaagtgagtattaactgatgttccagtgctcctgatcctacaycataaagggcaggagcttacctctccttctatgcccctatatcctcttcatgagggaaggaagagagagcacaagttattcccctttccctctggcccagctccagatggagatactgccccacatkcagcaagggccataaatactcctacctgctggtgtttctgccatgagagggtttgctgctttcactaatacagcaaaccttctcctcagctcctgatacctccacaatgcacctggcaacctcgagaactccagcctccctgtctggaccyaygagtgagtacyattcagtgtcatctctattacagcatgcctgaggagtgtcaacatctctgccattttcttttctttcttttttttcttttttgagacatagtcttgctctgtcacccaggctagaatgcaatggcgtgatctcagcccactgcaacctctgcctcctaggttcaagcgattctcctgcctccrcctcctgagtagctgggattacaggtgcatgccaccatgcccagctaatttttatatttttagtagaggtggagcttcaccatattggtcaaactgatctcgaactcctgacctcgtgatctgtctgccttggccccccaaagtgctgggattacaggcgtgagccaccgcacctggcctacaactnnnnnnnnnnnnnnnnnnnnagaattcagtcgacctaccggctttgatgattgctcagttgaacttagaaatgcactgtctgcccaatggtccagtctcatgagtgtgactcttttctgcctctcttgggtatctgatcaagatggactcaggaaaagtgctccagataactgtctccaatataacactgcccctgccatcacacccaaatgactggaagtttcacagggtcatcagcagggattggacttccaccccggccatccctctgaattttccctcttttctccccacctcccttgcccttaggtgttaaattctctaactaagatttctctcaagacaaatgtgcctcattcacttgtttaattcccaattccagcttgtcacctgtctcaagtctaggctgtcctgtccccatgccatgagaatgcaagaaccacactgaaatgtkagaaaaattcttttatccacaagtatgctcaccgtcccaagctggacagtagtcagtgcactcagagaatctaagtgtggcttctcatctgtgtaccaggcttctcatttcctgtggscccttcttgtccttccctcmgcaatcttgggactcctccctagacaaaactttattattattcccctcacctgccctctccaggcctgaaaaggatgggacagccactggagtggatgccatctgcacccaccacccctgaccccaaaagccctaggctggacagagagcagctgtattgggagctgagccagctgacccacaatatcactgagctgggcccctatgccctggacaacgacagcctctttgtcaatggtgagcaattgtgatgtggttggagtttcttcttccttgctgagcaggcctctactctctgtcttgaggtcactctccctgcctggccactggtcttggccatgttgtctgtatttgatgattgatatgaacttcaccgtttcttcttcatcttgtactggagaccttcatcctcaggaccttcttccctgatctgagtgtacttgtatagaatcctcaaagcccatgttccctgaaactccttcaattgcaccatggtagcactgaccccttttggtcccccacctttcccttaaccctttcccactctcctccctccctctctatgcaggtttcactcatcggagctctgtgtccaccaccagcagtgagtattctactaatgttccagtaaccccagtcctactccaagcaggacaggagctgacccccttctcctatgcccctatatcttcttcatgagggaargatctgagagggcacaagtgattccctttccctctggcccagctccagagagacactaatctcaagccccacatgcagaaatattcctatctgctggcatttctgccatgaaagagcttatgctgctttaaccaatgcgggcttctcctcagctcctgggacccccacagtgtatctgggagcatctaagactccagcctcgatatttggcccttcaggtaagtaccagtcaatggcacctctattagagtatgcatgatgagtgtcaacatctctgtccttttcactcaaataagattaaaaatcatagcaaattgtacgtgatgatgagtcacccaacaaacttctttgagtacccactctctgccaggccctagagataaggcagggaacacaaaagaggtaaaaatctctgccctcagagagcttcttttattttgaggatgatgtgggatagtggtgatgatgatgttgctggagatgattacaataatgatggtgatgcttatgaccatgatgtgatgatgatggtgattatgaagatgatgatgatgatattgatgatggtagtggttttgacagtaatgatgatgtgatgatgatgatgatagtggtggtggtgattatgggaaggatgacagtggtggtggtgatggtggtggttgtggtggtgattgacaatgtggtggtgatattgacaatgaggatgatgatgatagtggtggtggttatgatggttaaggatgatgtgatgatrgtgttggtgatcacggtactagtggtggtgatgtggaccgtcatggtkgtggttgtggtggtgatggtggtgatcatgatgataatgaggatgatggtggtgattgtcatgatggtaaggatgaaacagtgatggtgttggtgaccatgttcctggtggtgatggtgcaggtgatgatgtggatgatgatggtgatggtggtggagatgatagggattatgaatatggttcgggtctctgactggtggtggtgatgacaataatgaaaatgatggtcacagtgttggtgatgatgatggtggtgataacaaargtaatagatagtgtctagtattatggaacacagaacatcaccaaaggttatgctcagcatctaactattattatttagcatgctctatgaaaaactttgatcgttatagtcaagggaggcatgaaaaccttctattttatcactctctttaaatctggttgcatatgtttagaaataaatctattacaaactcttaaatgttctctacttttgaacatagtgtttatttcccacctccactacagctgccagccatctcctgatactattcaccctcaacttcaccatcactaacctgcggtatgaggagaacatgtggcctggctccaggaagttcaacactacagagagggtccttcagggcctggtgagagccctgcccacctcactctgccctgcccaccttgtctygttccacctacgtcacccattccaaggcatggaagaagatctcacccacctcccctcacctgagagatagccccgccccctgattacwgccccttccaccttacatcttcctcacttctatgtcctcagccatcttactcacctccctcttcctcctccacagctaaggcccttgttcaagaacaccagtgttggccctctgtactctggctgcaggctgaccttgctcaggtgagaactgagaataaccagtstggctrccccaagtgttcccaggcccaaggagtttcatcagctttcttccttccctccctatggaagtcctcagcacaagtggaattcaggcgttggtggctccaggatgaacatatctgctgatcctaccacctcccccatcaatcgagagaatttgcagggcccatcagccagatcaggcttctactttggtcatccttctgaatttcttacttctccctacctccctctccttcaggtgttaaattctcttccaaggtttctctcaagataaacatcccccatccacttgctttcatccccaattccagctcttaatatttctcaagtctgggctctcctgtccccataccatgagaatgcaattttataaaattcttgtattcctgactctactcacattcccaggctgcctggaagttggtgcattcagagaatcttagtatggcttctcacctgtctaccaggattctcatttcctctgtccccttcctgtcctgcccccaggaatctcaggatgcctccccayaggcaatctatttaatgtcatcccccttatctgccctccctaggccagagaaagatggggaagccaccggagtggatgccatctgcacccaccgccctgaccccacaggccctgggctggacagagagcagctgtatttggagctgagccagctgacccacagcatcactgagctgggcccctacacactggacagggacagtctctatgtcaatggtgagyggctgtgatgtggttggagattcttcctctttgctggacagcttcttactctctgacttgaggtcacactccctgactggccattgacgtcttggctatgttgtctgtatgtgatgactgatgtctgaacttcatagtttcttcatcttggactgagytcatcctcagtaccttcttccctgatctgagggtactgatagagaatcttcaaaggcccctgttccttgaaacttcttccattccactagggtatctgtgacccctatttgattccccacctctcccttaacccttacccactctcctycctccttctctgtgcaggtttcacccatcggagctctgtacycaccaccagsagtgagtattcaaccgatgctccagtagccccaattatacaccaagcagggcaggagctgtcctgtcttcctatgcccctatgtcctcttcataaaggaaggggctgggagggcacaagttattccctttcccttctggccagctccagagagagacccagctcaggcccgatatgcagcaaggcctgtaaatagttttatttgctgacctttctgccatgagaggcttggatgcttcccctgaagagggtttctctgtagctcttgggactaccacagtggacctgggaaactctggggatccaccccttctactggtcccttgaataagtaccagccaatggcacctctgttagagcatggctgatgagtgtaaacatctcttccattattcagtcaaataaagatggaaattctttataaatctagtgatgatgagccaaccaacaaactttattgagcattgtgacaagccctggggctctgccaaatcctggggatatggcatggatcatgaaacaattaataatctctcctctcagagagctatttttatgatgatactgatggtggcaatgatgatgatgwtgatggtgattatgaccatgatgacaatggtgatggtggtggtgatgatggtaatgatgatgatggtgatgttggtaatgatggtggtgattatgacaataatgatggtgatggtgacagggatggtgatgattatgatggtggtggtgataacaaagttaatggataatatatgaacttattggctactgaatatgcaccaaagtgctatgctcagtgtttaactagtactatttaatatgatttctaaaaaaaatcttgaattattataggcagaagaatcatgggaaccttttattttgtcactcactttaagtcctattgcatattttttaagtcaattgcaaacacagtttctctgctttgaacattgtgtttatatccagtcaccccaatagtgcataaacctgctgattggagcaactgtgtcttactcccttgtgcttccctagtatctgcttcaggaccttgtacatggtagatcgacagatttagatctacaggaaaatatggattttcccagggaaggaaggaatgaagtatgctttcttataatgtatggaaactttcctcttctgccttggttcaactttagtgtctgccagagtttacactggaaaactatatggcatctgctccactccctcatccatgacagacatcattaattgattgcagcattcatggcagacatcaccaattgataatagcattcattttctctcagttcaaaacagcttcagaatggttaccaaaaaaaaaaaattcagtcgctaccaattcaattggagctgactcaggattatgggacagaattcaagagagttaggttccttgatgatgtgtagttggctctttggttttcctagaaggctcagctcaggctcagcttggtcattgctgatatcctttcttccacttggtcgatttggctgttgatacttatgtatgcttcacgaagtttttgtgctgtgtttttcagctccatcggttggtttatgttcctctctaaactggttattctagttagcaattcctttaacctttcatcaaggtgcttagctttgcattgcattagaacatgctcctttagctcatcgtacttttttattgcccatcttctgaagcctacttctgtcaattcatccatctgatcctccatccagttctgcacccttaatggagagatgttgcggtcatttggaggaaaagaggcactytggccttttgggttttcagcatttttttgttgattatttcccatcttcaggagttttagtttcaggctttgaggctgctgatccttggatggggtttttatgggggtcttttggttgttgttgttgatgatgatgatgttattgtcactttctgcttgtttttctttcaatagtcaggtccctcttctgtagggctgctgcagtttgctaggggttcacttcaggccctattcatctgattcgctcccatgtctggaggtgtcactcaaggaggcttggagagcagcgaacataggtgcctgcttcttctgggacctctgacctcgagggacaccaacctgatgccagtaggatcgctcctgtgtagggtgtctgacaactattgttggagggtttcgcccagttgactggcatggagagcaggacccatttaatgaagcactttgtcccctggtggagagggggttcttcactggggggaaaccacatgtctgggctgcttggattcctcagaactaccagaggagaggctaagtctgctggtccacagagactacagccatccctcccactaggggcccaagcccagggagtccaaattctgtctctgagcctctggctggagtctttggagatcctgcaaggaagctctgcccactgaggaaggatgggtcagggttagccctgaagaggcactctggctgcagactgccacagccggtgtgttgggctgtggggacaagtcttgggaccaagccgtccagcctacccggctctagcaggggaaaagyacagcctggagctattgaaaggggtgccgcccttcccccgcccagggagcttagcgtgttaggcagttgtgagtccagtgctggctgtcgccccttccccaaggaacaaaaaagacttagcaggcagccgcagccagtgctggtcgcccctcccccggggagttccgtaggcttaggcagattccagctgtaagaatctgcgtgttctggggttgggacactaggtcccagtggcatgggttcgcgagtgagatcttccaatctgtgagttgcacagttccgtggaaaaagcacagtttccccctcttgggtagcccgctcactcaccacctcccttggctggaaggagggggttccccttccccgtgtgtctctcaggtgggccaccacaccacactgctcttccttctctcygtgggtcactgccagccttctagtcaattttgatgagggaacctggacattttggttgccaggaaggatcacacacttattacagtttttttcaatgtgagcctctgagcgctgctgcttatagtcgaccatcttggcccccagagtcacacatctgttattttttgatgttttgattgtggcaattcttgcagaagtaaggtggtatcaccttatggttttgatttccctggtcattagtgatgttgaacatttttttcatatgttcattagccatttgtatatattctttcaacaactrtctatttatgtccttagcccactttttgatgggattgtttttttcttgccaatttgtttgagttcgttgtagattctagatattagtcctttgttggatatatagattgtgaagattttctcccactctgtgggttgtctgtttactctactgactgtgaaggaaaagtcaatttcttatacgaatttgtctcactcctacttccaaatgagatcctggggttttttttttctgttaatccttcacaatacttctcccacttttttgaactcatttgtttatattctgttgtctgcttctcttttataggaatgtgacttcttatgggctttctctattataccacatrtgggtttttgttttgttttgttttgtttttgtcctcggatccattctccaacctcctccarccttcccgtgctctgtgggatagacgtctgactcatgaaaactacatttcccaggctcccatgctaactagcttcctgttaggttcagccaataggaggcattggtgggacaatggtgggcggggctatggaagggccagagtatttctgtaccccgcccccctgctccccttycaatrttcctggagcggtgtaggaccaatactgtatatatggaaggaaggcaaggtggatagatggaaggaagaagtgacagatggaaagaagaagtgataaatgraaggaggaagggagagaggatggatgagtggattgaagaaagaaaaaaatggatgaaagaaaaaaggaggaggaaagatggataagtagatggaaggaagaaaagagaggtgtaagaaaggaaagattgatgatggatggatgratggatcagtgggtgagtgggtgaagggatgaatggatggatggacagatggatgaacagatgggtgggtggatagatggatggatggataaatgggtaggtggatggatggatggatggacagatgggtgggtaggtggatggatggatagatggatggataagtgaatggatggatggatggatggatggataaatggatggatgggtgaaaggaaggaaagaagtgagagaaggaagaggaaggatagacagatgttagaaggtacaaatgaaaggaaggaagccagcaagaaagaaaggatgcattaatagaatgaaagatggaagggaagaagaaaggatggaaagagagaaggaagaatgaacagaaggaagttcaagagtggtgaaaagaagaaaggcagggagagaaggagaagtaaayttttcttctagagatttgtcttaaaccttagcttggctggacactgtggttcacgcctgtaatcccagcactttgggaggccgaggcgggtggatcatgaggtcaggagatcaagaccatcctggctaacacggtgaaaccctgtctctactaaaaatacaaaaaaaatttagtcaggtgtggtggtgcaygcctgtggtcccagctactcaggaggctgaggcaggagaatggcataaaacctgggaggcagagcttgcagtgagccaagatcacaccactgcactctagcctgggcgacaaagtgagactctgtctcaaacaaaaacaaaacaaaaaaacaaaaacaaaaaacaaaaccaaaccaaaacaaaaaaaaaaaccttaactcatactttcataaagttccacacacagggagtgattagaaagcatttgctgatatattttatataataaacatgtacaccatattgacctgtgtgcccagcagtgcttacatgatttacaatgattaacttgtttaagcttcataacaacggttgaggcaggaaacatcattgtgaaccattgtcatctcattttacagatgagtaaactgaagtgctgagaggttggttatggctgcaaagattgttggccatgttaaccaatgcatagaagattagcatacctggttgtgagtgcaggagagagagagaaatgggagaaaggcagagaaggatcgatggggagagaggaagagagagagagagaataaattttttaaaaatgtctagagtcatgacttccgcatcagtgtggtaatatgcagcctttaccctgggaaagatcagaaccattggtactttttacagaatcttcccttcctgcatttgggtagaaggaccccatctggacatcccaaatcattaagcacacccttactggctgctggagttgtctccattaaaagtcaccgttgggtttattaagaggcggacacagggtccttagaacacactgcccccaccctgtcccacaccaccccccacccacccatcatcctccccaagagcttcatctctctctctcttccccctgccctagccggggtggtcagcgaggagccattcacactgaacttcaccatcaacaacctgcgctacatggcggacatgggccaacccggctccctcaagttcaacatcacagacaacgtcatgmagcacctggtgagaggcctgcctcccgctgcagccctgccatgcccatcctagggctgttgcctgcctgcctctgaccaacccargctcccttctccctctgcagctcagtcctttgttccagaggagcagcctgggtgcacggtacacaggctgcagggtcatcgcactaaggtgagaaactcccccacccacagcgcaccaccaagaacttagagttctgactgggaggtccctcttgggttggggtgggctacatatttttttaaatctttttatctttcctttttttttttttgagatgaagtttcgctctcgttgcccaggctagagtgcaatggcacgatcttggctcactgcaacctctgcctcccgggttcaagtgattatcctgcctcagcctccccagtagctgkgattacaggcaggcaccaccatgcctggctaattgttttgtatttttagtagagatggggtgtctccatgttgatcaggctggtcttgaactcctgacttcaggtgatccaccctcctcagcctcccaaagtgctgggattacaggcgtgagccaccayatctggccccattcttttttttwaaatgaatttaaggagtgcaaatgcagtttttgttacatgcatatattccatagtgaagtctgcagacagtagacttccagacagtagcttytggtgtatcacccgaatagtgtacattgtacttattaagtgaggttccccacccttctcccactctcccacctttctgagtatccagtgtctattattccacactccaggtccatgctctcacgtataagtgagaacgtatggtattccaccatgagctaatggacatggagtccattggctcccacttataagtgagagcatgcggtatttgactatttctgagtttcacttaagataatggactcccattccatccatgttgctgcaaaatacatgatttcactctttttatggctgaatagtatttcgtggtatatatatataccacattttctttatccagtcttctactgatggacacttaggttgggtccatacctttgctgtgaatagtgctgcaataaacatacacgtgcaggtgtcttttttatataatgatttctttttttctttctttttttttgatataacgatttcttttattgggtagatccccaatagtgggattgctgggtcaaatggtagttctacatttttgttctttgagaaatcctcataccattttccatmgattgtactaatttggattcccaccaacagtgtataagagttcccttttcttttattcttgccagcatctgkttgtttgttgtttgtttggttggttgkttggtttttgtctttttagtaatagttattctgactggtattaataacttttttatttattcatgacagtttgatttttgacatataaaaattgcttgcatttaaagtgtacaacttgatattttggtatacattgttaaatcatggccacatttcagctaattaatatatctattatctctacatagttatcatgtttgtaccctttgaccagsatcaccccatttgctcctcctcccagcccctggcaaccaccatcctactctctgcttctatgagtctgacaattttagattccacctataagttagattatgcggtatttgtctttctgtgcctggcttatttcacttagcctaatgtcctccagctccatctatgttatcccaagtggcaggattttcatctttcttatatatttcattgtatatgtgtatgccacattttctttacccattcatccattgaaggtcatttagcttgtttccatatcttggctattttgaatagtgctrcaatgaacataggagtgcagatatctctttaagatactggtttcatttctttctttcttctcttttttttttttctgagacagagtctgactctgtcgctcaagctggagtacagtggtgcaatcttggctcactgcaaactctgcctcctgagttcaagcgattctcgtgcctcaacctcccagggagttttgctcttgctgcccaggctgaagtgcagtggtgcaatcttcactcaccacaacctgtgcctcccgggttcaagcgattctcgtgcctcagcctcccaggtagcaaggattacaggcgcccaacaccacaccaggctaaatttttttgcatttttagtagagacggggttttgccatgttggccaggctggtctcaaattcctggcctcaagtgatccacctgcctcagcctcctgaagtgctgggattttacaggcatgaaccaccacacatggcctcatttcttttagatatatwwgggttgagctattctcagagggtccttttctgcatctatttaagatcacattttttttatattgtggcaaaaatacatgtaacataaaatctgccattttaaccatttttaaatgtacaattcagtgacattgattatattcacaatgtcatacagccatcaccactatttatttctaatacttttccattgggtagatccccaacagtgggattgctgggtcaaatggtagttctgattttttttttttgttttttgagaaatctccatactgtttttcatttgaggttgtactaatttacattcccaccaacagtgtataagagtttcctaggccaggcacggtggcttatgcctgtaatcccagcactttgcgaggcccaggtgggtggatcatgaggtcaggagatcgagaccaccctggctaacatggtgaaaccccgtctctactaaaaatgcaaaaaattagccgggcgtggtggcgggtgcctgtaatcccagctactggagaggctgaggcaggagaatggcatgaaccctgaaggcggggcttgcagtgagccgagatcgcaccactgcacacttcaacctaggcgacagagcgagactccatctcaaaaaaaaaaaaaaaaaaaaggtttcctttcagtgcatccttgccaacttgagttttctgggttggtttgcactctcatggtatttactagatacttctccatttatatttttactcaacccatgcccataacaccactcctctaccattcccaccaaccatgtataagagttccttttcttgcatccttgccaacttgacttctttgggtcagtttgcactctcttgstatttactatttacttctccatttatatttttagtcaactgatgcccatggcaccgctcctctgaggcaggtgctgggtactagagtgataagacagatgctgtccctgccctcacccagtggagaagaacagatgctaaacaggaacataaatatctaagtaaaatggcttcaaatggagtaaagtgatatgaaacataaataaatagcaagtgatgggtagagcaactttacccaggatgaatcttgggctgtgtcccaaatggccatgaaaactgttccaggcagggagaacagcatgagaaaaggtcttgaggtgcaaatgagcttggcatgttctatgaacagcaaagaggccagtgtggctggagcagagagagagcaagaagaaaagagagaaaggatgagactcaagacatcagcaagtttgaagggccttggaggacttggatttttttttttaagacagctttgttcttgttgcccaggcatgatctcggctcaccacaacctccgcctcctgggttcaaacgattcctctgcctcagcctcccgagtagctggggttacaggcatgtgccaccacacctggctaattttgtatttttagtagaaatggggcttctccatgttggtcaggctggtctcgaactcccgacctcaggtgatccgaccgcctcggcctcccaaagtgctgggattataggtgtgagccactgcacctggcttggattttttttttctatattgtggtaacatacacatcacattaaattgaycattttagctatatttcccgttcagtggcatcaagcacattcacattattgtgcaaccatcaccactatcatccatctccagaactttctcatcttcccaaactgaaactccatccccatgaaacactcattcctcatccccctcctcaagcctctggcacccaccattctactttctgtctctgtgaatctgatgattctgaggacctcctatgaatggaggaatcatatggtatatgtcctggtttatactgtatggctggcttatttcaccaagcataatgtcctcaaagttcatccatgttgtagcatgtgtcagaattcccttccttttccacttgtatgtaaatgctgtattgtgtttctccattcattaggactttgatttttgcagggagttgtcaaggggtgctgggttctggggcttcaatataataagagtaagctaaactggttcatttcctccttcgtggagaccatgttctggtaggaacaggaacaaataatttatgattacatagagggtgaccagggcagtgacaggggaagagtggaggattgtgggacccagaggaggctcctgaccttgcctaggaagataggaggaggaagaggaggaggaagaggaggaggaagaggaggaggaggaggaggagggagtcctctaagctgagacctggaggatgaccaggaagttatccaggtaaggagaaatggggagaagcttccagacaaaagtaacagcaattgcaaagatcctgagatgatagataaggtcaggtggagaaagtgcaaactgtcaatgagaccaaaatatggactgtgagttgtgcagtgaccacaagtggagaggtgctaggtggccttcatcccccaaagctgcacctctccctcctcaggtctgtgaagaacggtgctgagacacgggtggacctcctctgcacctacctgcagcccytcagcggcccaggtctgcctatcaagcaggtgttccatgagctgagccagcagacccatggcatcacccggctgggcccctactctctggacaaagacagcctctaccttaacggtgagcagctmtcagccccatctccctgccccaccccycagcccccactgcagtccaggagggtgtctgtttsccggttctctagggaaagacttggggttcaagtcttggcattaccactggccctcccataaccacaatgcaaggttggactttgattaatcccattttacagatgaagaaactgaggcttagacaggctaagcaatttaccttgacagtggtggaaccaggatatgaactccacttgtcagcattcggtgctatgatccactccacatgtttaactcacagaagagtcttcctggtgggggcactygggggacaaaaaacacatttccggctgtgagcagtggctcacacctgtaatcccagcactttgggaggccaaggcgggcggatcacaaggtcaagagattgagaccaccctggacaacatagtgaaaccctgtctctactaaaaatacaaaaattagctgggtgtggtggcgcacgcctgtagtcccacctactcgggaggctgaggcaggagaatcgcttgaacccagaaggcagaggttgcagtgagccaaaattgtgccattgcactccagcctggtgacagagcaagactctgtctcaaaacaaaacaaaacaatttcccctccctgctttcttctcaccattgacgagggatgggcttctctcctacctgaggcccctataccaggaagatctatgggatctaatcttcaggcacactgggcctcagcattggtctagaactcaggawaagatagcatttaagaaggyatcccctaaatggggttctgagaggcaaagcatgaccgtggagaattgacaaaatagctcgcctttcatcccctccaccgccaacccaagaacagtgcttatcatcatgaccccatgaggtgggcaccccatatcacttatatgaggtacctttaggtaggtaccgggatgtggagagacatcctgggctttcattactcttattttagcaaagagggaaactgaggcacagagaagggaagggacttgcccatgcccacagcgagtttttggctagtctgggtcttgatgttctttattattattattactatcctcctcatgatcatcgttgtatgtatacagttatggggtacaagtgcaattttgttacatgcatagatggcacagtagtgaagtcagagctttcagagtatccaccactccaataacatacattgtatccatttagtcctttctcatcatccaccttgctcctaccccctcacccttccaagccccctttatctatcattcccctctctgagttcttgtctacacatkgtttagctcccacttatgattgagaacatgtgatatttgtctgtctgtgtctgacttgtttcacttaaggtaacttcagtttcatccatgttgctgcaaaagacrtggattcattctttttttctaacttttaagttcagacatacacgtgcagattttctatatggttaaactcatgtcacaggggtttgttgtacagattatttcatcaccacccaagtattaagcctagtacccattagttattttttctgatcctctccctcctcccaccckccacccgccacccgccaccctccaacctcaggyaggccccagtgtgtgttgttcccctctatgtgtccatgtgttctcatcatttagctcccacttataagtgagaagaggcagtatttggttttctgttcctgcattagtttggtaaggataatgacctccagctccaaccatgttcctgcaacggacatgatctcattcttttttatagctgcatagtattccatggtgtatatgttcctcattttctttatccagtctatccttgatgggcatttaagtagattccatgtctttgctattgtgaatagtgcttcagtgaacaggtgtctttatgatagaaaaatttatatgcctttgggcatatatgcagtgatgagattgctgggtcagacrgtagttctgtttttagctctttgaggaatcatcctgctgctttctacagtggatgaactaatttacactcccaccaacagtgtataaacactcctttttatctgcaacctcagcagcatggttttatttctctttatggctgaatagtgttccattgtgcatatataccacactttctttatggattcatctgytgatggacatataggttgattccacatctctgctattgtgaatagtgctgtgataaacacacaggtgcgggttgggtcttgatgatctcagttaacatccagtcccttcaacttggctattgcagggagctgttcccccttgtaaactgcacagcttatgtgcttcattttgttccttcatttagatttaccaagcagctactattaaccaggccacaatgtgcctcgccccaggaacagagataggttacatgtgcatcctgtcctaatgtaatctccaggggggcggagactgttttgttctaccctatattccccaaatgtaaagggagccttgcacatactaagcccttaataaacattcattgggtggaggaatagattggaggaggcctggaaggggaggcgggggttatggatggataggaggatagacttgtgaacacaaaggtagtgagagcctctcattggaggcatgctggagacgtgagtagggaagggtcagtgctaattgaaatatcaggaaattctttctagtggtgaacacatttaagtcaaatattagatgatacataaatgtatccataatctctagatacacaaagggaaaggcatccaggcaggggccccatatggacaaaggcatggagtatctgggacggttccaccacctcctcttacgtgtgacttctttgtttcaaggttacaatgaacctggtccagatgagcctcctacaagtacgtgtctttgaatctagtgcccatttcaatctccatgggtcttggttcaagcttttctcctcattcatgaaggaaggttgccccaaattcgggctggtcccstgaggtggtgaggggcattgtctcagtggsaggaagaatgctgagtccttggcctgtttttagacctgcagccatagtcttggctttgtgaattttccatgtccctctgggttggaggaagaagtttgaacaagcattccctacagggatagaggttgaggtcagatgatgaccttgttagtctgtacctcctgataagaaaatctcctccaagtgccccagcagaggcttcatggtcaagctgcagactctgckggctactggttttggctaaatttgcccattgcctcatccagtgatccactcgtctatctttccagccatccatttttctatccttccagtcatctctcagacaccacctgtccttccatccatccatccgtccatccatttacccatccatccatccaccccattttcctgaccatttacctcctcgtccttccttccatctgtccttttatccatctattcatccatcacccatcctcctgcccattcacctgcttgtccctcctttcttctgtccttctatacatccatccatccatccatccatccacccatccactcatccaccacccacccatccttctgcccactcactcgctagcccctccttccttctgtccttccatccatccatccacccatcttcctgcccattcacctgcttgtccttccttctatctgtyttttatccatctctccatccatccaccatccatccatccatccttctccctattcacykgtttgtctttccttctgtccttccaaccatccmyccatctctccatycattctcctcttcattcaccatgtttccttmyttctgtcycttccatccatccatctatccagacagacatctcctccccccattctcctccccattcactcaattgtccttccttccatctgtccttttatccatccatccacccatccatccatccatctatccttctccccattcacctgtttgtccttctttctgtccttccaaccatccatccatccaycatccatccatcyatccttytcccyattcacctgttttgtcyttccttctgtccttccaaccatccctccatctctccatccatcctcctgcctattcatctgcttgtctttccttccttctgtccttccatccattcatccatctgcccatccacccactcatcctcttgcccattcacctgcttgtccttccttccacctgtccttttatccatccatccatccatccatcttgctcactcctccactcacacaatcactccttccctcagtctcatttatggcccacctgtgaatggttgtcctggcttggaccactgatgaagcccaggggagcttctcccactaggtggtgggcttttgtcctctctgatggactgttccttccacagctcccaagccagccaccacattcctgcctcctctgtcagaagccacaacaggtatttggggccatttttcctcctcgaagattagaatagcatttcaatcagacacctgccctcgtggagtcccagattttatgaaataaatagaccatcataatgtcagatgttttggggtgagayacctggcatagttgggaaggaggagggctttctggagaaagtttcacctgaactgagtctttaaggatgactaagagtgattcaggcaaatagggcatgaatagtataactgaaagaggggaatctgtgagcaaagcctcagtggccagaaacagcatagagtatagggagaagtgagagaartttrgtttgcatgaaacataaagcttaacccagagtggatggataagtgagactgaaaggtcagcaggagccagattgggaagggccttgaatgccaagtcaagaaatttgaacttaacactgaaggccatagggagctgtggatggtactagagcaggggcagccatagtgagattgtcatttcagaaagattcttcttgtgttcagtatagagaatgtcctttagacagggcatccagtgagtctgccaggtgctaatcagggtgagagaaaataagacctgaactgggataggggaggagagagaggatatatgtgatgaatattcagtaaagagaattggtgttacttggaggggagaagacacatagcttctgacttggatggccacactagttaataatgagcrcagtctgatctagtctcagaccagccctcagttgcagacgtctctcctcccctcctgcagccatggggtaccacctgaagaccctcacactcaacttcaccatctccaatctccagtattcaccagatatgggcaagggctcagctacattcaactccaccgagggggtccttcagcacctggtgagaccctggtcccagcagctccyrgtgggataaatcctacccccaacctctgttcctcggcttaccctcttcctccttcctctcaagctcagacccttgttccagaagagcagcatgggccccttctacttgggttgccaactgatctccctcaggtgagaccacttcctggccatttgccagtaacaaccaccccttttgtgaccaccccttcctcagctttcccctgctyctccctccactgctctttacctgcagaggtctygggacctctctagagtcctcaratgcctctctccccaggcctgagaaggatggggcagccactggtgtggacaccacctgcacctaccaccctgaccctgtgggccccgggctggacatacagcagctttactgggagctgagtcagctgacccatggtgtcacccaactgggcttctatgtcctggacagggatagcctcttcatcaatggtgagtgtcaggctgaacttggatttacagtgactttkggggagttggtttctttgtttttgagatggagtctcactctatcacccaggctggagtgcaatggtgcaatcttggctctgcaacagtgattctcctgcctcagcctcccaagtagctgggatttacaggtgcatgccaccacgctyagctaatttttgtatttttagtagagatggggtttcaccatgttgcccaggctggtctcgaactcctgacctcaggtgatccacctgccttggcctcccaaagtgccaggattacaggcatgagccaccatgcccggcccaccatgactattatttgtccctgttgtatgccctttcctctctaaaaaaaatagcccaaggcctggctgggggacacccttccccaaaccaccaaggggagggtctttcccattattttgagtaaatagcatgaaattctttgaccaaattaatgtcataaattrtttgtctctttctccttcacttttgtttccaacttggttgcggtataactatcaaatacaattgtatgtatttaagatgtataatgcagtgatttaatatatgtgtagcttatgaaatgattaccatgatcaaattagttaacactgctttcatgtcacatagttaccgygtgtctgtgtgcgtctgtgtgagttagagagaaagagaacatttaaggtctaccctcatagaaaatttcaggtttacaatacagtattattaactataatcatcaagctttatactcgatccccagaacttattcatcttgtaactaaaagtttgtattttgtgaccaacatctccccattttctctatcaccacccccatgcccccagcccctgataamcatcatgctactctctgcttctgtaagtttgacttctgatcccacatataagtgagatcatgcagtatttgtttctctctatctggtatatttcacttagcataatgaaccccccccaggtacatccataatgaatttcaattcaaaacccaagtggctgagtcgtggcatcctttgggacaggatagcaggtcccttctatataaggatcctctgtgtcagtggttattaccaggggacaattctgcacttctgccccaccccaccccccaactgggagactctaggcaatatccaraatcatttttgggtatcacaactcagggagggaaggagggtgcaactggcacctagtgggtcggtagcccattttccagtgcacaggagacaaccaccccagggaatgatccagccccaaatgccaataatttcaagggtgagaaatcctgttgtacatggtctcaaagttcttaggtgggcacaaggctgacatttatcacactttactgtaattacttgttaaattatctgattcccccttaccctgtgaactcaacaaaattacggtctattatgagtgccactgtaccctcggttcgcagtacatcagcacatcatagtatggaaagaatcattgaatgagtgagcaaattaaagatttgtgtctctgctgtaactcacattcattaattcattcattcagcaaacatatatgggtggctgttctgccccaagccttgtactgrgtctggagatagaagacacatttttctgtctctgaaaaactcatactcaagttaacaacaaattacgggcacaacaaagaccccactgctgttattaacagggtactatgggagctgagaggaggagtaaattaaggagggcttcctggaggagggtgttatatacccggccctgtgccgggacacaataatgaataagacagacttgggcctctgctgtcctggagctccctctcactgggctcttgaagcgtgagcaggagttttgcaggaaatgaaaaggatgcattcctagaagtgggaactgcatagcacatgcaggaaagctcagctcagaagaatctgtgtaatattccatttttccctctctttggggcaactttctgtctaagagctsctgcaatgcccagcgtgtggacctgaaattgattctgacagtaggcaggggactgctgggcaactttggctctgcattttgtgatcaacatttccccaccatatgttgccttttcttcttctctgtggctccaggctatgcaccccagaatttatcaatccggggcgagtaccagataaatttccacattgtcaactggaacctcagtaatccagaccccacatcctcagagtacatcaccctgctgarggacatccaggacaaggtggggcatctctcacccctcccgtcttctctgtcctgtgtgcttctctccctcttctacctgatttctctgttaagtgatcactttaaatgcttcacttcactatgtattctgggttctctctcagtttccaaaagtactctcttgactaccattcccatttcacagatgggcaaactgaggctcagaaaggggcgtggtgtgcctagggtcayacagtgctttaggaacagagttaggatttgaactctggtcccctttgctccaagtcctgtgtttttttccactggcatcagcggcccctccacccccaagaggcctccatctcacccactctccctacccatctttctaggtcaccacactctacaaaggcmgtcaactacatgacacattccgcttctgcctggtcrccaacttgacgtaagttctgaaggtcataagcagtgaccaagcttgtggctgtgtctctgagcacccttgagctagacgtccccagtggggtacccattctcccctacatccctgtctagctaatcctaccatctcctcccataaatcctcaaggtagggagtgaggattaacctcatggggccaccaactcccagcatacaccttcttttttttctggacacttgggaaaatataactttttgatgtagaactcaaaatattagcccaataataatatttaacatcaaccagcctcctctcatttaattctcacaacagaatctatgagttgagtgcaaaratcatccctattgtgcagatgggaaaactgagggtcagaaaagtgaacttcccaagaactgtcaaagttgggatttgaacccaggtctctgatgactggatgaaggaatgaagatacctatacttgggaagaggagggtcacaggacacagggctgactttgtatatttctaaacttcaaagatttttgtatttcagctgggaatatggagaaggttaatkggaacaaaaaamtgcaaagaatgaataagacctastatttgctagcacaacagggtgactgtagtcaaaaataacttsactgtacattttaaaatataactaaaggtgtatgcttggattgtttgcaacacaaaggatatatgcttgaggggatggataccccatttaccctgatgattattatgcattacatgcttgtatcaaaacatctcatataccccataaatataaaaacacctactatgtacccmaaaaaattaaaaacaaataaaatcaaaagtaggctgggcacagtggctcatgcctgtaatcccagcactttgggaggccagggcaggtggatctcttgagcccagaagttcaagaccagcgagggcaacatagggagtcctagtctctacaaaaaatacaaaaattagccaggcatggtggcacacacctgtagtcccagccactcaggaagctgaggtgggaggatcgcctgagcctaggaggctgtactccagcctgggtgacagagcgagactctatctcaaaaaataaaataaaataataaaaagtagaaatcaagagggaaaatgtgggagaaattgggataattttaacaataccttccaccagagtgatgatgaagaatgcataagtcacttcttagtggtcttgatctataaaaagtgttcaataaatatcgattattgttactgttattgcttctagacgtaattcctggaagcattttttttttttttttttttgagatggagtcatgctctgttgctcaggctggagtgcagtggtatgatctcggctcactacaactgcctcctgggttcaagcaattctcctgcctcagccccccatgtagcagggactacaggcatgcgccaccacacccggtgaagttttgtatttttattagagacagggttttgccatgttggtcaggctggtctygaactccygacctcaggcaatttgcctgcctcggcctcccaaagtgctgagattacaggcttgggccactgcatccagccgaaggcctcccattttgatcagaacccttctctagactgagggtgggtgcctctagatcttttgctctttaaagacagcaacygatgaccctgctgatgctgagtactggctgaattcctgtggtctctgtccctaggatggactccgtgttggtcactgtcaaggcattgttctcctccaatttggaccccagcctggtggagcaagtctttctagataagaccctgaatgcctcattccattggctgggctccacctaccagttggtggacatccatgtgacaggtacaaggtggggtggctggtttcctaactggaagaggtggggttatgaggaaagatggggcttctcggtaccagtggaattggtggaggctctagagagggaaagggaggctttctggagacccatgtaggtgacctctggcagtagatcatccaacgaggcaggaacagaacaccagccattgcatctaagagaatagctatttttacatgtaaaaagaattgtgttgaatgaatgaatcaatagatcatttattttgaatcaatttattgattcattcatttaattaatgaataataaatgattcagtacataattgattaattgatgtaattgagaattgatttaattgattaattgatcaattaaaatgatyaattaaatgaatgaatcagtaaatgaataattcattcattcaataaacaatggaagtaggccgggcatggtggctcacgcctgtaataccagtactttgggaggcccaggcagrcagatcacgaggtcaggagattgagaccatcctggctaacacggtgaaaccctgtctctactaaaaatacaaaaaaaattagccaggcatggtggtggccacctgtagtcgcagctactcgggaggctgaggcaggagaatggcgtgaacccgggaggcagagcttgcagtgagccgagatcgcgccactgcactccagcctgggcgacagatggagactctgtctcaaaaataaataaataaataaaaataaaaaataaataaacaatggargtaaacacrtactgataacacagtgtgatcattgctatgataagggaatttcaggggcctgtgggagccccaaggaggaacacacaaccttgtcttggaaagttttatgtaggaaggggtgaagaagctgagatctgacagagaatgggacctagccaggggtaatagatggagaattgtgctccatgcatctataacctagaagatagaaagaatatggcatctggccgggtgcggtggctcacgcctgtagtcccagcactttcagaggctgagatgggtggatcacctgaggtcaggagttcaagaccagcctgaccaatatgatgaaaccccatctctgctaaaaatacaaaaattagccaggcatggtggtgcgtgcctgtaatcccagccacttgggaggctgagagaggagaactgcttgaactcgggaggcggakgttgcagtgagccgagattgtgccattgcactcaagcctgggcaaaaagagcaaaactgcatttcaaaaaaaaaaaaagtggcattttggggcaagtttaagaagattggtgtagctggagcatccactttgatactggagaggtgacagttgaagccaaagatgtgggcagagactttgttgrgcactggaatggcttggggaggaacatgacacactcatgagttctgctttagaaagaaaatgaaatgaattctgctcatcctctgggtgctgtgtgcagaatggagggtggggggagagaagagcaaaggcaagaagaccctttaggaacaatgatcattagttagaagactctgggtttctcagcacctgcaattgctgactacacccccagagaaacccagtctcttttcccccatgttgtagagaattcttacaatgcttggtagaaagagaattgaacaggtagatgggtggatggatacaagctggacagatggatggaggaagatcctccatccaatatagagctgttacctaaaaccctccatcccacctttaaaatcctagctcagccaggygcggtggctcacacctgtaatcccagcactttgggaggccaaggcgggtggatcacctgaggtcgggggttcgagaccagtctgaccaacatggwgaaaccctgtctctattaaaaatacaaaaaaaaaaaaaattagccaggcagggtggcgcatgcctgtaatcccgctactcgggaggctgaggcaggagaatggcttgcacccaggaggtggaggttgtggtgagccaagatcacgccattacactccagcctgggcaaagagagtgaaactgtctcaaaaaacaaaacaaatgacccccctgccaaaaaaaaaaaaaaaaaaaaagaaaagaaaaaaagaaaagcctagctcagctcacactgtcaggaataagtaagctagctggaatcatctctttcttaaaaccctgccttgatagtggatttttacatactttttttttaattctagaaatggagtcatcagtttatcaaccaacaagcagctccagcacccagcacttctacctgaatttcaccatcaccaacctaccatattcccaggacaaagcccagccaggcaccaccaattaccagaggaacaaaaggaatattgaggatgcggtgagaagggggtggtatgtccactctgttgccatgcagaaactgacttatgcatactgggtagccacagggtgactttttataacaatccacaaagacaggttcttattcccatttaatacacaagcacagagaggttcagtagctgacccaaggtcacacagctaagtcataccctagaagagcatgtcctttgatatacatacctrggcaagtggttgtcatgacaagaagcaaaatagacggagaagtgtgctcagtggctgaaaattctctgatgctactggggccaggwttctgacctaagaaacatcgccctgtctttcagctcaaccaactcttccgaaacagcagcatcaagagttatttttctgactgtcaagtttcaacattcaggtaagttctaactcaggacctaatgactctaggaacttctgctgtcctttaaatagaagtgtccccaagccatagctttgatggaagagagccctagaaatagagagctgttaactaaaaactagctttttcctaaagctggagcccaactggcttcaacactcaagagagctggtgtaaatctcagcagacataaaggtacctggtgctgaggccatggagtctagagtgtagaatctactacattaagacatcagctactgaaatcaggacccatggaagacgggggaaggaggggactaaaaccagattacttagaatctagcagcckaactgtgcttttcaatgagaggtatcatttccaatggtggggggtaccaatgatttttttttttttgacaactgccttgagaacaggctttcctcactaaacaaattctgaatcagaacaaataaagataagccctgagaatagggctttttcaaggagctgccaaacagatcaaatagtgactatgttctgcagattgatgtctggagaactctacagctattttgactgctaggcagctggttttcacagatatcatgattctgaggctgccagttttcaaagttaccgaggatcttgctggatgcagtggcttgcgactgtaatcccagccctttgggaggccaaggtgggtrgatcgcttgagctcaggagtttgagaccagcctgggcaatatggtgaaaacccatctctacaaaaaatacaaaaatcagctgagcatagtggcatgtgctgtagtcccagttacttaggaggctgaggtgggaggatggcttgagcccaggaggcagaggttgcagtgagctgacattgtgccatgcactctagcctgggcaacagagccaaagcctgtctcaaaaaaaaaaaacaaataataataataataaaatactgaggatcttgaaagagcactgtggaaataatgcaagttaaaatgccacaaagcttgctctttttactgagatttaacactttccttaactaaacacccctcgaatttttgcaagcctttggttcacttctagacttctggaaaaattgatttggactattttggccaatgttctcattgattttatgggtattcagaagttgttaccccaacattccagaaatgttctccctgtggctattactttatttatttatttatttatttatttatttgagacggagtctccctctgttgcccaggctggagtgcagtggcgcaatctcagctcactgcaacctccgcttcccaggttcaagcgattctcctgcctcagcctcccaagtagctgggattatggatgtgcaccaccacaccggctaatttttgtgtttttagtagagatggggtttcactgtgttggccaggctggtctcgaactcctgatctcaagtgatccacccgccttggcctcccaaagtgctggrataacaggcatgagccactgtgcctgacctccctgtggctatttttaaatgaattaagtggaataaaattagaaattcagttcttctcccacgctagctgcattttaagcatttaataacaacatgaagctactaatggctgcattgtgtagtgcagatgtagaattttttttttgttttttgttttgtttttgagatggagtctcgctctgtcaccaggctagagtgcagtggcgtgatctcgtctcactgcaatctctactcccygattcaagtgattctcctgcctcagcctcccaagtagctgggattacaggcacgtgccaccacacccagctaatatttgtatggatggtctcaatctcytgacctcgtgatttgtatggatggtctcgatctgacctcatgatccgcctgcctgggcctcccaaagtgctgggattacaggcgtgagccactgtgcccggccgacatagaatgtttacatcattgcagaaagtttctgcaggaagagcctagaaggagaaagcctagaatcatgataaaattgcagatatctttgcttatccctgtccccttccaggtctgtccccaacaggcaccacaccggggtggactccctgtgtaacttctcgccactggctcggagagtagacagagttgccatctatgaggaatttctgcggatgacccggaatggtacccagctgcagaacttcaccctggacaggagcagtgtccttgtggatggtaaagctccctgggtcattgggactgaggtggaagctcccacttcctcacctgggtccttycctgggaatctgaaggcttggggttgattcgtcatcgagctttctcagactgggagaaagtggcttagttctcctaagctttacccatcattgaaggaaagaaaaggacgccygagggatatgggaggcatttgccctcttctggccagctctgtgacctcaggctagtcacatctcctttctggacttcttatctctctgtacttagcaagccacttggtttttggttcccatcttgcctgccctagatggtattgctcctccacccccaggcagctgcrgtgttaaacaattaccctgattagttattgttgttgtgttgtttgtttgtttttgagacagggtctcactctgtcacctaggctggagtgcagtgacatgatctcagctcactgcaacctcaacccctggactcaagcaatccacccacttcagcctcccaagtaactgggactacagccatgcgccaccacacccggataatttttgtattttttctagagatggggttttgcaacattgcccaggctggtcttgaactcctgagctcaagcatgccacctgcttcagcctcccaaagtgctgggattacaggcaggcaggcaccactgcagctggttctggttttttgtgtttgtttttttcttttagaggcagggtctcgctctgttaaccagaatggagtacagtggtgcaatcatagctcactgcagtcttgaactcctgggctcaagcgatcctcccacctcagcctcctgagtacctggaactacaggcacgtgtcaccacgccttgctaatttctaaattttttgtagagacagggtctcactatgttgcccagactggtctctaattcctggccacaagtgatcctcctgcctcagcaggtcaatgagggcttccagtttcaagttgtatgtgattcatcctcaacaaatgtggtaggatggacctattttccaactccagagatggcttcaaggtggctcaactttgcatatccaattttacccattcaaagaatagttatatacattgtaccatgtatcaggaatataacagagagtaactgtttgctctttcaccactatattccaagaaccccatattctgcctggcacataataaacactcaagtcmtatttgcagaaggaataactagatttcatacaaggttcttttcaagtcaaatgcgaataacgttttagacgggaccttccaatgcctgtgtgcactgtccttgattccgaattattgttgtgcaagagagcactgttgatccttcagaatcaacaagcctttcacatgcctgtcacaggtttttctttttcttgttttaccaattttgtttgttgtttgtttgttgttattgttttgttttgtttttgttttttatttgtttttattttttctttttttttgagacagagtctcgctctgtcacccaggctggagtgcagtggcacgatctcygcccactgcaagctccgcctcctgggttcatgccattttcctgcctcagcctcctgagtagctgggactacaggcgcctgccaccatgtctggctaattttttttgtatttttagtagaaacagggtttcaccatgttgaccaggatggtctcratctcctgacctcgtgatctgcccacctgggcctcccaragtgctgggattacaggcgtgagccaccacacccagccccaattttttttttaattaaaattgttgtcagctcacaagctttctaaaaacaggccatggacccagcatcgctgtagtttgccaaaccttgccttgaatcagtaccatccaatagaactttctgcagtgatagaaaatgtttctatctgtgctattcagcacaaagccatgtgtgattactaagcttgaagtgtggttaatgtaactgagataccgaagttttaattttatttaattttaatttaaaaagccacttgtggctgctccatattgcacactactttttaaaattattatttgtatatatttaaggggcacaagtacaattttgttgcatggatttatagcccagtggggaagtctgggcttttagggtatctattacctgaataatgtacattgtacccattgagtaatttctcatcatccactctcctccactccccaacccttccaagtttccactgtctattattccactctctatgtccatgyctatgcrttatttagcattgacatgtctatgcattatttagtcaaatacatgtgctatttgacttcctgtatctgagttgtttgacttaagataatgaccttcacttgcatccatgttgctgcaaaagacatgatttcattcttttttatgcctgggtggtattgcattgtgtgtgtgtgtgtgtgtgtgtgtgtagagagagagagagagatcacattttctttatacagtcctccattgatgggcacttaggttgattccatatctttgctattgtgaatagttttgtgataaacacacaggttcaggtgtctttttgacaaaattatttattttcctttgtgtagatacccagtcgtgggattcctggatcaaatggtagtttcatttttagttatttgagaaatctccacgtttttcatagagattatactaaattacattcccaccaacagtgtgtaacggttcacttttcttgcatcytttttracatctgttattttttgtctttttagtaacagccattctgactggcgtaaggtggtatctcatcatggttttaatctgtatttctctgattattagtaatgtcgagcattttttcatatgcttgttagccattggtatgtcttctacatctttaagaagctggctatgggctgggcgcagtggctcacacctgtaatcccagcactttgggaggccgaggcaggcggatcacgaggtcaggagttaaaaaccagcctggccaacatggtaaaaccctgcctctactaaaaatacaaaaaattacccaggcatggtggtgcgcctgtaatcccagctactcaggaagctgaggcaggagaatcacttgaacccaggaggcggaggttgcagtgagacgagatcacatcattgcactccagcctgggtgacagagtgagactctatcttgagaaaaaaaaaaagttggctataacagggttgtagaagtagaggaaccagtaacccttctcgccatgcctgatgatggctttacatccctgtcttcatggagtttatgctgtcgtgaggaataacaagaacaggcagttgtcaattataaattatttgatgtgaacctattcatacatgggtgtggtcatcagggaaggcttcctggaggaaatracattgaaggtgaattctaaaagatgacgataaaaccaccaagtgaaggagagcttaaatgtgtttttaggcagaagaaaaaccttttgggtgaaaattttaaaacttagagaggtcccatcagtttccaactgcgatgatccattctctccaccactgcccttgggcccagcccaatttaggtccaccatgcccagaggcatgaatttaacttatgacactcytgtggtggaataatggctttgggcttatgtagccatgtgtcatttttttagagatacaaattgaaatatttggggtgagatgtcatggtgtctactggcctctaaaacttcagtgaaaacatttactttcactgaaatgtcaataaatcataaattggatgtatatgttttagttggaggaaatataaaccactaaatctaggtgatgcatatttattatactcttctctctgcttttttgtacgcttgtaaaattgtatttaaaagaataagacacacttggccgggcgcggtggctcacgcctgtaatcccagcactttgggagaccgaggtgggtggatcatgaggtcaggagttcaagaccagcctggccaacatggtaaaactccatcactacatacaaaaattagccaggcattttggcgggcacctgtaatctcagctacttgggaggctgaagcaggagaattgcttgaacccgggaagcagaggttgcagtgagccaagatcacgccactgcactctagcctgggcaacagagcaagactscatctccagaaaaaaaaaaaaaaaaaaaaaaagacacactcacatgcaccctccatttctttcatttctagggtattctcccaacagaaatgagcccttaactgggaattctggtaagtctcaaagaagccccagcccagggtagggagggkgtagcctgatggtgctttgccttgtccaagagcaccaggcacacagagtcttggatgaggatcaaaattgccaacccatggcaaagactattgaggcatagtaaagggatagcagggatcctggctttctgggggcccagtttttgggggcatcagaggcatgaggtgttgagccactaagctctcttccccagggctgtgcccatcctcaggccacatagggtccaagaaggagccctgggacgtggcaggaggtggctcaccccagcccttgtctccccagaccttcccttctgggctgtcatcctcatcggcttggcaggactcctgggastcatcacatgcctgatctgcggtgtcctggtgagcaaggaagggttgcttgtcttcttaacaattgggttgtaagagttcttaatatattataaaaccatactatactatacacaagtcctttgctggatatatgttttgcaaatattttctcccagttcacggagtggctttcctattttctttttataattttatttttaattaatygacaaataatgaatgcatatatttaggggatacaatgtgatgctttggtatatgtacaattatggaatgactcaatcaagctaattaatatgtccctcacctctcatacttattatttctttgtggtgtgaacattggcaacctatactcttagcaattttgaaatctacattattattaactatagttactatgttatgcagatctcaaaaacttcacaacctatatgctgattacaagatattgagagaaaaagtgattgcaaagagtgtaaataaaataatgtaagagggaaaaatgtaacaaaattagtcgttagggaaatgtacacggaagtcacaatgagaggccacttttcacaagaatggataaaattgaaaagattgactataacaagtgttggtgaaaatgtgacagaactggaactctcataaagtgaaagtggaaaatagcttggccatttctttgaaaattacacacacctaccrtaagaccctaccatcccactactagtaatttatctaagagaaataaaaacatatgtctatatgaagacttgtacacaagtaaatgttcataacagctttgtttgtaatagccaaactctgaaaacaaccctaatgtccattaacaaatatatcctgacaatggaatattattcagcaacaaaaaggaattattaatacattaataaattatacagcaacatgtataaattgcaaaatagttatgcctagtgaaagaatccagatgaagaaaagagtacatgccatatgattcccttaatagacaaattctagaaaatacaaactaatctgtaaggacaggaatcagatcagcggttgcctgggaatgaaaatgtgtttgcagtggcagggaaaaaggaattgtaaaagagcaggaagaaagtttttttgttgtttttttttgttttttcttgagacagagtcttagtctatcgcccaagctggagtgcaatggcacgatctcagctcattgcaacctctgcctctcgggttcaagcgtttttcctgccccagcctcccaagtagctgggattacacatgcgcaccaccacactcagctaatttttgtatttttagtagagacggggttttaccatgttggccaggctggtctcgaactcctgacctcaggtgatccacccgccttggcctcccaaagtgctgggattacaggagtgagccaccatgcctggccaggacgaaagttttggggatgatggatggatgttccttatgttgattgtggtgacgattcaataagttatgatcagaacttatcaaaacattcactttaaatgtgtgcagtttattttatgtcagttatgcctcagttaagctggacagatgtagaggaggaagggagggagagagggggctgagatcaggaccaaaagccagagagaaagagactgagaatgagatgagagagaaatgrtatttagacagaagacaggcgatagatgattgatagttgacagatgattggtggatagctgataggtagatgataaatagattattttgatagataattggtagataataaattgataggtaacagatagttgatagatattgataagtagatgataaatacatgattgatggatgacaggtgattgatagatgattgatggattataaataggagatgattgagaggtgagagataattgatggttattgattggtagataattgattgacaggtwgataaatattgatagctagatgatagataaatagatcattggtagatatgtgatatattgataaagaaattcagaggcaaaaggagagagaaatgaaggggatatcggagggggaaaaatttttttaaaccgagagtgaaacaaggagacagaagaaaagaaagtggtgaaaagaggaaaagaactgagggagaaattaaatgaaacaatgaagggagacagaggaagcataaggcctctggctttggccatattctcacccctgtggtctcctctccctggacggctgaccagtccattctcacgcctcctcctcaccctcataggtgaccacccrccggcggaagaaggaaggagaatacaacgtccagcaacagtgcccaggctactaccagtcacacctagacctggaggatctgcaatgactggaacttgccggtgcctggggtgcctttcccccagccagggtccaaagaagcttggctggggcagaaataaaccatattggtcggacacagtctctgagccttccttgacgtgacccctgactggttcatgttggactaagagaacagtcttccaccttcgtgaagtcccaaaggcaactctcagttgtgtgttgtggtttcgcaccatgtcatcccttgggaacaccagaattggtgaaaatgattgtattaggctgttcttgcactgtgataaagaaatacctggccgggcgcagtggctcacacctataatcccagcactttgggaggcccaggcgggtggatcacttgaggtcaggagttcaagaccggagcctggccaacttggtgaaaccctgtctctactaaaaatacaataattagccaggcatggtggtccacrcctgtaatgccagctacttgggaggctgagacaggagaatcacttgaacccaggaagcagaggttgcagtgagccaagatcaygccactgcactccagcctgagtgacagagcragactctgtctcaaaaaaagaacaagagaaaaaaaaaaaatacctggccaggctcggtggctcacrcctgtaatcctagcactatgggaggcctaggcaggcaggttgcttgagtccaagagctcgagaccagcctgggaaacatggcaaaatgctgtctctacaaagatttttaaaaatagccaggcatggtggtgcgtgcctgtagtcccagctacccaggaggcagaggtgggagtatcacctgagcctgggaggttgaggctgcagtgaactgtgattgtaccactgcactccaccctgaatgacagagtgasatcctgtctcaaaaaaaaaaaaaaaaaaaaaaaaaaacaaagaaaaaagaaatacctgagactgggtaatttttaaagaaaagaggtttaattggctcacagttctgcaggctgtacaggaagcatgatgtcagcatctgatcagcttctggagaggtctcaggaagcttccaatcatggtgaaggccaagggagggccagcatgtcacaagrgagggccagcatgtcacatggccagagcaggagcaagggagagttggggggagcaaaggtgccacacacttaaccagatctcacaagtacagactccctgttgcaaaggcagcatcaaaccatgaaggatctgcccctatgacccaagcaccgcctaccaggctccacctccaacactggggattacaattcaacatcagatttggtggggacacatatccaaactacattactgatgatatggacaggagacagggaaatactgggtagaagagggaggttccccagcaaaggccccaccctcaagcctggagacctgtggccctaaatgggaacagacaatcctgttttcatgccccaaagtcaccttttggcccaccatgctcccctatcctatacccatataaacctcaaaccccaggctccacaagcagaagaatggcagaacgacacagcagagagaagagaaggagcatctgaatgccgaaaggagttcaactggggacagtcagagaggagactagccactggacagccaaactccaggggaagatcatcttcccactccatcccccttctagctccccatccatcccactgagaaccacctcccccattcaacaaaaccctggcattcatccttcaagtctatgtgtgacctgattcttcctggatgctggacaaggacttgggtaccaagagggcactgagctggttaacacttgagccatccacagacagcaaggctaaggagcacactgtaacacacagccacttgggctttgggagttgcagtctcccaccygtggatgctgccatggggccagagcccagggacactggccccggctcctgcacctgcctgtctgtgtgctccccgtcccataaggggtttgagtcacccagcagccaaacagatgagccacacccctgtcacatgtcctgcaagggagctcagggaatcctcctgtttcactgatacagaaattgccatcatggaggctgggcacggtggctcacacctgtaatcccagcactttgggagaccaagacaggtggatcacctgaagtcaggagttcaagaacagcctgaccaacataatgaaacccaactccactaaaaatacaaaaaaattagctgggtktagtggtgggtgcctgtaatcccagctactcgggaggctgaggcaggagaatcacttgaatctgagaggtggaggttgcagtgagctaagatcgcgccattgcactccagcctgggcgacagagcaagactccatctcaaaaaaagaaaaaagaaattgccatggkggaaaatcaacattccacttcagtgtaaggtctcccacctttgtcactcagtacacacccacccttgactcctataccagccatcacacccatcctgttcctttatattcccacatccctgcccccaagaaaccctggcagttgcaagtttctcttccactatttcattctctgaaactcaaatgcaccagaatttccagattagtgttccctgggtggcatattatccayctcacgggtcctctacaatgggaagtagaccaagaagacataaacgggtcagaaatggttctatgggccaggcacagtagctcaaacctgtaatcccagcatgttgggagaccacggtaggaggatcgcttgaggccaggagttagagaccagccttggcaacataatgagacccccatctctactaaaagaaaaaaatagctggatgtggtggcacacacctatagtcccagctactagggaggcggaggmaggaagatcccttgagcccaggaggttgaggctgcagtatgattgcaccactgcactccaagtctgggcaacacagtgagaccccatctctaaaaaaaaaaaatagagtgcaatatctatattatttatagcttccctaaaaatttgttattttaaaatttcatcttttctgctctgtgcttccacgtggtaatcatgtgtgtcctagaatgtggggatttttttggttttgttttcttttgtgttttgagatggagtctcactctgttgcccaggctggagtgcaatggcacgatctcagctcactgcaaccacygcctcccaggttcaagcgattctcctgcctcagcctcctgagtagctgagattacaggtgggtgccaccatacccagctaatttttgtatttttagtagagacagggtttcgccatgttggccagactggtcttgaatgcctgacctcaggtgacctacccacgttagcctcccaaagtgctgggattacaggtgtgagccactgcgtgcagccttagaatgtgttttaatgttttgtttgcttgaaaaaaaataccaatagcctacatccagtctatatgactttttttagattccacacagaagtgaggtcaatgcatcattttctatctgtgtctgacttaattcacttatcttaaagtcagtaggcagtactcaagattataaaattattcagtgctttgtcctcatcatcacaggataaagcctacccaatcagaattgattattatttttgtgaaatatcccagtggattccaaaataatatttaaggaaagagttttttatatctacgttctcaaataagctatctaactctagttatttttctgttcttgattgcccattaattcagagttgcatttaatgaactaccagactttccctgattctctaagtctatatgtgtttgaaatttgaatcaggaaagtcgacacaatttgagggataataatatcaagaaaaacttttcaggccgagcgtggtggctcacgcctgtaatcccagcactttgggaggctgaggtgggccaatcactagaggtcaagagttcgagaccaacctgaccaacatgatgaaatctcatctctactaaaaatacaaaaattagctgggtgtggtggtgggcacctgtaatcccagccacttgggaggctgaggcatgagaatcgcttgaacccaggaggcagaggttgcagtgagccaagatcgcaccactgtactccagcctgggagacagagtaagacccctgtctcaaaaaaagaaaagagagagagacttttcagtgttaagaatctaacgatgcaccatcgttctgcttgttgggaatacgagttaaagtctatttgtctacttgcctgatcaagcttattgaattattccagtcctctttatcattaatttgcttttgtttgatggatttaccagtttctgagattgatgtgttaaaaatgatagaatactggccaggcatggtggcccacacctgtaaccccagcattttgggaggctgaggtgggaggtttgcttaagtctaggagtttgaaaccagcctgggcaacagagtgagaccttgtctctgcaaaaaatagaaaaaattagccagatgtaatggcatgtgcctgtagtcccagctactcaggaggctgaggcaggaggatcacctgagtccaagagttcaagactgcagtgaggttttgtttgtttgtttgggttttttggtttgtttgttttggggttttttgtttgttttgttttttggtttttgttgttgttgttgttttttgagatggagtcttgctctgttgcccagggtggagtgcagtggggtgatctcggctcactgcaacctctgcctcctgggttcaagcgattcccctgcctcagcctcccgaatagctgggactacaggtatacatcaccacacccagctaagttttgtattttttgtagagacaggtttcaccrtgttggccaggttggtcttgaactcctgatctcaagcaatccacccacctcggcctcccaaagtgctgggattacaggcatgaggcaccgcacctggcctgcagtgagtcatgatggcaccaccgcactccagcctggactacatacatacayacatagtaaataaaaatgagagtataacatgaaaaagaaaaaatctcctttccctgcccacctgaaacccaatctctcacctcaaaaagaaaytattgtctttattcccttgtgtcacacaaaggagtgtaattttttgttttgttttgttttgtttttgaaacagagtctcaatctgtcacccaggctggagtggagtggtgcaatctcggctcactgcagcctctgcctctgggttcaagcgattctcctgcctcagcctccygagtagctggcattataggtgcctgccaccatgcccagctaatttttgtatttttaatatagatggggtttcaccatgttggccaggctggtcttgaactcctggccacaagtgatcacccgcctcagcctcccaaagtgctaggattacaggcatgagccaccgcaccctgttctgagcttacttacttaggtgctcttaggtgctcacccagcctaatttttttttttttaagtattggcatattttaaagtttcaagagcttaaagcaaaaaaacctcattggggacactgcaaagagatgttaataaaggattacactttatttcatctgcactatcttccctttttttcttagcgtttttcaggacrgccttcttggtctctcactttctctgcctcattagcgagtccatccgcaatcagtgctattgcgagtctctctctgactgtcttcactttcccttcctgtttcctgatatcttcctcagtraccagaaattgtttgcagaggagctgcgagatacccactccctctgcaggaattatctccaccgcatctgaagagcaggcaaggtggggcatggggcaggagtgctccagaccactggcaagatcctccagcagagatccacctgtgtaactagggacaagtttttgcaaggtattggcaagatccaaagtgcttgaaagttctcctgcactgctgtaagcctggagtccctgcagtctcctctgccagcagacctgctgaggcttctccaagctctcctcccattgatg

SEQ ID NO: 9977 - DNA, 45149 bp, Homo sapiens
  misc_feature (4258)..(4404): n is a, c, g, or t
  misc_feature (35446)..(35446): n is a, c, g, or t
tggtcctgcccttgacacataggggttatggggattacaattcatggtgagatttgctggggacagaagggacacagtcaaaccatatgagttgccgtgtcacaccaggcccctattgacttcagtaagggtgataccatgttcaagaagctgaagaagggacccagagccagcaaatgagacatggagtttactgagggaacttacatacagggtagtccagtggcagtaggttggacagcagaaccactaccatttgtagaaatcacgctgtttatacagaattttcacttggcaccctctccttaggaacccctacctaacaaacttcatttaacccaaaacaaacagcctcaatcccctgtatggcctgcattccatgggatgggctgggggttcatatgttcctcataaataatgaattaatctctggattggtcacttttgaattccttacctcgcagctctgaacacacattgtttttagaccatagggtcattctcagggtatgcttaagttgagttattgctgctggtaggtacatctgccatacgtgccattaacttcatgattttgggtaagtgattttatctcaagtcttcttttcaaattaaggtatggaggggagggctagaaggttgcagaggtgaaagaggtgggtggattagattgttgaggttcattccaccactaagatattargattccctctggaacttctttgaagctggatctatcgttcttcttctacaacagaggtagagtgacgctgtgacccttaggacagtacataaaggtcagagggccagctgattgtaaggctgagtctcaytggggctattattatgatctttgagtggtagagttatctagacaaactttagagagtcatttagctattaggttgctttattacaattttgtttccaattttcctatgagaaaagataaaaggagataaaatcatgaaatctttatagcatgaaaagcatttacttggggtaaatcagagcttaatatctagttcaaaagagtgattttaagtgttgttcttcgacagcagtattaggatcacctgataacttatttgaaatgcaaattctcagacctaccttatcagaaattctggatgaagcccagcaacctgtgttttcaggagccttccaggggattccgctgcatgattcagtttgagaatcattgccctaatgttgctgcattgaacagttgggaagcttttattggtttgcgtggagatgggaaagggtaagatcttcttcctaaggcagaactcaaggaattactaggtctgcagaatacctcagggagaggctatgagcaaggaggtctccccatctgaaatccaaagcttctcattgggcttgacatcttgacatctttttattctttttttctttttgagacgggtgtccctctgtcacccaggctggagtgcagtggctcgatctctgctcactacaacctccgcctytcaggttcaagcaattctcttgcytcagcctcctaagtagctgggattacaggcatgcgccaccacgcctggctaatttttttttttttttttttttttttttttttttttagtagagacggggtttcagcgtgttggtcaggctggtctcaaactcctgacctcgtgatccacccgccttgccctcccaaagtgatgtgattacaggcgtgagccagcacacccggccgacatctttccattcttaagaagatagagccaatatctgacagttggtgtggtcagggtgcaggctgagacccaagctcacagagatccctgatatttccctttccctggctcttttctgcctatgaaacagatgattggaattgttaaaagagcatggattcgaatcccactctgccaggcccttatttatctgtgagaactttgggaaacttcatcttatggagccttattttcttcatctttggaactaataccttgagcagtttatgtgcttaaaaagtggtttacatacctcacataaagtactcgcaagtactcaataaacactaattccttgctccttgataccctgatagtacagaatgggcctggccacagccattctgactcactggtgttcaactgtaccagtttttaactattttacatatcagctctgcttgtgaaaatgtaagaatattttcttattttttgcaaacacattttcttataggaaagatgtgggcagacttattaacacaaacctaggataggtttacagtttatttaaacagatgaaaaaataatgtgaatattcaaattactgacaaaataagacattgcaaaattggggcagggagggggaaattggccaaatttgaattttggtaatatggctatatcaaagtaatatactctagcatgatctttttcttgacattgccacaggaacacctacctgtcaggaagttaaaccaaatgtcaatgatcatggtatcattactcatcctaagaagcttgactggccatcactgggtctgggtgcacttcctaagcagtggttgagcctggaattaacccatagtcccaactaggtgctagggggcgctatgctgcagctctcagacagccaggtgtcctctggctatcataaccaatgcatatcataacctggatatgcattgtgtggagccctttgaagtccttgaatctggtgtccatagattttttgtttccagcagagtattagtatattaataatttggtgggggctcacacctgtaagtgggcagatcatttgagmcaaggtgggcagatcatttgagcccaggagtttgagaccagcctgggaaatatggcaaaacttggytgggctcagtggctcacacctgtaattccagcactttgagaggccaaggtggttggatcacctgagtgaggtcaggggttcgagaccagcctggccaacatagtgagccctgtctctactaaaaatacaaaaattagctgggcakggtggtgcgtgcctatagtctcagctactcgggaggctgaggcagcagaatcacttgaacctgggaggtggaggttgcagtgagctgagatcacatcgctgcactccaggctggagacagagcaagattccgtctcagcaaaacaaaaacaatagatgttggtgtggatgtggtgaaagggaatgcttatacactgctggtggaaatgtaaattagtacaacctttatgaaaaacagtgtgaagatttctcaaagaacgaaactggacctacagtttgatacagcaatcccattactgggtatctacccaagtgaaaagacatcaatttgtcagaaggacaactgcatgcatatgtttattgcaacacaattyacaattgcaaagatatagaaccaaactaagtgcccatcaaccaaaaatatggaactraactaagtgtccatgtccatcaaatgatgagtggataaagaaaatgtggtatatatacaccacggaatactacccagccagaagaaagaatgaaataatgtattttgcagcagtttgggtggagctggaggccattatactaggtgatttaactcaggaatggaaaatgaaatactgtatgttctcacttataaatgagagcaaagctatgggtacaagaaggcatatctttgagwggtataacagactttggagactcacaagtggggagcttgtgagtctactagggaggctgaggcaggagaatctcttgaacccgggaggtggaggttgcagtgagccaagatagtgccactgcactccagcctgggcaacaagagcaaaactccatctcaaaataaataaataaataaataaaggaataatttgtaaaaacaaacactgttcaagggtaactaaccagaaaaatgaacacaactagacaaggtactcaaaagggcttcctcaagacagtgacatttattttgggcttttataaaaacaaatttggattaaagttgtaaggggacctattagacaaagaagatagctgacttttgtgcaggggaaggaaaacagactttgtttcaaatagttgtagaacctttaaaactattggcacatttcttctcacactgtaagacttaagatgaacagaaaaatgtatttagcaaacaatctactacatctactcctgatgttttttcttctaattattgaaaatctcagctatattttcttatggggatgcttttagagtcgaccctaaaggggatcatagtctcgaagtnnnnnnnnnnnnnnnnnnnnnnnnnnnnnnnnnnnnnnnnnnnnnnnnnnnnnnnnnnnnnnnnnnnnnnnnnnnnnnnnnnnnnnnnnnnnnnnnnnnnnnnnnnnnnnnnnnnnnnnnnnnnnnnnnnnnnnnnnnnnnnnnnnnctaatgttgactgtcttttaaagttgtttttcctctaaattttacttgataaatcattttaaattcgtttgtacaatttttgaatttgttctcttacatgacactagataattgtagaccaggcaaagtttgtatactaactgactccctgtctaccatctggtgttccccgcccccgccaccataagtggaacaaacttccttccaaaaaaatttacagcagtcacaaactgctgtttatgatcattttagatataaaattccataactcaagttagcattgacattttataagtgctgtcaagtcactctagggaatgaaaatgagcatctcactatgtgctctgaagtggggacatatttctctgcttgttatggacggtgagagatggctaaattgaagcagagaaatatttcagtgatgcagagcaaaggtgacttcctgttttgtttcaggttttgtttccttctcctctcaatgaaggctgtgttttctgacattcggcaatccttttgctsagtgatttcccattgagagggcatagtgtgaaggcctctgcaggtcattccatttacaatataagctgaaagggtagagtggggcgggggtggggggaagagggagctcattagtggaagaagcagaccaggaggggatctgttttccattttctcctccagattgaactcatctggatggaaaggttttgattgttgttataatcatcattattacctgcgtgatgtcgttttcctacactttttttttaagtgtcgggcagaattgttgctgagaataacaaataatatctgccatgttatccgtgagcaaaatcagaaaaaaaaagtccaagtgtattagagctgttagtttccacgttaacccttaaggagcaaagctcaagagttctaattccactaggtggggggggcgggaatagaaggaaaaaaccccttttccttgcttctggtggcctatttgtagtcatgaacagcatttctttgtttctctctctctttttttttttttttgaaaggcaatcctccccccacctcctcccccgcagttattgaaaatggagacctctgtagtcactagctctgggttgatatggctccaccrttgctcgcaggggtctgtgttttccgctacttggacaaagtgacattgcttaagcctttccccccaccaggtctgactttctgcagagccagtgattgcagaggaaaagctgtagtttgcttaaaggaaatacctccaggaaggagggtctcgggtgggttcccaagtggggaactagggggacttttccgtagggaattggggtgggctcttcagtgaggggctaggggctcgtttctggggccaaagacgggttccctagtgtgagggcgcgctcgactcggcgctgtcttggggtctcgcactcgcacggcttcgcaccccacygcctgcgactcccaggccttctcttccccgggcgcccactccattctcgggaagagcagccggcwctggagggcagagactgccccaggggcggagctccctctcaggcgggaggtaggaaagtgcagagccgcccgggcagaggcacagacgtccctgcggggctcctcctgagcgtccctcctgccagccagggtcgcagccgcagcggcggccgcagctcttagcccacacaggacttgtaaactcttactgcacccttctctccattaggagcttttcctccctccttccccccaacccctctgtcctcctcactttggggaatttaatgctttctttagcatctttttgtgtgcgtgatctaggggaggagacaccccagagctccaactagctctcagctgaattctacttttgtttttatgtcttcctcgcctcctctcgygtccctcttatctgactgatctgcgaagtctgatgcttctgccagagggagaggaataaatagatgttgctgcttccgaaggcttagacgttgggaaagagcagcctgggcggcaggggcggtggctggagctcggtaaagctcgtgggaccccattgggggaatttgatccaaggaagcggtgattgccrggggaggagaagctcccagatccttgtgtccacttgcagcgggggaggcggagacggcggagcgggccttttggcgtccactgcgcggctgcaccctgccccatcctgccgggatcatggtctgcggcagcccgggagggatgctgctgctgcgggccgggctgcttgccctggctgctctctgcctgctccgggtgcccgggkctcgggctgcagcctgtgagcccgtccgcatccccctgtgcaagtccctgccctggaacatgactaagatgcccaaccacctgcaccacagcactcaggccaacgccatcctggccatcgagcagttcgaaggtctgctgggcacccactgcagccccgatctgctcttcttcctctgtgccatgtacgcgcccatctgcaccattgacttccagcacgagcccatcaagccctgtaagtctgtgtgcgagcgggcccggcagggctgtgagcccatactcatcaagtaccgccactcgtggccggagaacctggcctgcgaggagctgccagtgtacgacaggggcgtgtgcatctctcccgaggccatcgttactgcggacggagctggtgagttttgacacggcccacccttcccttaccctacagcctcctcaattcttggagtccttgttactagcctttactctctaatttttttctcttcggatcacttaatctctcccataactgctcctctatcaaagacccttcttcttctttcttcttttttcaaaaacaaaaacaaaaaaaccctcaccttatcaccttccaaactgatgcactctggcactgtgttccaataggcgatctttctaaaacaatccatgcattccaaacccatcmcacttctactccacaggaatccttcacttcaactccttacatgtgcaagtagccacattttgtaaagtgatgctctttttcttttaaaatgtgtttataatcattgggttttctttgctgattctcaggcaatctcagtcatcaggtttctgtatctttagtgtcttagatgcttgttaagattgtgtggaggaaacagaaaactgaagccccattttcttctaattaaaaatgccaagataatttcaataaccttactctaaccgacagatgttaggggtatgtgtttgctcaagatccagtttgagcaattaccttcaccttaaatttccccctcctttcaatgagataaattgttcttccattccagaatgaaacaattgtgaaacattgctatgcactgttaattagcttctgtggcttgccatagagctggcagactgaaattactgagctcttttcacatgcccacatgccttcaagtcattttataagtggcatacagatgaaaggagttatatttaaggcgtgttatcatacactcacrtaatgttattttaaatctcaccycttattccactctcatgttttgaaaaaaaaattgtctttaataccttatttcatgctccttttccgtgtgtgcaccaaccacagtcatttcagtctttccctaccataaaactttattgcagctctaaatttaatggagtcaatcacaagttgttttctcactagtgtttagtctaattatgacatttgtaactttaagaccccaactaaacctacttcattatggtccatttaattctaactcagtattacttctaccaactaacccaacctcaaattttacccttcatatattttataaagaaggcaattttttttcatgagtggtcctctttcataccacatcccccaccccccaacaactctgttcttagatgtgttgacttggttgcctccatctgtttatttcttgggcatcaactttccttcctctttcaacttgcrcagtctaggcgcatgtccccagtccatttccaggtagtaattcttagttatcgggaaattgatttggaaaaattaccttctgtgcacgttgactcatttaacaaagtgagagaaggagaagtaattgtaaaaatagctgaaggaaaaaaaataaacagaagaatttcaagaactttttaatggtgacctcacttagtttatcactttttgaatatacctattgtcttcttgattttaatcaagaaccaaaagctagttgtgcaaaatcatcacagaaatgtatttgctattaatctttgctaaaagagcatgcttraggcttcgtactcactaaagtcacagactgcagagtctggaagtgctcagtgcagttgccgctctggtttgccaggcacttagaatcagttaaatgcaggtgctcctctcaggccaagggcwaggaatgaggtggcagtggttcaggctgaaatgcattcctccccgtaaagcacaaaacttgctcttaaacctcccttagaggtggacctagagtgagtgaggtttggcaaggttaatggctctcaaaaagccatagtcaatatggataggaagcagtttcattaagtgtccctgagttaccaatcactgtggaacaaacatggaaacagttgcctcattgaagcactcaaataggacatgcatggaaacaatttgtcagttcatgggacctgatttctaagcttctttaaaatgccagagtatttgctttactggcagcatccttgctagaaaaataggtggtagttggaatcatagttagtgatggcatccctgctcccttccataagcttcagtgtgaaccagaggctatgatggcaaggggagctcaaaggtggggggaggtggaaattgggaatgaagtgtgtagattgtagcctgaagggtctcctggcttccagggccagcttgttgaaaattacattccctatgctgggtcaaactgtcagacacctggaattacttaggaactaccacatgtggccagtgtaatttaccatgcaatatccaatatactctttggttcagtgggaagtgatagttcacaaagcaaggtttttttcttattcaactgggtataaacagaatccctgtgtcttttgactagtatctgtccmactagatataaaaatgaggtctccctgaataaaataggacaatctttcacattcttctgatgccaagargattttcaaatcctacccattcatggggatctgttctctcatagtatatcatgactccacaaacaagcttaggaccttttacaaagcagtcttactgaaatggagtaatgcttgaaactactttttgctttcaaaatactaagggtaatcatatttttgaaaagaacgggttccatcctgaccattattattcatcttacacattttatatttgcataactttgtgtgactacatgtacaactgattatctgaaamctcagctcaattgagtcattcagcaagttagtgatgacattcagtcaaatctttaatattgtgtggtgagtaaagaggataggcttggagtggggcagaccaggtgtgaatgactctgccccgacatcaactattgttataggaaaattatatgacctctgtaattcaaagttttcttatctgtaaaattaggacaaaactatctacatcccaagggcatggtaaagatgaaattaaagctggtgcagtggctcactcctgtaatctcagcactttggaaggccgaggcgggtggatcacttgaggtcaggagttggagaccagcttggccaacatggtgaaaccctgtctctactaaaaatacaaaaattagcctgggatggtggtgcgtgcctgtcgtcccagctactccaggaaactgaggcaagggactcacttgaactccggaggtggaggttgcagtgacctgagatggcgccactgcactccagactgagcgacagagccagactgtgtttcaaaaaaaaaaaaagaaaagaaaagaaaagaaattaaacagcatataaagcattgctttagtacttagtaagcactgaaaaaagtgctgctgctgttttactattatcactgttaaaacaaattgactaacattttctattttgtttttgaaatggttatgttggtaaatgcagatgcagcctagaacttttattagttcatctctggggaaaaacaaaacaaaaaagctttacactgggacctaactggaaaaacaaatcttatttcttctaaatatataaagttagtatttccttttacacaaattgacctagacctcaggctcaagagcagatccccttgggagcgacagaaaaaagaatgagtctggtggaggagttaattacaaataattcatctcagaaacccaggaatcaagcagttaagaaaatttatggtatgatatttcacagctatttccacaacacctacagtttgccgtgccaagggctttataatcattcctcagtcagtgctggcttctggggcagtgttaacttttctccccagctcttgctcaacacgtttctgcaggccttctctctcytggcatgagccgtgccaactttcatatgcaggagctgccatttaatcgtttctccactctcagagaaacaggcagtcttttctttagccctgttctacaaatatttgaggggccaagtaccaagaaggaagaattatttagtgtgatatgaggaggaaaatggaaaggagaaatggaaattttagattagaattaaagggaaaacatgcttctgargatccttcattgtgtaaaatactgaaaggcactctggatgggttagggaagagtatctcagtgttatgttagtagtatttaactttatttagagcaacccccattatcaggagtaatgtaatcttatgtagtctccaaatcttaataatttactttttatctcattcccactaaaccttcaaatagttgttgctacaaattgcaaaactgactaggttatatttagctcttctagttctacttggtgtctagaatgaggagaccaacagccaacaaatagagatagttttgaataattaagaattggctacatctcctcaatttagagaaaaccacagttttagagttacaggcccttagttggaattctagatttgccattaattttgtacactgaactagtcgcttgacattgacattcattagggattgtgaagaacaaaagaaatagtaatatgaagttactgataaacggtaaagcacaatataaatgtttaacaacaacgtcattggggagaggacgtgtcatcctcaggacaggaaccattagcaacacaataaaagcaaccaacacttatgttctaggtgctgtcctgagtgcattttgcacattcattattattcccattttggagaaaaggaagccaaggcatatagagaagctaagtkactgtccaagttmgcagagctagtaagaaaaagagaattcgaagcagagcctgttctacactacactttgtcccttaagaaatgtaattcctaactttctagagaatctgttattctttgcctagcagattgcagttaaaggaacaaaggttttctcattgtattttgaagtacacttatctatggcttaagagaataaaaggtggcttctagacaatggattcaaagagataagagattctgacttcactgcaattttgagatagtagagattatacattccagattctcatgtccctagtctctcggtctcagcatgccccagcgtgaactcatcatttccccatagtcatgcacttgtttctttctagtattttctatattgttgaaaggtaccaccataccttagtagtccaggcctgggaggcagtctttttttttttttttttttgagacagtctcgctctgtcactcagactggagtgcagtggcgtgatctctgctcactgcaacctctgcctccaaggttcaagcaattctcctgtctcagcctcctgagtagctgggactacaggtgcatgccaccacgcccagctaatttttgtatttctgttagagatgggttttcgccatgttggccaggctggtctcgaactcctgacctcagatgatctgcctgccttggcctcgcagtgctgagattacaggtgtgagtcaccatacctggctgtgggaagcagtcttgattctacctttttcctcattcccctcactcaataggtatcacatgctgtttggtctactctgactcaaattcccttcyctccctctctaatgctactttcttagtttggaccttaccatttctcaccaggattatggccataggatgataatggtctctcttatctccagtatttcccctccatattccaatagacattttttctgaaatgcaaatcttttgcttaaaatccttactaataatatatattttcatttagggtaatttgttgttagaattcctaagtttaactttctgacaataattttttgatcaattattagaaaatttttgttttctgtcttacagttctaacaattgacttctaagcatttgtaaaagcgtagaaacattttcctttgaataagaatggaagaagtaaaacactctccttggcttagctattttgaagtgattccctttcaccaagcaaagttttatttttcactcttatttctacctttgaacaataaacatttcaaatatgggccaatataatttcttcctttatgaaracattatttttgtatgtagtttatcacatgattattcagaaatagaaaaaccactggcacgttactgtaatacttgggtacatttatcatgaataaatgtttgaatataatgaaagtattagyaattaatagtttatgcccaagttgagccaaatgttttagaattagtgtttgttacttgcttatctgtttktttgctgactgctrtcttttcttggatattgctttttaaatacttgctgatgattactaaacctgggaaagtaattcattaattgtaattgtgggtgttatagtcctaaaatagtattaaccccttgtttaatttattcctgataggacctataaacaaaaaggacaaaggaagaatactattttctcctagaataaatagaggcattaaattagtttagcataaagtgttactacaaatgtaaaactcttatataaagtactaaattggagtgtcaataaggatatattgctaggtacagcatctctcagcayggtgttccgctggtgcactgttattcattagaggctgctttcttaattagaacacagaaaacctttatcattactattttctgggattatggcatcctaaaaagaatcaatagcaatttctaattattgtcacatctattaattgcactggcttgaatagtccctgaatagtaggtttcttttctgttgaagaattatttagcctgcagttaaaggacatgagaatgatttctgagtgttcgtttaggaactaaggatttaaatatataccagttcagtgtgatatgtcyatttattgaagatgcgtttggttttttttttgtcatcaagtcataagtgttggatgagtgcctaatatttgcataggctttatcatgataggatgcttatcatttacaaattttgtgaaattcaaataaattattaaattctaaaattttatgcacagttgagtattcagaagagtatttccttataaccacatgaaaaaataagtctcatccatactcaacccaygaatgataagaatgccgacctcatgacgttaataaaaatctacttccttcagacaattggattcttacccaaatcaaacttgtgactgagttagatttttatctttaggaattcttgaaatagatatgttatagttcttttttctgtcacctcctttcagattttcctatggattctagtaacggaaactgtagaggggcaagcagtggtgagtatatcattatcttcctggttttcatttgtggtcagattagtcattgatgtaatttagatacttaagtcattcatggggaagcttgtgccctacattttacaagtaaactttttaaaattccctcatttatattaattttatttttaaaattagcacgtagtaaaattggacttttatttggacatatagtttggtacagatgaattttaatattatgtagagatttatgtaaccaccaccacatcaggatacagaacaattccatcacctcccaaaactccttcaagctgtatccctttataattacaagttttccctatcttcatccactggcaatcactcatcttttctttatcactatagttttctctatttgagrttcgattgtccatatagacagactgacagtacgcctttgagacttaaccaattgctgcatatatcaatggtgcattcctttttattacagaatattttattacttggatgtatgaccatttgttcacccattcactccttcaaggaagtttgggttgtctccagtttggagcaatcgcgaatagagctactataaacattccagtacaggtttttgtgggaatgtaagtttttatttctctaggctaaatawgtaggaataggatcactgggttatatggtaagtatatgtttagctttgtaaaaaagtgccaaactgtttccaagatggctgttcaattttgtgctagtaatgtataagagttccagttgttctatatctttgcgagcccttggtattatcaatatattttattgttagccattttaataggtatgtgataatagctcatcatggttttaaattgcatttccctaatggctaatgatgctgaatacattttcatgtgtttatttgctatccacatatatgctttttggtaaaatgttcaataattttgcccattttaagttgggttgttttcttaatgagttctgagggttctttacatattctggatacaaaaaacatcttttggttttattcattttctctattgtttcactgttttcaattttattgattatttccttctgcttgcttgctttagaggtttattttgctttttcttttgtttcttagagtagaagcttatattgtgttttgagactttttttttttttttgagatggagtcttgctctgttgcccaggctggagtgccgtgatgcaatctcagctcaccacaacctccacttcctgggttcaagcaattctgcctcagcctcccaactagctaggattacaggtgtgcaccaccacacccagctratttttgtattattagtagagacaagatttcaccatgttggccagctggtctstaacacttgatctcaggtgatccacccaccttggccttacagagtgctgggattacacacgtgagccaccatgtccggccaagacctttcttctaatataatgtaatgctataaatacccatctaagaatgactttagttgcatctcacaaattttgatagtttcatttttcttcagttcaaaatattttatatttttccttgatatttcctttgacttgtgcatcatttgggattatgctgtttaatttgctgctttttgaggattttcctattatctttgctatttttcaaattctactgttgaagaatatactttgtgtgatttcagttcttttagatttattaaggtttattctctgatccaggatataatctgtcttggtgaatgttccatgtacacttagaaaaaagagtattttgctgttgggtggaatgtyctttaaatgtcaattcaatttagttgattaatactgttatttagttcttttatattcttgctgattttctgtctactagatctattgattaccgagagaagggtgattaggtctccaaatattgtggatttttctatttcttttttcagtctgtcagttttgcttcatgtattttgaagytctgtttggtacatacttgtttaatattttttatgtcttattggtgaattgatgttttcattatgtagygtccttttatccttggtaattttctctgctctaaattatattttttctgatattgctatagstaattcagctgtcatttgattagtgtttgcagggcaaaactttttctatcctacttttaacatacttaagtcattgtgttttaaatacatttcttgtagacatcatatagttgggtctttttaaaaaaatccatactgttgatctttgtcttttgattggtatgttttgaccatttgcagctaatgtagttattcatatttgtatttagatctactgttttattttctgtttgtgccctctcctttttattcacattctcttctttcttttggattgtatctctctctctctctcwcacacacacacacgtatgtgagatatatatatatcctcatgagataattttatattttttcttttaacaattacatatcttttaaacaacttgaggagaatagtagcctactgtatttttacagatgttttaatttctattattcttccttcttttccaacattccatacttccttctggtattctttctcttctgttcttcagacagaagttctgtctgaagaactttcttaagtattttttgtacttgttttaaagcagttctgctggcaaaaacttcttttttcctttacctgaaaatattctcatttcaccttcattcctaaaggatattttcactgcatacagaattctaggtttgcagtacatttagcacataaaaaatattccacttccttctggcttcaatgtttctcatgggaaattggcagtcttgcaaataattgtttccctgtaagtaatacatcagttttctttggttgcatttgatttttttttcctgtgtctttagtttttagtgctttaattattacatgtctgggcattgattcctttgagtttaccctgtttagggttatctgagcttcttgaatctataaatttataatgttagccaaatttgagaagtgcttaggaattatttcttcaaatacttgctttttacacaatagtctcttctatgatgatatgaatgttagatcttctgatattgttccacaggccccagagaggctctgttaattttttctcctaatcttttttctctcttgtttagattaggtaatttctattggcctagcgacaagttcattgactctttcgttggtcttgttcaatctcctactctctgaaacacatccagatagtttttatttgttagtatatttttcaaagttaaaagttccatttgattcttcattatattttgtatttctttggtaagactttctatctttccatttatttcaagggtattcacccttaatttgtgaggcattttaatcatagctaccgtaaagtcatctgtgtcacctaattgtcttgtcccactcaagtcaacatttttttctctacatcttcatgtgtagagtaattttgggttgaatcctggacattttgaatatcatgcaataaagctttgggtcttgtttayttaaagttatatggaaaatgctgattttctttttttaattttagcaacagttaacctagttaggattaggctgcaaattctgactggtcttctgtgggttgtgattttaatgtcagttccatttccaaagccttcgaagtaccttccatatctatcccacatgtataccactcagtggccagtatgaggtcagagcaatactttatcctacagtgcagtttttgaaatctgtgatacactgttttatgtcagagtcacacatgcccaggggtgacttcagtagttcataaacaactttacaaaatcctttcccaggctcctttatctctctgatctcccttgcacttttcagttccttggaattcccccgttttggtcctttggctagaaagctttatcctactctgtgatttgcttcttgtgactgctccttcctatggggccaagtggtgggaggacagagaaagagagagagagacaaagtaatggggatttgccccagtcttttggaactacaagtcctccaatcagagggtaagattctctccttcatcaaagttttgggctcctgagggtctcccttgttgcagccgttgctgttaccacagtcccaggatgcctggaggaatggaatgcaagaggctgatatgttagagatcctttccacttcttgagttagaactggagtgtactctgtctgcaaaatgcttgcctctacgatacaggctgtgttgacaccagactggtggataccagagggaaaaaatgatgagcccactatagttttatggtattattttctccccccagtcttcctgttatgcttgtattacgttttagagttcttatgttgctgcttcatgcactctgttcaggtttcagatctgctttcagtgggagaaacaagatggaatctacttattccatcttaccataaaataaaccattaaagtataacatgcatgcagaaaagtgcacaaatcataaatgtgcattttcacaaagtaaccactctctgcaaccaagatatgtaacattaccagcactccagaagcctccaagtcactacccccacccttctcttcaaaggtaactactcccaggaattctagtaccataaattcattttgcctgatcttgaactttatataaatggaattctacagtatgtatttttgtatatgcatgtgacttcctatgcttttcattaggctgtgtatagcagtagtttttcactttaattgctatattgtattctatcattgaatgtggtacactttattcattctaatgttcatggatatttgggttgttttcagtttttgttacaatgactaatgctgcatttatttctacaatatgatagctgcgatgagtaccatatattccatttcactttcctstagtattttgcactgattttggtgagtatgtcctgccttataaggtgtcttatctgtggaaatgaaacatttattttattaagttgtaaataagtttgaaatatcaactttcattacattgggacagttttctctgttgacttccactgaatcttatcatggtgatatgtttgatctgagggaatgtctaccaaaggtgtcccaacaaatatttatcccattaaatacataagtaaattaaaattattttagaattgttttgttactttatataattgataatgtttttcaatatcatgaaatcagttggaaatcattgctgtccagtaatgttgctatttgaagggtcactccttctattatgttttctcaacccgaactgaaaakctcatttgtataaaactgcaattggtgggtcaaaatttctggccaaggacatgtatatgttaccaatttgttccaaagttatggttagagtaatatagcacttcaatgtatgaaagaaagaaaacacatcaacaacactatcaacaatatacaaaaaacagttcaacatgtaaaactacctagaacgaatgtggtgttctcagagtcagtgtttactgttcgtcttttaaaaatgttttccagttctctggcataatgagagtgatgaaaacaaataggcaaaaccaaagctcattctgtttgtgaaaaaaacactaacatgttcacatgttctgaaaaggaaatataatttgttcacactcaaaaatttatgctttggagaaatgtaacagctgaggttgatcatgataaaacaggaaatgaggaaggcatgaaaacactgtaacccacataaggacctctttccaaagtgtcaagctgtttctgtctggaatttggaaaagaaattctttcactctagttaatatattctttgcctcaaagcttaactattttttctttttctttttttgagataatgactctgaacagcatccaactgtacgttttactgttgcaaattcactattgtaataaggaatagatgctctttatttccatagcgtgtaatatggaggaaaacaatttttgttctatttcacctagtcacttgatctatcaaatcagcacacagaaaattaaagcagatattcaagtggtccaatgcaaagggttttttttaattaaaataattccaaaaagtaattcttccaattttctgctttgtgagggtgaccaatttatgaactttcacatttgaaaaacacaaatgtctccagagcggagatagagttggtaaattctgacactaaatatataaatgtgaccaaattatttcttggggcctgtttcctaatataaaatcagattgtattgatctgagttcccttctgatttatcttaaattagggaacattagtgtaagtcagatgctctcccagagttttcactaacctgytcttggcgctgttccaaaggtgctccagagaagctcctctgggtagctgcctggtggccactgagcaactggagattcctgatgactgcagctgccaggcctgcccagccactcccacttttgctgacatgatttatgcttagcttgggtagtatagacccattccctctctttctttctattacacttctttcctccctkctggcttactaccaattttgggaagaagttcagtttttttctttggtacaaatgtttactgactgtagagccaacttccacaccttattggaraaaaaaggatagacaaatagtatttttgtgattttacagtagcttaaaactataggattttttttccccattactttgcaacaactgatacttttgaccagttctctttcctaagcatttctctccttgagctattacccaaattgtcctagttcttctctgcttgtccctcagctatagacagtcactgaggctctgtgcttggcttctgttcctctctcctcatarggattcctcctgttggagttcatcaagctacataggctgaattatcatttttatgactctagttgtgattactctctaggaccacatttccctcctgtaacacttctacctgggtactctttgagtacttcaaaaataatgtatttaattactgaagttgttttttttttgttttttgttttgttttgtttttttgagatggagtctcactctgttgctcaggctggagtgcaatagcacgatctcagctcactgcaacctccatgtcctgggttcaagcaattctcctgtcttagcctcctgagtagctgtgattacaggcacccgccaccacgcctggctaatttttgtatttttaatagagaaggggtttcaccatgttggccaggctggtctctaactcctgatctcaggtgatccaaccacctcagcctcccagagtgctgggattacaggcgtgagccaccgtgcccagccctgaagtaattgtttaattaaaactttctcttttgtaactttctcatttaagtatgtgacaccattgcttttctaagtccctagtactgaaactttatttggttttagtccaccgatctcaccattcattagaaatgtaatgatttgtcctgccaaaaagcttctgcacatcaaaggaaacaatcaacaaagtgaaaagacaatccatagaatgagggaaaatatttgcaaagtatctggcaagagcttaataaccagaatatataagcaactctgacaattcaatagcaaaaacaaaacaaaaaacaacaaataatctaaaaatgggcaaaagatctgagcagacatttctcaaaagaagacttacaaatggccaacaggtataygaaaamattttcaacatcactaatcagataaatgcaaatcaaaaccacagtgagatatctcaccccagtttgaatggcttttatcaaaaagatggaacaatagacggtagcgaggatgtggaaaaaggggaactctagtatactgttggtgggaatgtaaattagtatagccactaaggaaaacaatagggagttcttcaaaaaactaaaaatagaactaccatatgatccagcaattttattactgggtatatatccaaaagaaagggaattaatacattgaagaatatctgtattccaatgtttactgcagtgctattcacaatagccaaaatgtagaatcaacctaagtgctgattagtggatgaatggataaagagaatgtartatatatgcacaatgacatattgttcagctattaaaaaaagtgaaatcctgtcattygaaggaaaatggaactggaggtcattatgttaaatgaaataagccaagcccagaaagaccaatatcacacgttctccttcatatatgggagctaaaaacagaaaaaagtgaatctcatggagctggagagtagatttgtggttatcagaggctgggaatggtagcgtggaggagggaatgaagagaggatgattaatgaggacaaatatacagttagttaggaggaagacctagtgtttgatagatcagtatggagactatagttaacaataatctacttgtacatttcaatatgtacaataattcacatgttcacagcataaagaggaatgtttaatgtggtggatattacccwaacttgatatttacacattatatgaatgtatgaaaatatcaatgtactctgaaaatatgtccatctattatgtattaataaaaaatataagggacacttactcgtatcaggcacaatatgtgccaatgacatggaatgaaagagcaaataggtgactggcactccctttcctttcacctcttttcaatacttggcattgagtggacacatggtgttctagaggctgtgaagcccccttttctttttgttaattgacttccttagagtctatctcaaaacaacacttcagaagtcatgagggaaaacaagcataattgtattgactctttctatattttggatattctgaataactcttggatgcagaaaacttgtgaaaggcagtttatttgaaattttccaaagacaaaaaggaataaactgaatttccttttcttattaatatagcgttagttctgtcagtcttaagcaatttcttttacaaagtgcaaattactgtgaattgagtcctttattacaatatttgaggtttgtttttacagctaagttgagcaaatgttacttttactttgtaaagccttgttatatcgcctaggttcaccagtcaacttcatcacattttccatatactggtgtaatccaaaataaaatttaatatgatattctttgccctgtgtataggtgtaggaaataaatattgttttacataggtaatgaatggttactaagtcaagacacacttccttttataaaaaaatgaaagaaatgtcttattttttgttaataggactttattaaggtataatttatttacagtaaaatactacaaatcttaagtgtatgctgcatttaaattttgacaaatgtatatatttatgtaaccatcatccagatcaagataaagaacatttatttatttatttatttatttatttatttatttatttatttatttattttgagacggagtcttgctctgtcgcccaggctggagtgcagtggcgcgatctcagctcactgcaagctccaccccccgggttcacaccattctcctgcctcagcctcccgagtagctgggactacaggcacytgccaccacgcccggctaatttgttgtatttttagtagagacggggtttcaccgtgttagccaggatggtctcgatctcctgacctcrtgatccacccgcctcggcctcccaaagtgctgggattacagacgtgagccaccgcaccccggcctaaagaacatttctttaaattgtctggtgtcttatcacccattctgccctgaggcaagcacagttctgattttcattgccatagatgggtgtcgttattcagcttcacgtaaatggaagcatactgtacacacttgggactggctgctttggcataccatggcatttttgagactttgagttctgtgcatcattttattttatttctaattgtgtaaaagtacacccttgtatgagcataataccaatatgacttctatatggttcctagtttaatatagttgatttctgaatctgcaggagttgtgctgttgttgttgttgttgttcrttttcttccctttcatcattgacaccaggactctagggttcgggtgttttgtttgtttgttaatgccctaggaacaataagaccctgtcggttttccattaagtgtccatttgatgacttgcaattttgggaagagggaatgtgttccatggggtggaatctagggatgttttactatcgccttgtttctagaaggatagtggaattgacctcctgaatggccaagtggtatattgcccatcttctgttttaaggrctatctgaacaagttccaccatggcatccattcctgctgctgttttgatagctgtgatgataaggtagatgatccatctagtgcactgatttcttcactttactaacctgcttgtctattctaccccagccactcacttccatgagcagttctgggcctttcagtggtgctagcagtggtgccagcattgtaatattaattctaagaatcccattctttgcctgctgcctcttttcattccagatgatttgttgcagtatcatcactgctgttttkktttttttttttaccatgttgagattacctatccatcagctactgcttactatctgctaagcctctggccttcttgtctatgtgagatatcatggtctactgcaatactgatacccttgaagataccctcaatttctttgctttctcttcctcttccatactcatctggcaaatcccaactccagttatttgagaaaattactcaactgaggtgactggtttcactttaaattcaagatagaaaattcaaatagacaatcaagattgccaagcattcttacccactataaggtttgcctttctatttgatgaaataactgctttatactttctttgcttacatgcccacatcctgcttttcgtagcccctcattccccatagctgatgacttcacttcattcttcaatgagaaggtaaaagccattggaaagaacaccctcattattccaccaaccaatttayaaacttgtcaatatcagtacctttctctccttttccttcttgtgtagtggataaagtcttctagctttcaaagtcctattctctcttttgctcagggtccagtcatcacgttgccagttgaatttagtggacccttttctctctgaactcattttagctctgagggtcatttgacacagaggactaccctgcttttattttggaagacgctttttcaattccacactctcctgtatttccttccacatcactggatgctgcttctcagtctcctttatggacttcatattctctgtcttatatataaagatgtagttcctgcctagagaactacaactcacccaaagctttaaatatcattttctcacrgtatattggaggccagactagtttaggtcattaagttatatgttcttattacacatatacattgtgttttaatttcatgtcatgtatcacatgtgacaaattattttgtgtgtactttctttgttcaatgtctttatcctcttctggattgtctgtagtgcccatcatgtgtcctacatgcctatcacagagcctggaatgtagcagatgcccaatatttgcagaatgartgaattcatatgtaagtgactgaaagagttcaacaaatgttagttctctttccctttctcatctcatatttacagaagaatggatacaccagagttatggagtcagaagatactactatcagttctacagaagaaagacaaattcatggtgtgatggatgttaccagatgttaaaaattatggaactgttaaaaattttggaactgctcatagatacctcgtacaggcagttggaaatatagatctagagctcagtaaaaaagtcatagttaaggacctggatcttcaaattataaaattttattttttatrtcttttaaaatgtgttgtgytttgctcctatgtgttttaaaatggaggaaaagaggacaattgggattcaggggtcaaatgccaggatatgagacttacagtgcatctggtaaaaattaaaatgatttaaactctgatctgattagaaaaggtcagtcttgaaaaagttataaaggagattgtaacacaaatacaattgtattttcttctctccttccccatagtttttgacaataaatcctaagcacagatctgaggctttttttcctagaaaaaacagaaaaatatccactcaaacatagtagtcctccaaagtcatggtacatgaaaggttatgagagtttggggatctgatgaagttaattatagtcttacacctctggataagacccaaaagcattcaatttcaaacaaaggtcagggatagttagaaagttttatcacacktaagcttgaactcaaacaatgttgcattaaatagtgacrgtccagtgagtgtcatatttcatagctgtatcagggacttagacttctttagatcttctaagatcatatcaaaaatactagtatccttttgtttttaaaaaataaatgagcatatttgtatgagcaaaactgaataaagaaggctaagattcttgtctcctctgaactattttgatctttataagaagctactctgaggcagcaaggctgttcactgctcgggcactgcgtgtatcatggggcatttcccctgagctgcagactaacttctgcgaagtactgggcatgttaactttgcaaactcagatttctttctactagggtgataaactcatgtttctatgaaataaacagtctccaggttcattagcagatatgtaggagatcattagtattaggagagtcactagaaaaatcaagcaagaggagtggaaggaatgtgaggaagaactaagctgaaaatagttttctgtcctttccatggctgctggtaaatgtagcactgcaytctstcccmcaattgaaggtatkgtattaatttcaggctttgaggtaaatgaattgctaatgttaaaactgcccatgtttgaagatctctttgtcactacttagcctattttgtcaaaaccaactcctttaacttttaaagtatttttttttccttacataaagcaccaaggcagatgctaattcatttataagcttttcttctcaacagtgaaatacagaaaaatcaatatctaatggtttttgtgcaaagctcagtaaataatagatttcattttccattctaaaaaacttgtgccattaggargttgggagaggaagattactagcaattaaacaagaaatgatggtaatgctacaggccccccaaaaagagtatcaagaaatcaactataggtaataaaaataaactgttacatctgatttagggtagcaggcacaaaaaaggtgacagctaatgcatgcaacatacctctctctgattcttcacaatttcacagttcttgggcttgtggggatgtgtacgttgatgtgtgtaaacataattcagatgaggattatgtttcagatctattgatctaagatacccttttcatgaataacctaagatatgaatttttgggttgagtaagcataaatgagaggaggttctttcatatttgagctttgtggatataaactcagcttctccttattactgttattttatcgagctacttgaactatacagataatttgcttatggcaagagctagggattgggacatattgtcccatataaatatttaaaatatatatttagtatggcattgtcaccttggagaccagcagaaataagaagtatattgcagatgagcaaaatttagtcccgagaatatttgcttagctcattagctgttaggtaatagtctagctatgtatatgtagttgtatgcatagctttgtaaatgcctacttgaaatattactaaatcattttgtaatataatttaaaaaaatccctgcctggaaagttttatggaatccatttgtttatgctccaagcaaagatatgtaagtaacaacatcaaattagactcaattcagtgacagttgctatagtttttgccaaaattttttatttgagcacatgcaaatttctgaagaattacaaatgtgtaatttatttacatgacttatttttgatagatatttatttttaagtagaaaaatcacaagtctatatatggatgaggataatttataaacctaataccataaaatttacgtcttcagaaatattctcatctcaagaatatctctttaaaaatacatgtaacattttaatacagaataaaatacagaacgccaaaagctaggtaactttttgttctcttttaaatgataatacaatcattttgctaataaagttatttttggaatagtttttgtcaaaatagcaacaagcactaatgttactcattgtttattggctgagatcttcacagaaattgtgtgctaaaaattatcaggagaacaagggaaggagctgtgtgtggtattgaggaattctcatttctgtcatgggcaagagcaacagttgctgctgctacctatccccagtagagatacttatttctctggcaggaagggtgatactcttttcgggactgctatgttaaagtgtattattgacaagttcaactggaaataaaatttattttcattagaaaatacaagtggtcaacaaaagcttctgccttttattgttccccatgttaacataaaacaacttttttttttttttgagacggggtcttactctatcacccagtctggagtgcagtggcttgagcttggctcactgcagctttgacttccagggctcaagtgatcctcccaactcagtctcctgaatagctgaaactacaggcacaygccaccacaccagctgatttttgcattttttgtagagacggggttttgccacattgcccagactggtcttgaactcctgggctaaagcaattttttttcccccaccatgttggcctcccaaagtgagtgctgggattacaggcgtgagcgcttgtgcccagccataaaatgccttttaagtgaaactttttttgttgatgtcctttctctaatttatgtgttcttatttcctttctgtgtcaaaagagaagcacataccatttaatttttactaaagctttctcaggggcattatttaaagaaatctttacatataattaaatattttaagrtaattgtgtattattttctacttttatattgacattaattcctgacaatttgccatgcttatgatgtatatktcttagctaagtaatattagctttgtagctcttctataaaaggtataataatctactcttcaaggtgtcaaatgaatctaccctatagatgaaacattttgagataattagaattgttattattatgatggccaaaaccacaactccttttgtaccaacctaatatatacataaaatatgcattctggtcactactcaccaaatattgttaaaaaatgaaatttctcttttcaaaatacctgcataatttcctccaacaagcacaaaaataccattgagttgaatggtagctattttacctatagaaggggctcaytgcccctcttaagaacttcaccaagttcactgggttgtaataacacttgcttatctctttgagttgctttcagatctaggagctaatagtaggaggagtactgtgtcrtctgttaaaagtaaaaaaacattaggtgatagtccacagggcaaaccagctacctgagcataggcagaaaattgcctcccagttggtattcataatattaatacttccataagcataaagcatacctctttcaggattaaggggtcatgctcttctcatgcatgggggtgaacagcatttcctcaggatttgggtggtttgttgagaatggaaactcgttctcatgagcatactgacattgaataagaggacatgtagatagaataaacatgaatgtagttccaggagaaaaaattcagacacacagaattgacaagagccttctcaccaccaaattgagatctagtctgagcaaaaaatgtgagtctgagcaaaacaaaagaaagctaatattggaaatgtgcttataactaaaatgtgtttttcagaacgctgtaaatgtaagcctattagagctacacagaagacctatttccggaacaattacaactatggtaaggaaaatttcatggttgatgtataaactgctgtgttaagagaggtgtgtggatgcacctatgaggatgtgcacatgtaaacgagtggagccatttaagaataaggcttaaaaacagaaggactatttttagkagcatagtccctctgccccgaccaattaaaatgtctcacacgggcaaaatgcttaacacttggttgatgttgaagcacatcaagcagtattgtcatcctagagccatgcacttaagtacacagagataagtatcaagatacatgggactcttccctgcctggaggctgaaggaggatttgagctcaagttgggttgcataggccatcagttgtgyttcactgagtgaacagcagagcactttgatgcataaggaactgttaaaagactcaaacttgacttcttcagtcagtctatcccatgaaaaacactgacagatttggaaagtaacacttgtagaagttgctggtattcagcgaaggaaatgtgttgttatctagcttgacttaaaatccgacattctaataaactaaatattaattgaagagccaccaatccaaatgtagctgacaaacttaactgaaggattaaaaagcctgccatttttgcatcagggactgtgctaagtgatttccatacattatctttaattttctcagctgccccatgagatatattamcatcttgattttatcaatgattatcgaacctaagtagtcccttctttgattgttcacaatgtactttggatgctggtgtatattttagagtcataaattcatttatacagtcattatatttagaaagggcaattaacagagctttcccgttgacacataagggactgatatttactgtattccatatgcattttgattttttctaatatctatggtattaataaaaggtatgttactatctctgcataagactattgatgttgagtcaatgagtaaacatggagattaaacagacttttacagtgaaccttattaaaataagagttttattattacatttatgtacrctattttaaagtatataggatatatacagcagatttatttcttctatacttttgggaattgaaaggagagaaatgaataagactgtaaaagttagcttcaatatctttcaaaatgcagtgtattaaaaaatataaagttgaaaattttgggtttagttaaatctctttaaaacaaatccaccttgtttcccaaatttttcttcaatggaattaatttctatgttttgcctgctactcctcttaagaggattgtagcttttcttagtcaatgatggatgctctttctaagtttgtaagcttatgtttatgtaagaagtcaaatgcctggctgcttatctaagaacccgcttctttacagattgatgtgaagaagcctagggaaaagggagcccttaatttctaggagattagcttgttaagattgaaaaatgctttctgaacttttatatactgtaacactaagaataaaaacatatcaattttatatcagggaaatgtaattatttatatttaatttatgtatcctattatcaagttttattttatctagcttctgtagtgcttcaatggttgttgctgttatttttgttaaaaattgaatgacaagtcatggaaagtgaaggtcttagagaaagtagctgaatgaatatcataataaaatgggatatggattataattaatggaaaggagcagataatttcttttttgtagccaagtaatagctaagttgatcatagtttcaggattgccatttgtctgggatttcttacagtttctttggggaagggaggcactcaaatggttaaatagaaggaagaactctgaaaaggaagtatattttacttccaaaatatttttatcttctatatctgcatgtcaaggtgggagcagttggaaattcagacaaaacctctacttcatttagattaattctgggaaaaactccttaagtgttaaccaaattacttgagtgaaaaagtaggtcttgtagaaagatatttattttggagtgggtacatgtgctaaacatttctaatgaaaatagtagacactgggtaaataaatcattagtttgagaacatttgcacagttcactaatctctaatagttgatggatgctatgaagcacgttcacttaagccaggacacacaaaaatgcctgctagctggggttgtgaatttctcatctgattctgccaaatggcatttcaaaaagggcaatcttatcttttgttaaatacagaatagggagaacatgaatagaaagaggctccacttgccagtcaaaccaagcgaggacagttgggtagttacagtttgtttgctacacgttctcatacttgaggcaactaattctcggwagactgaaatgtgaagcttttagaattccttagtaactaatttctgtcatgtgtgttgtactggtagaataagtttttgtgacraaattggaacattaatggggggaatggttgattagctsgttttatatttttcaaggattactttcttctaatcctttatagtccaaaatctctaaaatatgtgggaaagtactcagattaaagtggtttgcaattrtgtgcctaagaagtttttgaaatgttgactcatttggataaacggtgttttcctctatataatgtccatggatagtgaactggagcaatgagggtactgggagaaatgccactggctttttactgatatttttacttctttcttggtgttttaaaacttctctttttaaaagctcatttactagaagcaggaatctgaacaacttgactcttttaaaggggagagatacagaaaagaagcagatctgtactttctagattctgagtcacatactttaactttgcaactgaaggcaatttgttgttacattgataagtaaagcaagtcttgtgagatarattgggtgccaatatatccattgagagaggtagaataatgccattgacacgtgagaatatattccatagcacgtgagggaaaggaatgttggagtgtctgacttcaawgcagatggaggaaataagatctagtggtgaccatttttattcaagaagtaaayatagcccacttagaggagaatataaaagataatctgtactgaacacaaaggaaaaaaggacctaatatccgaacaaagaagaaaatgtagcccacctaaaggagaatataaaagataatctgtactgaccacaaagaaagaaaggagctaatatctgaacagtgagccaagatgaggaaggtgaaaagattgcagaaccagtttgggaacactactgagcaggacaattttataacattacagaggcccactacttgagaaaacctgttaatggacctgataaaacagtgtcgacaaggaataaagcatatttaagtattaggtcttttcatatagtaaaattaacatagtttaaattcctcttggcagcaattggaactgcacatgcatatatacacatccaaaatggaattttagagaaaaattgtrtcagattgttgactcaatctttgattctctaaatggatttctcaaaagcacatgcacacacatgcataaatacatgcaaatatatacacagccacaaattggaaagagagcagggctgagcattaggtcaggtgtgttgttttatgtcacacactacagtctaaggcaaaaatatctggctgacttttctgttccattcgttgaatatcaagtggataagaattaactaaagagaagcctactttggctttttttgaatggggtagctattatgtgtcatattattatcagcttttcttgtcttttatcccagtcattygggctaaagttaaagagataaagactaagtgccatgatgtgactgcagtagtggaggtgaaggagattctaaagtcctctctggtaaacattccacgggacactgtcaacctctataccagctctggctgcctctgccctccacttaatgttaatgaggaatatatcatcatgggctatgaagatgaggaacgttccaggtaattcactctttaaggatacagaataactactttgcttatcctactctcattaaatttgtctctagagatgctaccctcgcatttttacattgggatctgtctaccttcttggggattacagataagttttagttgggtttcttgatttcatatatggaatgggtgtatgygtgtagtttataggtttacatttttcttgggagaggggccataacttcatttgtttcttaaaggggtctgtgacttacaaatggttaataattactgttctaaatcttagctgtcctattcaagaataaacatrtaagtctttcttgttcaagtactgtttccttgtacttttcagtaacaggttttaatttttcaaaaatgtttgcttctttcaaaaatacagattactcttggtggaaggctctatagctgagaagtggaaggatcgactyggtaaaaaagttaaggtaagcctgtattttatgtttgaagtaatacacagaaaacaaaacaaaagtagaaaaccagccatctgtcattgaaatgaaatagctgccttcaaccatatgagaaatattaaaatttagtatgcatatatttatatactccaagagctgaatttgtctttaatgtctattttatttaaggaatgagttccctgtatgtgtatcaaagatctaactacagttgccctaatgtctnttcacaaggagtctagctgtagtccagtcctggtagggtggtttcatgttgtcaggctccttctagcttatcactctaccatttttaaaggcatcgctttcatactcatgttcacctggaggtcacaagatggctgctctgcctctagtatcacatgtacatttcaggcaggaaaaagaggaggtaaaagggatttccaagagcctcatcaagcagtttttacttagctgcaaaacaggctagaaaatgtagtctttttaaacctggggatattgcttctttgaacaaactgcagtttgtgagaaggggagaataaatgatgggaaggaaaataaacaatgatgtccgatgaataaacagcaattcctatgtacaaagtgtagctacattcatctgtatagaagagatctgaataaattaggtccttagagcagtaatgtagccttatttttaagccaaataactcttagattgtggaattgatacattttttaaaatcacatagtacagtactgtattatagaaggttttgtttcttcttactgcactaagcaaatctgttttaaagaaaagaatggggtgggggaatgcatggggggacaaaaaaatctcaaaggatgtgtgggtgggtggggggagtgggaactgtaccaaacataatacatcctcttccttctgcaagtttgaaggcttgggaaacatttacatggtaagttaaacacccctgggcggtttatcttatacatctggcacttgacacggcagacacgtttgggtttaagtgacctacaaaaatgtagagggcattattttgtaaggagaaactaccctccagtaagttcttctccccttyagtagatttgtcaaaagggagatgcatttcaagttcagacttgcgggcattctctctgcatctctcttcaattagtttggtgtttattaaagaaaaaagtggctcttgttcagtatgttggaatctcttactgtctttaatttggttttctgcttgctaatgcagaactggaatttgtcctaaattcctgtaccagttggaaaagctttcaatatccctgctgcgaagcatgtaacaaggcttactgctcctcttttggtaccaaaacaatatcattgtkttgttgacaggacacatggcttgtttgtcctgtttcccattgctttctgcaatatttcccattgttttccgcaggggacttgcagagttattattgtaaagtcatttatattctcagtctggatttaaatattctaaaggaaagaaaccaataatttgaacaattttaaattcatatgcagatattgagggctaaagagtttgggtagaaaatctcctttggccagaattattgagattcctattttagttttccagtcaatttgaagatgtgtaaaaagagttttatggaggatgttattttttcaatcagatttgctcttagctgagttttgctctcagtggatgaatcaataattttataagaaacattattatgtttttttcatgcaaatggttgtttacctragtctcttatagcagacgattcaagatgtttggwcttccttgggaagttgagaatcagactgtttttaaaatatgaagacaagattgtggagtaaagaatactgaaatgaagaattaccttcagtaacagaaaaacaataacacatttactatgtgctaagcactttatatttttattaatcttcagatgtatctacttataagtagattctattatcagttccaacatatacatgatgaaaatgaggtctagtaagttcaagaaacttcayacagtaagtggtggagttagaatttgaacttgggccatctgacccaaggatctgatggtgcttgctctttaaagtgtggtccctggatcagcaacataggtatcacctgggagcttgttagtaatgaaaatcttcggccctgtctcagacctgctaaatgagaatttgcaattttaacaaattccccrtatgatatccgtgtttgaagtttgggaagtacagctgtagttcgtattccctacctatcctcatgtaatataacttccatttaacttaaattacatgaaaatattattgacattgttaatatgaaatattactaaacttgattgtgtttattaaaaacattgctaatacctgctttgtaacacttagaacgagggcaggaccttgtctgttttattcattgtacttagtggatattacttagaaaaatatttttgagacccccccatccctcaaaaaaatttccatttttttttcactgctcaaatcacatagactttaaaaggctatgttcttatgtgtattaagagaggatgttgaaaaatagccttcccttcaaattctgtgtgtaaatcttccatttgttgagtatctgtgaagcactagcctcctgtatgttacctcaggaaatacccagagatatagggagatatttctgtcatcatttrtagacatggacattttaagtttaaggtttgataagaaagcattactaaatacattatagatgttgcgcttgttaaagtcagagaataatgttcatattgcatcagttttcttgttaccctgggaaatagattgatacttttggaaaagtagcaaaatgcttcagagatctgaacttgcagtctgacccagttgttagaatcatggaaataatgaccctggtgatatgtgcttgtgactattttctattttaaatttcacagcgctgggatatgaagcttcgtcatcttggactcagtaaaagtgattctagcaatagtgattccactcagagtcagaagtctggcaggaactcgaacccccggcaagcasgcaactaaatcccgaaatacaaaaagtaacacagtggacttcctattaagacttacttgcattgctggactagcaaaggaaaattgcactattgcacatcatattctattgtttactataaaaatcatgtgataactgattattacttctgtttctcttttggtttctgcttctctcttctctcaacccctttgtaatggtttgggggcagactcttaartatattgtgagttttctatttcactaatcatgagaaaaactgttcttttgcaataataataaattaaacatgctgttaccagagcctctttgctggagtctccagatgttwatttactttctgcaccccaattgggaatgcaatattggatgaaaagagaggtttctggtattcacagaaagctagatatgccttaaaacatactctgccgatctaattacagccttatttttgtatgccttttgggcattctcctcatgcttagaaagttccaaatgtttataaaggtaaaatggcagtttgaagtcaaatgtcacataggcaaagcaatcaagcaccaggaagtgtttatgaggaaacaacacccaagatgaattatttttgagactgtcaggaagtaaaataaataggagcttaagaaagaacattttgcctgattgagaagcacaactgaaaccagtagccgctggkgtgttaatggtagcattcttcttttggcaatacatttgatttgttcatgaatatattaatcagcattagagaaatgaattataactagacatctgctgttatcaccatagttttgtttaatttgcttccttttaaataaacccattggtgaaagtctttttttttctcttcttttaaaataaatcagaattgccgtattgaccaggaaaagattatgtatgcacgtgcaccagggttagtttttaaaagtacatggctccataaaaatgctgtagattacagagtgataaaatatgcaggtttttttgtttttgttttttctgttgtgtgtgtgtctgtatttgtgtacatgtgtgtccttgcactcacacccaaggtggattaaaatacaggcctgcaaactggcctgcactttatcatttggatttgtgctgcttaatgctcagcgaaaaatgtctagtaaaatgaattatggttgtcaggagagaggttatttcgacttttgaaccaattgcacatttctcattacccaagctgtggtgagatcccaggggctgtggtgaacaaatgatgcttttatagatggtccctagcttacaatgattcaatttacaatgcttcaatttaacaatttgttgacttacaatgggtttatcaggwtgtaacccaatgcatttcaacttacgatattttcagtttcgaatgggtttatccagatgtaaccccatcgtaaatggcggagcatctgtacttccttcctctggcagagttccttagagcctgtgccaattacttgaaagtytcattctctgccatttacatgtgtgctattagtagaaccaaatttctaagctgtggcgtgctgaaaataaaatgcttatgaagcaaaaatcgtgctatgtttccttctacaaggataatcaagcaaggatgaaattcattcctgaacaaaagtttcctaaaatggtaaataatcatctatctaaatgttctattttaaaagtgtgagctgggtgtggtgagtgcacctgtaatccccactacttgggaggctgaggaaggaagacggctagagcccatgaggttgaagctgcagtaagctatgattgcggccactgtactccagcgtaggcgatagagcatgaccctgtctctgtaacaacaacaaaagtgtgaaagttcattctacaaattggagtcactcatatcatacccaactaaaatggagtygggaggccatggggaaaggcacccaggtccctgttccaggaaccatttttgcagttcaacagaaaaatcacgaagacctaactctaaccttaagataaagttacctagctgctgccactcaccaatcagaacttgctagatcctacaagacgcgcctggctccagtgaactttcattcaaaaccatttagatcaccttcctctcttccccaataaaaccccagcctttctctttgttctttgaacacaactagaggctacactggtttgtgtgcccagaattacaattccaattcttatattcccaaataaaccctttacttggagatttatctccctatatttaaaggtgacagagtaagggaacattcctgccttctgattgactctccaaagccaacaatttccccagccccagaagaaaacattcccacctttgcctataggactgcatagtcttttgagcttccaaaagaccacttccaaagggcttgccatctgcccattgttgctatattctcagatggcaaggacatctcttttgaggtgctgatgtcctacccttaaaaggtgagttgggtgtcactggggagtaatgaagcgccaccgtggatggactgcccctgagaatctctcttcctggtatgtaagcctcaacttgagcctgaggacagaggggtggaaagtagtgctggtgcctcagcctgttttcctcaggctttctcacgttaactctgtaaagaaggacaagaattgactacaggagaggtttaaaggaaccgttatctcaaatccacaaacctcaactctctcaatgcacagtaagcaatgttaagtaaggaactcttttgatgtataaaagctgcagatgtttccagcttctgcagttttttttggggggtgggggttgggtaaagggggtatgatcagtttctgtgtaggaatttgacacactttatgcttaatataaacaaaacacggccagattcttagattcagcagttttttttttttttaaaccaccttccattcggtgccattttacaacctactgttttaccactaccatctatagtggcaatgtttgattttgctcacctatatgaggcttctgtcagctgtttaaacatttctaatggtataaagcccatgaataaagtacatttggtttttcagtttgatagctacaatatcttcattaataaactgtgcagacctcttttgggaggatggcgtgatttatcatgatggtcacgtttctcaggagactgcaaaaccatttctactctagttgccatagtacaaagacacctcgttaatgcctctctatagggttttcttgcagatagtaacttttaaagccactaaaaatttaatatacatgcatccttgtcagtaaccttgagattgataaaatttatatttctttaaaaaattttattcamctttaggattttaattttcttagccaaattaaagtcagatgcatgctgaataaagtagcaaatacttaaatagcagcaaacatggattctcttttcatggatatgtattttactgtgtcacatacaatgtaatctgattcagtgccatatgttgcacccagcattcagggatggggtgagacaaactgtctttccacatstgttacacattaagaaggcaaaaacaaaagttataatcactgtgagcaaatagcactacctattgccttctgcaagaaattatttgctgttacatttcaacaagtaaaatgactaaaggtatttcaagattgacatttagcactgagttttaacatattttaatacacaaaaattcaagaagatggtaaaaataaagcagagacttctaatatggtgttactgaaatccagcctataaaatttaaaagtatggtacccagatgtattaatattaacaaaaacagtatagtcatacctttcataattatctgtttggggtaataacatctaacagtggctggaactctatatgaaacacttgtgcatatgttacctcacttattccttraaagttgttgaagtagatgttttattcccatataacagattttttttttttaaatgagtatttagaacttcagagttgtgtaagtagcagagctgggccttagatcctcataatcttatttcccaaattatatgttttccaccactgcaatttctgataaaaaggtaaatgcatcctagcaytgtaaaaaaagaaaaagcatagtgtcaggcatatagtggtagctattgctattattggattataataaataataatataaatataacaatagctattatttcttaaactgaggtctaccaactatgttagaaagcctatataatataggcccaactctaatccaagatacagtcacttcacatcttcaggtgtcctcccttatgaaatcagaatttcagtagaattatttccatacagacaggcaggtgaattaagtaattttgggggcattagttgtttaaaaatgtgtgactctcagaaaagcatttttcaaggtttctgttttcccttgaatttgtagaaaagtaaacagttaattgtattcaacaacacctggaagaaagttgaaattaaaagttgataattattacaaataaaacgagaacgactacttccactgggaactcccatttctcctttttagattatgccccctatgtttcccaccaccagagtcctccataatctagaaaaactattccacctgacctaattccccctgcttttcattcattaagtattttcactatgacagggattcaacatgttaatacaactaaataygtttttcttccgatgaaatgcaaacgtttgtcatgtttctacttaggtggttgttgagaacttgaggagttgtcccatgaagaaggaaaggttgtgctcaaggaaatttgtccaaaaaaaaaaaaaaggatttgtgggctgttgaggaaactgacacagaaatgaaagaaaatgcgggaaagaattttctactcaccacagggatgtggaggggaatgaccccactcattacacagtggtactgtggccactcttgcaaacagccaccacctcsctccccacacacttagcatcacgatgtgaggttgatgttatgattgcagggttggacttaggatagtctggrgcctcagcaagggtgggtcgggtgatgtctgaaacataggatagctctgagatgttaagaagtcaatgaaacagggaacaaaggatttcttgtttatactgggtggtaaatccaataaataaagcagatgcagttcactctaatgtctttatttctacattaktttggtgattctgagggaatcatggcttcccagagatggtattcctgtcctagcactgaaaagaagaatttgagttgaactgtgggacaacttggcaaaaggagagawcaatatgaacaaaattcctattggaaaactttctctacgacctaaaactcaagtaatatatcaaagctttaaaagatgcatgatactccaggtgaagtcttctgccaaaaaaaaaaaaaaaaacatgtttaaatttggccttttctttccttctcattaattactggaattgccatgagtcccttgctctgtgaaggtttctctttctttgaaaattcaagatatggtgtcttgtaagtgatctaaccagccagctctttctaataaaacatggcctaagataagaaaaacaaacaaaacaaacaaaccaaaaacagaaaaaaaaaacccgtgatgctcagaaaatattatacccacaaatactgaattgtcctgtctgctcacattcatctctttccctcctggccattcttgcctattctgcttttcctcatattgcttggctaattaaatcaaacacatagctacaggaatattttcagaattgctagaagatcaggcatgatgcaaatatctgatattctttaaatccattgatcaatatccatgatgctcatttcgattcctttcaggtcatcagctcaggcagtcttgtcctgaggttttcttgcctacacgatgcctggaaccacagctgcccacactccttcttccttagggacaacatttggagacattcaatcattcaaaatggctccctcaccataccttgagtagagctttggagttagggcacttggattcaaatgctcacttcgcaactcattggctgtttagccttatttccaagcttcaagattaggagagatgagctggatggattctgttgggcagtgcctggagcatgataggtgtttaataggaatcagaatcattccaccttttactcccagctcctctctatgaagtacacacttctctaacagggttctagtgagtgctcactaagcccagaagaaaagtggctttcgagagatcacacttcctgcctgttctctgttctccatctttaagatgctggactcaaaaaattctcaatttttcttcaaattgaagattaaagttcttttcctttccctccagtgaggcaggtgtgcttaaaatgcagcatgatcaagagactggacaaaagattctggaaaaaccatataagtactcaaatctacaaatatatcacaatacaaatttatgtttcattccaaacacttttatttattttggcaaccaaagaaccaaaagacttctgcagccatgctttttttttaataattattattttttaaggctagtcaagcaatgggggtgaagaaggaagaaaaaaagtctrtaactggtagtgatcaatgagttgtaaataccaaggcactgggaccagcctccaaccatttttaaatatagggaatggtaaacctataggaattttaatgtcttcatgctggttatttctatggagatgttaacttccagattaattcatttattccttgaact

SEQ ID NO: 9978 - DNA, 21963 bp, Homo sapiens
agtctcaggtttgtctttatcagcagcgtgaaaacagactaatgcagtaaattggtaccagtagagtggtgcactgcctaaaagatacccaaaaatgtggaagcgactttggaactgggtaacaggcaaagtttcaacagtttggagggttcaggagaagataggaaaatgtgggaaagtttggaacttcctagagacttgttgaatggctttgaccaaaagcttgatagcgatatggacaataaggtccaggctgaggtggtctcatatcgagatgaggaacttgttgggaactggagcaaaggtgactcttgttatgttttascaaagagattggtggcacttttcccctgccctagagatttctggaactttgaacttgagagagatgatttagggtacctggcagaagaaatttctaagcagcaaagcactcaagatatgacttgggtgctgtcaaagcattcagttttataagggaagcagagcaaaaaagtttggaaaatttgcagcctgacaatgtggtagaaaagaaaaacccattttccgaggagaaatttaagctggctgcagaaatttgcgtaagtaatgaggagcagaatgttaatccccaagacaatggggaaaatgtctccagggcatgtcagaggtctgcatggcagcccctcccatcataggcccagaggtctaggagaaaatggttttgtaggctgggctcatggtccccgtactgtgtgcagcctagggacgtggtgccccgtgtcctagccattccagccatggctgaaagaagccaacgtcgagtcaggccgtggcttcagagcgtgcaagccccaagccttggcagttgccacgtggtagagcctgcgagtgcacagaagtcaagaattagggtttgggaacctccgcctcaatttcagaacatgtacagaaatgattggatgcccaggcagaagtttgctacaggggcggggtgctcatggagaacctctgctagggcaatgcagaaggaaaatgtgggttggagcccccatacagaatctctatgggggcactgcctagtggagctgtgagaagacggycaccgtcctccagacccctgaatggtagatccaccgacagcttgcgccatttatccggaaaagccacagacactcaacgccagcccgtgaaagcagccaggagggaggctgtaccctgcaaagccacaggggcagagctgcccaagaccaagggaagctaccttttgcatcaacgtgacctggactcaaaggagatcattttggagctttaaaatttgactgacctgctggatttcagacttgcatgggccctgtaaccacttcgtttaggccaatttctcccatttggaacagccgtatttacccaatacctgtaaccccattgtatctaggcagtaactagcttgcttttgattttacaggctcataggcagaagggacttgccttatctcaggtgagactttggattgtggacttttgggttaatgatgaaatgagttaagactttgggggactgttgagaaggcatgattggttttgaaatgtgaggacatgagatttggcagggccagaggcggaatgatatggtttggctctgtatccccacccaaatctcatcttgaattgtactcccataattcccacatgttgtgggaagggacccagtgggagataatttgaatcatgggggtggttccgccatactgttcttgtgatagtgaataagtctcacaagatctgatgcctttattgggggtttctgcttttgcgtcttcctcattttctcttgccgccaccasgtaagcagtgccttttgcctcccaccatgattctgaggcctccccagccacgtggagctgtaagtgcatttaaacctctttctcttcccagtctcgggtatgtctttatcagcggcgtgaaaatggactaatacactgtggttatgtattatagtcatatgatatkttcatatttttggaagctgggtgaagggtagatgtggagaccatgatttttgcaaatttttttaagtttaaagttatttctaaattagaagtttaaaaagaagaaatcacataagccataacacaatrgaaagatgtctttaaagttcaaggcaggagggatgtctggaaatcagcgagaaatttgcacctgtgtgtgcatgtgcatatgtgtgtgtgtatgttgcaaggacttggaaagccctttttttcctacctctgtactactgtggggggaggctaaacttgacttcttcccatcttagttcttttttgggatagactcctgtaacaaaagacagacaagagaaaaatcagcttacaacatgggccatgcacttcacacaggagaaacctgcatgaaaagtaactcaaaatggtgccttagaactccacttacctttagtaaagagcaataaattagcaggaaaatcatggatcgggacaagggaagtggttttatgcttccaagggcaggaaatcatggaaggtaaatatatgggaggaaactaaaggaataaggcttgtttgcatattcctctgatgccatctctgggttgataagagtctagagtcatttccagtaaagatgaatttttatctgtctttaggaagaaagggggaaagatagagaaaactatttctccatttgctgtttcttaattaccttcagttcaaaaataatttttatatcagaaaggcayatttagaggtatgttagtttattttcacactgctaataaagacatacccaagactgggtaatttataaagaaaaagaggtttaatggactcaccgttccacatggttggagaggcctcacaatcaaggcaggtcttacatggcagcaggcaagagggagaatgagagccaagygaaaggaatttccccttaaaaatccccttataaaaccatcagatctcgtgagacttactcactaccacaagaacagtatgggggaaaccacctctatgattcaatgatctcccactgggtaccccccaacaacacgtgggaattatgggagctacaattcaagataagatttgggtggggacacagacagaccatatcaaggggtaacatagtctggtttcctttactacccacctacccaaacacccccttcatctgatccacacaaagtaaactcttgcagttctctcactgtttcctggagtctgcttttggtctcataggactgccctaacgcttgtttttcagacgtttaaccctgtaggtctctggacaaatttgctttagaagcccctcgatgtckccctgaagagtggctttcagaagttgtgcctcctgcctgaggggagttccaggaagggttctgcatcgcctatgagtttatctggatcaccagaggccttcccgtcagagctttcccaatcgtttttggccaaggagtgtgagaagctaaagttcataacaactggaagtcagacagcctggtctattctgctttaactctagcaggaaaggccttcatggtggggcctgaatatcttcctttataaaatcaaagcctggggacagggttacytacttctgaggttcaatctggctctaaaattatgcaacaaatgccattcctttagcacttccttcctaccgggcgagatactcaactccacaggcaccacctcagttcatcctctcagaagtcctaacagctcagcctggggcaccccattttacagattagtaaactgaggctaagagaggttaggtagcttgttcagggtcatgctgctggtaaaagagctcaggctacagtgctatgcattgagttttctcactttcccatctaactggagggctaaaggtcaaagagtgggcagctcccttgttgggagctgtacaggaataatgtcctccctgaaggagggggacttctgagccacaccctggggtccagggctcacagccttaggagcaaaatcgtccacccccttcctggttcctcggtgctgcagagatwttcataggacagagtctgagttctggccacttaacagaggaagaaaggctggctcggtgaggttaacttacatcccagcagctaggaaccgggagcagaggacctcagattcacaccagggcaggaggcaatggcctggctgaagccttcacaatcttcccaatatactcygctgccttcctttrtaaggatccatttctgaaaccctgtgcsctggccaggcacggtggctcacacctgtaattccagtactttgggaggccaaggcaggaggaccacgaggtcaggagtttgagaccagcctggccaatatggtgaaaccccgtctcyactaaaaatagaaaaattagcgtggtggcaggcrcctgtaatcccagctactcgggaggctgaggcaggagaactgtttgaacctgggaggtggaggtctcagtgagctgagacagacagtgcctgggtgacagacagagactccgtctcaaaaaaaaaaaaaaaaagaaagaaaccctgtgccctaagacctgcacactcgctggctccgctcagacatttagcaaagcagacaccttcccaggcctggaggaaacagcccctgctttttgggaatccacaagcccgcagctgcaragctcgacctggatgggcaggcaaaggctgactcctgtgcgtggtgtgagtccagcctggcccctctacaccctcactttcacctcttaaagaactgcctattaacagagcaggtactgcccaaaaggaacactctggaaacttgttgggacacttctgcctttcacaaacgtttggggggagtactactagcatttaaggattgagggttagcaatgccagacataccagaacacgcagggcagtctcccatgatgaagaggccgccgggttccccaggactcacatgtccacctcaagttcacgtgggattatctgagcctagactgtcagtcctggggctgctttatttcatataaaaatataatatttatccaaggttttactacacaytgcattttctgtgaagacaatgaccgtgtaaatcagggaaagatctatattttattttgtttgaaactttaccaagcattatttaccatttcaaaagctctatccctggtagtaccattggttttcttgttcaccggccagcagtgagcagcacacaagcgacctcccgtgggctccacattggacagcctcactgcacctgcccaggcccttaggccacagcactgccatattcagggacacattattctcttttattatgcctccatattatcattacagcattatcttttttttaattttgtgggtagattatattagctatacgtttcacttcaatggtagtagtaaggggcacataacaaaatatttacttatatatattaaaaaagagagtctgagaagtctgaaaagttttgccataaacggtctccaccagcctcaactctgagtgcccraggattcagtctcaagtccagcaacattgtgaagcaggaaatttaccttgaaaggagctatgtactctaagtagtgatttacctgtctgcctcccccactggattgaccagttccttgggggctgagagaacaggtcctgaacatttctgctgtgccccccarcccacatcctcatagtgtccagtaccaggctggggactcaggaagcatccatgggatcccccagtgccttctttctcgaggtgttcagcacctagaacagctcaagacaaattccccacaccccacccagacagagctgaatcttactggggmgaagccttgagttgcaaggcagaagctctcgtgatgggatttgggtcatattccgggttataggaggagctggggagtatgggaagcctcccacttggtctttggttttccagaaactccaccatcacaagcaggatgttaatcagtaaccgtyccacaggggatcatactttggaatagcaaatatttgctgaaggttctgggctgcaaagctgaagctttggtttctgctctaaatgaaggacttttccaggacccaaggccacacactggtaagaggcagtgggttacaggagaccttcaatgagtctaatcagggagggaccgggaaggatggtatcatccctgggygggctccaacgtgagggctgtgtggctgagcagtgcaaagacctccatcctacactccacagggactgtacatacagmttgggagctggagtggggtaagaggcraattatagacacaaggggctcctctgcaggaaggaggccaagggaaagaggcttgaaaggcttgatatttcacccaccaccactcactgccggagtaagcaggtctccccttcccagggctgaggggaggcagggatgtgtgctgtcccagggctgagaagtggcaggtgagctggtgattccttactgcccaggttctgtctaggaaggtgcgtcctcaccatgctggatggtgtcctagtccaggakcaccccctgarctcctggcctagactccaaagggttgggtagatgagcaaagactttacaaagaccttaggcgatatatgtccaggagcacccaggaattactgggctaccactgcagactgcaggacaagctccaagaacaggaaggtaagactcagcatttggaggtggtgacatctagttggcgtgctgggctaatttcctgaccattgtacagggrgaagtaaccttgaattcaggagtattctgtgtggtcttaatgtagaaagtagcactaaatgatgccacgtaatcgttttagctcaggctcctctaacaaaacaccacaggctgggtggctccaacagccattgatttttcacagttttggaggctgaaagtccgagtcagggtgccagcgtggccggattctggtagggctgtcttcttggcttgcagatggccaccttcgcaccgtgtcctcccatggagaggaggtgcggagggggactctgctctcttcttatgacagcactagtgctatcacaggggccttgccctcacgacctcatctaaacctaatcacctcccaagcgccccaactctattgccatcacaatggtggttcgggcttcaacttattaattctcaggggacacattcagtccataacaataaaagcgtgaaactgggctgcgtttacactgaaagagctatttacccaacgtttacaatacttgggtgacctgttgaatgcaggcttgccatttagagtcaaaaagagcttcctcaacagtgtcctttgggaaacacagtggaagtatttcactgcttctacaggggagagggtagtgccgttcagactgcagagtgaggccctgaattccggggtgccattcagcccgagcaaggggcaacatgctgggccctggcgctggaggcggttttgtcccaggcatagataaggactcagcccctgcatcaggaagaggcctggcagcaccgcctgtcaatacattttgccgcaggtgaccttggtcaagaataagggtctctgctgatgggaactactgtgaggccggcagcatccaccctgcgctcactgggctgggtggcctaccccacccagaccctcccagggcagtgggcccagagagaggatgagggagggcaggtgtcccaggggttctgcccagccagcctctgggatcaggcctgcagtgtggctgaacaccagaactgagtttggacacagccaggtggcccaggccagtcccaagccatgtatttggatggaaaacatggaagtattcaggagccaggctctgtgtccaaggatgtggagggagcctaaaaggcgacagagaaggggacagctaacggtgaagaagtgtagctcccacactgcagcctaggacagtgagaaccggcatgcagcccaggtggctgagggctctatgaagccacagtggagggagcccagaagtgggttgtatgaattgcggggcctcctgctacccgggagctgcagctataggaaggaaggaaggaaggaagacctccaaggaactgtgtagcagaggtgcagtgcaaagagaattttgataaaaaatcyaggaaagctccaatactttcccccttccttgcctaacgggcatgcaggcactccaatccccagccaaacagggcactgggcaaggccggccacccatctggatgggcagcctgacgaccagatggtcagggcagtgaatgaagcagatcaaggaaaggtgtgtgaggacccctgattccacctgcttggacccccaccttctgtgctgcctcctgctcccagagtggactctcttgccctggccctcagggaggagacgggatgaatgaaaacggggtcaggactgagagctgcctgccggcctggcagggaatgggaactggaggaggttttgctctgtgaaataatgtcccctctttgggtgagcaaatgtcacccacacttgctctaggtctccctggggcagggctaacctacttgagccacaggaaggaggcagggtccctgaagaagcttttactatccacaaagacattttaggaggcattaaaacyatctctatcctctcctctccacaggaagtcttgcagctgaagggaggcactccttggcctcsgcagccgatcacatgaaggtggtgccaagtmtcctgctctccgtcctcctggcacaggtgtggctggtacccrgcttggcccccagtcctcagtygccagagaccccagcccctcagaaccagaccagcagggtagtgcaggctcccarggaggaagaggaagatgagcaggaggccagcgaggagaaggccrgtgaggaagagaaagcctggctgatggccagcaggcagcagcttgccaaggagacttcaaacttcggattcagcctgctgygaaagatctccatgaggcacgatggcaacatggtcttctctccatttggcatgtccttggccatgacaggcttgatgctgggggccacagggccgactgaaacccagatcaagagagggctccacttgcaggccctgaagcccaccaagcccgggctcctgccttccctctttaagggactcagagagaccctctcccgcaacctggaacwgggcctcwcacaggggagttttgccttcatccacaaggattttgatgtcaaagagactttcttcaatttatccaagaggtattttgatacagagtgcgtgcctatgaattttcrcaatgcctcacaggccaaaaggctcatgaatcattacattaacaaagagactcgggggaaaattcccaaactgtttgatgagattaatcctgaaaccaaattaattcttgtggattacatcttgttcaaaggtactttgataatgttctgctctcccaaggccacagggccctacgattgtctctccctttcctttygttaggccagcatatgattaacgctrcrtgattttctatgaatgtgttttcacgtttcaaaaacagattgatacacatattgaacagtgccagaygctgtcatttgaggcccttccctggtatcctatgtgcttgtagtccttattattttcagagcactctacatagctcccctctgacacttagaagcatagggtctttccaaaaaacagggggctgggggattatctgggggatttaggattgcatcattgctccttcatttttactttttgaccaactctctgcccttagattcctattatagaaaatagggacactccacctactacagtgttagaggctaaatgagacaatgaatgtaaagtgcccagatgggcttggcacatagcagacactgagtatctattgtttacttgttcttccaaactgccaatcagcaggtagagcaggagttgtctcctttctaaagatgaaaccagctcagagacgttagcttgatcaaggtcacacagtaagtggcagaggcaaaacccaaacaagggcctcctgaccccctgatcctaggttctgtccagccctgcctccctaatggggcactggacgtgggttggatgccactttcgcagagctggcaccagacttacaaagccccggcaggggaagccactttacaaccagccaggccacacccccagggcagacrtttatgtagagagtaatgtacctgcctgctagtagcctctgcattgtggggccttctctcagaaccacactaaacagtgggtgggtgagaagtgtcactcctgccaccttggactctgcatgtgcttgtgcctggtgtgaatgagacaaagtggcagtcagaggtgccaggcaaaggcttttctctaagctggagccaactatgagggaacgactgtgaattccgttcaggtccaggacaatgagaggagccagggrttgttaggaaacatttccctgctttcgtgtgcgattcccaatagggcctgcgagtggagctgcattttgctagctgggctagaggacggggaaaattttggggaaatttattttgcctgcctgagctgtggaaaagccaacccaattagggaacgcctttcctagttggaacgagaagacgagaagtgagagaagtgagatagaaggctccctctctattatttgagcaagaacaatgcttttcraagagggaatttctgcaatgagttcttctcttacttgttcagggaaatggttgaccccatttgaycctgtcttcaccgaagycgacactttccacctggacaagtacaagaccattaaggtgcccatgatgtayrgtgcaggcaagtttgcctccacctttgacaagaattttcgttgtcatgtcctcaaactgccctaccaaggaaatgccaccatgctggtggtcctcatggagaaaatgggtgaccacctcgcccttgaagactacctgaccacagacttggtggagacatggctcagaaacatgaaaaccaggtacaactcttgcccacaccctatacaaactctacctttctgtactggcaaacgctcagcacaatttcattgaatgcaccgtgatttaatgtctcctccagtgagctataagtttcctgaaggcagggcagcatttgtctttttttccactctatccccagcatctgtcacagggtgcctggctgattcattcattgagtccatcagtattttacgttctgcgactgtgataaatatatgatgccagggatccatcagcaaacaaaacaggcaaaattagtctgccctcatgcagcttacattctaktgaaggaagacaaagagtaaattaaaaataggtaataatgcagggaaggggacaagaagcatcatcaggatgcagatggaggttagacaaggcctctccaagaaggtaacagtaagcaaacatctgaagatgaaggataaaccatgtggatatattcggggagagaagtgttatgttacaggcagaagtgtacaagttctgggatgggagtgtacctggtgggtttgaagaacatcaaggagacaagtgtggcttcagcagttggagataaaatcagagaggaaacaggggcccagtccccagaaaagacttgggctttcctgagagaggcaggaagccactggatggttctgagtagaggagcaacctgattttgacttctgtttttaaaggatcacataagctcctgtgttgagaaaagacactagggggtaaggatggaagcaagggagagtggttagaaagttactagcaatccaggtagagatgctgctacctggactgcggtggtggtagtggaagtggtgagaagtggctggattctggatctattaggaagtgcaggatctgctaatcgattggatgtgggtgagagaggtgtcaaaggtgatcacaaagtttttggccttagcaactggaaagacggatttgccatttactgaaagggggaggaacaggtctggggtaagtgcagaagttcagtcttaaacacttggatcagaaatatctattagacatccaagttgagatgtcaagacgacaggtggatctggagtctagggtgaggtccaggccggagatataaattcggtcatcaacacagaactagaatctagacacatgacagggttggggtctgtaaatatagaggagaggaaaagaaagcacagagtgggcactgaaatgtctgcccaataaattaatccacctattggagtacaaggaaaatggctgcaatacgaattccatggctatggcttctgaatcctgtgactcagattttggcagacaagtgcagctaaaggtccccagggttagttttatcttcattattcttctttcatttttcttcatatctttagcacctaacaatgaaccccaaacatcataagccctcaagtaatgtttgctgaatgaataactttttaaattaatcttcaagacacgtcatgtcctcaattatttttaaataaataaaaaaattttattttgagccacagaactcatcttttcaagcaacatattttcaaaggaggactccagtatacaaaatagatggtatcagagcttctctggctaaagacgggtaggggttgaaagttttctttgctcccctccccatccatccccagactcctcgggtctgcagaatccaggagctgaaaacagccatcatccaggaggctgcaggactgctgaaagcagctgttaactcaggttttttttaaaatatagggaaatgaacacataagtactttgctaaagaaaacgtgagtcactggctgaggaataaaactcattcactgaagctgaagtactatttgataagctagaaatattttccctgagtagaccactgtaaaagaatggcatgaactacatagtcaactgaaagactcattaatggaaataatcttaaagaacaaamattgtgacctttttggtgtccacagactagggctttgtctacatttcaccatcatctgttcttgtaccacagaaacatggaagttttctttccgaagttcaagctagatcagaagtatgagatgcatgagctgcttaggcagatgggaatcagaagaatcttctcaccctttgctgaccttagtgaactctcagctactggaagaaatctccaagtatccagggtaagtcaggatctttcatcagagcccaacctcagcatgaaatgtcaccaaaacaaatgcttttacaaaccatttaactttgataaaatacctaattgtagtggaaaattagatttaagtcccaaatacttgaaatagcacccaggttggatgttttaagaatttcaagcaacttcattaaaataacttttcaactaatttattttaagcagacctctccccctctgcttaaagtgctcagggagaaatttgaccctgaaatagaactggtttacagaggcatcatcatttatgttgaatacaactkgaatagttcatgaaattacaccacctttacaatgaaacaaacccctagacatcatctagcccaacttctccctccttgtggaaatcccctccatagccctacgaaatagccctccaacttctcttcctcttcatgcttccagtgacatcaaactcaccatttctttgaagagctgcccaatccacaaatagctaaaattgttatatgtatatatatatawgtgtgtrtatatatgtatatatgtatgtgtgtataaatgtatatgtgtgtatatgtgtgtgtgtatatatatatacacacayatatatatatatatgsagagagacatacatatatatatggagagagagagagagagagtcctgtaacttctgattcatactttttggtcctagttctatctctaaaacttctaagaacaagtttagtcaccatccacatagaatcccttcagttactcagtgtttctcagtggaagggttcttggttttgaggggaactgcttgttgtccagagcagttgtgcatgttgcagggaactggttagcattgctggcccatgttcactaatgccagtaggaaactccagtcatcactataaaaatgctcccacacatttccaaatggcagctacatctctctacattcttccttagctgtgtggtttaatattttcttatacaattgcaattttcaattccaagagagactaaaaatggcatccacttaagtaggacacagtagggtaactgtggcctggaatcaggtcttacaacctcaagagaggtaagacaattaaataaaacaatccgtcagaccagcacctgaaagtgtttctgctatgaacacatgaaaaactgaaatgcgctgctgctttatgaagggtcatcatgaaatttaaactgtaaatgattaaatattctccctctgtttgctctggggaattaattttcctctaggaaatcagggaatttcctggagtgaaaatcagtgtaattacatgttatgttttcattatctcttataacacagtaattatataggtacatcactcatatcacatcttgtttctgtaaaaaagggcctcccaaacatagcaagcagccacagtataggcagccagaattcagkaaggctccagggacccctgggcttggcccagaaaaatgcctcagagtagtaccaggygytgggaagctgctacagaagactagccattccctgcctccaccttgcctgccaaaaggaaagtcagaggactcaagggatccagggatcaagggatccaggcagcttgaaaaccttttaggagcaccagctcagctcaagaattagtagcataaattacatgctcaataaagatttgatgcatgagtgcatcctgagtccaygcccggaatgtgtttcacatattccacaatacttcacattgggttcctgaggtctcctggtattgtttaagactcctgtggcagtccctggtgcaaccccagaccactcctcttaacgtagatgggcctgctccactaaatcccaggagcatgaccccatgggtaggaccactgtgaagaatttcaaggggctcatttaattcctcctttgcactgccacacaaatggtttttcacattatttcctttttccaggttttacraagaacagtgattgaagttgatgaaaggggcactgaggcagtggcrggaatcttgtcagaaattactgcttattccatgcctcctgtcatcaaagtggaccggccatttcatttcatgatctatgaagaaacctctggaatgcttctgtttctgggcagggtggtgaatccgactctcctataattcaggacaygcataagcacttcgtgctgtagtagatgctgaatctgaggtatcaaacacacacaggataccagcaatggatggcaggggagagtgttccttttgttcttaactagtttagggtgttctcaaataaatacagtagtccccacttatctgagggggatacattcaaagacccccagcagatgcctgaaacggtggacagtgctgaaccttatatatattttttcctacacatacatacctatgataaagtttaatttataaattaggcacagtaagagattaacaataataacaacattaagtaaaatgagttacttgaaygcaagcactgcaataccataacagtcaaactgattatagagaaggctactaagtgactcatgggcgaggagcatagacagtgtggagacattgggcaaggggagaattcacatcctgggtgggacagagcaggacratgcaagattccatcccactactcagaatggcatgctgcttaagacttttagattgtttatttctggaatttttcatttaatgtttttggaccatggttgaccatggttaactgagactgcagaaagcaaaaccatggataagggaggactactacaaaagcattaaattgatacatattttttaagatgtttgtgcaatctgtctggtattttaagcttgtttctaagaaccttagttacttggctaaagactagctgggtagaatatcttttctctgttgctcacatattttcatttttaaaaagttgcagatgagaacactatgtcaagataaagcctttgggaggaacacatgtaaacattctccttgagtcatgtgcttctctctctttccttctctctggtgcaaaataagtgttttattttaatctattacggagtcatttcttgctgactgacatcagaagaaaatagctctaaccagtcctgatcacagcatctgcttccatggtgcatcaaatcgcttggcagaggcattggctgaatcacagatcatctagttcaataccttcattttacaaaggaaagaaagagggacccagaaacaggtccatattcttactttcatgggccctaggcacgtttaaccttgtagactcctccttccttcatgaagatatatatgttctatggctgcattggtagaaagatgaatatattcgtctttcaaagttgcatatctagcttcaaagttatatgtctagcatatggcaataagcaaaacaccttcatgggcccttacagtactgtcagccttgggcactgtgtcttctgcatctagtggataagtcataccttatataccagtgggaacaaaatacttgtccaaggtcttccagtgtggcaatggcagagtcagaagcctacctttcctgagtctagtctccaagccctttttactcttccttccatctaaaacatctgatggggaccaggtaaacagcatgcactacagctacccatgggggttaaacagaatataagcayraactttgtcccagggtgaaaaggaaaatcgtaaatatccctgatcttccttaggcagttattttctgtcacagaaacagaaaagactatattcagagaatcctgaatagagctgatttacagtgtgaactatgttaactaaatgcctaattggatttctgtctgtctgctatctaatgtttaaaaaaacctaaaattcatttattgattagttgtttaatataattcagagtaatgtgaataggtaataatattaatatgcagtctaaatactgacttttcatcattccataacctggactgatgaaaagtcagtatttagactgcatwwtaataaaataaaattcattcctgtattcattccaagagtactaattgacacttatgaagggacaggcaattctaggccctagagggccaaagacagaggactaactctawctgacattcttaagtcaccttgtttgtgttcaattagtcagatttgtttgtggaaaaatagtagaaagaggaataaagtagcatccagtccaatttcccacttttaagagatgaaatctggaaaaataagtctgtgagagcacaatactcactgaaatcaatatggccaaacccagtaataaaaaggtacattattattgaaggattcatatagcatgcagataaaaaactcctgccttcttcccaccacatacactgcaaagcaacaacagcataataattgtatttaatatactactctttaaggtagaaaatggacctattctatattttaaatatactttttaatgttcccycacatttgctttaagaagttcytaagacactcagtttcagatttcccaagtacacaggcatgacagaaaaacgcasaccaataaaaaatgtaacttaccttacacaaatacatacacacaaattcagggtttccaaccgagcgggggaaatcttaacattgtagaagtcttcactatatatgtgtcgagtttttgtttttgtttttgtttttgttttgagacagagtcttgctctgtcacccaggctggagtgcagtggtgcgatctcagctcactgcaacctccacctcccgggttcgtgccattctcctgcctcagcctcccgagtagctgggactacaggcacctgccaccacgaccggctaattttttgtattttaagtagagatggggtttcactgtgttagtcaggatggtcttgatctcctgaccttgtgatctgcccgcctcggcctcccaaagtgctgggattacaggcatgagccaccacgcccggccaagtgtcgagtcttaaaaattgttcctacacagacacactcaaccacacgttctcacatatatatgctgtaacaactgagaacaggttactgacttaatctaattcattctatcttcattgtaaaacttccactccagctgaagagcctgtttcatttcaattcaaagatttctcatatatccactaattgtatggcaaaactgactcatctccagactaagatattcaagctcaggaagtcaaataatagaaatgattttttaaatgtgtaagaggttataaagaaaaactttatgtgctccttatttaacctctattaagtaaaatcctttatagacctatctccatttctgcagtaaaagtgagctctacagttagcttgtaaggctaactagtgaaattcctggacttgttcttaaaaatgcaagttttagtaattaacaaaatgatgatgaagatgtcccttttccctacaactacagatggagggagatttttctttgccatacaactagcttaaaggattaatttgataagttgttaaactgagaactttcacaaaagtatccatcttgtttttgatataaatggagatacatgtagttattcataactgtcagtaatttgctgtttatcctgtttctatatatctgtccttgagagtataattttaataaatatttcaaagattttaggaaatgtcatgttctgttaaaaaacttccaaaagtaattttgatgaacagttttgataacttagtactaactaggactaagactgcaattgactgctctacattcctgaactttataagcagtagttgtttctctctgtcaaatcagtgtccccttttcccatttgcatcatgggaaagtgaaaccttataattctgctaaatttattataacaaatacattgaaattctccattttattaaattaatagaatgttatgaatcaaagcaccaaaaaaactgatgcaattttgatgtctcgttctgtaccacattctccagatcttaatatattcagttccacattattggtgctagtaggagacataatgaaaacagttaaatgaaatccacagcgagtatactgattaaccagtactgtcaaatttctcatacctattgaattttaactactgacaaaatgagcagtaacaattccatttacctgattgtcctttggcaaaggatattattaagaatcactaaaaatagccataaagaagccatatggaaggaagaaggaaaacaaatggcatgaaaaggtctctcactgagtaactatgctcttatagttgacgctggtatatttcttttattcactacctaaaaatgaactatcttactctttaattatagaataaaaactgcaggaaagtatttaagactttttttcacaaacacaggtatctcattaacctatgttttattttgagtaaattcattattcattatttcacattataaaaagtaaccacacatacatatgcattcacaaattagatcatctttatcatacatcaatatattttaaaaaacaaatatcttctaatatcaatatagttatatgctgattgcattttgaaatagagaagctgacaatagcttcacacggtatatctcaagaactgacagtttaaaattaagaactgtatatattccacaggcaaattttgatggaaatattagcattagtacaaataaatgctgttgacatagcttaagcatgatagcttggaataacagctgattcagactagattcatcattttaaataaagacaagtacaatctaaaatgtaaacaaagtatttataaaataaattctctaggaaataaagaaaatcatcaatctattatttttaaggtatttatagctcaaagttaccagaaatctttgtggaattttcaytgccaaatttaaatttgggaatgtccgggtacaacatattgtcaccacaatccggagggccgccaaaatcgcagacggctatttgcatcctttcagtgtgacttttcaagtgggcttggagactcatgagaaaatgcagtatctttctcaccttccaagtccccctccaagtgcttatcaagctaggacaattcagctgatgtagactttcatacgatttttaaatgctaaaactctagaacaattaaatggctggtttcctgcacaaataaatgcagacttgtctcttttgcagcagtggttaaagcacattcctagagatgtttttcattacacttcactataacattggaattccgtaaccacattattactcaagaaatatatattatacctcctagggaatctaatttgaaatatgaaaagtttaacatcagctgtcattatgtctctctttctgctcattaacaacaacaaaaaaaaaaacccaaaatttaaaaacaaagccccagccactgctttagcttttgtgtaccaatcacattatctcctgctgcctttgttttgcctccttcatcaagcagttgatttaaggattggattttctggattttctttgggaagaaagaaatgaaggaagagagggagggtggggaaggagggagtgagaaagggagaaaaagaaaaaaatatgaaaaatgttattcatataatgtgtacaaagtaaattaaaaatatatagatactctactttgaataattctaatatatgagaagtctgattaagggaaaaaatgaattacacattaaagattacttggaatgatctttaattaccaaaaattctgtgtatatatataacatagcattcaatttaattcatatttttcctacatttttaattttgtataaccataatggaagttacataggcataaatatatgaactgccttaaaagacaagatataataacatacctatgcttcctttaagacactaatattcctaaataccaaatgtgtcatctcaatgacactgaaaagctggggaatgtattgcatagaatttgagaagcaaaaattaagataaattatactttccaaaatcacctcataggcttattttaaatgaaaagaacatattttcacttggatatggcctgttttgaattgtggatactatttcacagaagaaagaccaatgtggatatcatcacccatccagccaygtggcagtgtgcactcaagagagatccatataagtgccacatcagatggaaatatagttacaaacttgtatacccagtcacaagttaaaaaagcaactgtggatatcaacgtccctcctttagaatcagaaaagactaaataaacctgatgtgttatcaaaatgtttgtttctagattcactttttaatcaattatacatatatataaattatataaataactacatactacgtatgttgaacaagaaaaaattcagtctatgaaaaggaaaagcatgctcaacagtgaaacaacagataaagagagtaatctgaaagaaaggagaaccagcataaatatactgggtttcaatggtctttactgtaaaaaatgcctatggcatttagaaaaatatagcaagtggacaagagattacttttgatgttactaaatatgctcttcaacagaagaatttcagggcaatcttttcagaggaagagggtttagggtaataaagaggatttcaggatgccagagctagaaggcaccttagaggaggaggaaccatgagacagccctgtcatgtgacagacatgcacagcgagggccagtgcgctgagttgaactttgcacaaccacttagctgctgctgggaacgaggcacacaaagctctctatacaccattaccatgtcctgcctctgttttcatgact

SEQ ID NO: 9979 - DNA, 14116 bp, Homo sapiens
tccagttggaggtaattgaatcatgaggggcgggtatttctgtgctgttcttgtgatagtgcataagtctcatgatacctgatggttttataaaggcgagtttccctacacaagctctcttgcctgccaccatataagacgtaactttgctcctcctttgccttccgccatgattgtgaagcctcaccaaccatgtggaactgtgagtcaattaaacctctttcttttataaattacccagtcttggtgtgtctttattagcagcatgagaacagactaatacaccatcagaaaactcaaatgtaagtctttgatataaaatttaggggtggggagcataaacattcaattcacagcaatctactatgtgaagaaagtagcaatgctgctgtcactcaaaatgccgtggctcttaggatcctgctcgtattgaaatgaaataaatcttgcatctgtctgaagtttcctcataccatttatttaatgtgagcatcattattcatgttcctgcattatcctgtgtagtctgagtgaatactggtttccaattaccctattgaagttactgtgctttgttggtgataatcacaaattcaagccttgcccagaggatgcaggtaaatgttaacaataattcattttctggtcattttaaatttactttttagaattttacaatgtaaatgtaaaaataccatatcttccaactatgtcttctcttcagctcttttaggttgtaatcatacattcctcgaatgtgatctttttcagtgttgacccatcactgccttccatatgccaccaccaatggggaggagcgaaaaggaccattagcaaagtaagaatagttctcttcacatcaggaacctmtctccctcattcactrtggcttcaggctgacctaggagaacatggccttgccacattgatctgaggcaagaacatcagtcagaatggcctgtttaggtgttgcagagcaaaggtcttgaaatccctcagaggagatacatgtagatacccctagaggaatgttgagactacagaaggagtgggggaccaccctgggggccagcagtggaggaggtggtcaatgagttaagaacatttgccactactgctacccctgccatgctccagtgctttagaccagagacagcatcatagtcagaagatggacaggcaaaagagtacacatgggccctacgtgaggctcaagcccagtggatttataagcagagctcaagggtgggaaaggtggtgtgataggcagtctctaggatggtcctcattgctccccatctcctgatattcacgttcttgagtaatcacctttctttgagtgtgggctggactcactacttgcttctaatgaatagaatacggtagaagtaatgatacgtcacccctgagattagggtacacagagactgtagcttcggtcttgagcattctctctcttaaaatttttagctgagaatagccagctgccatgttgtgaggcagcccagtggcacagcccctgtgtgagggagcaagtcctgccagcagccctctgggtgagcttggatgcagatccatcagctcctggaatcttcagaggactgtaacttcctggagaccttgagccagggacactcagttaagctgttcccagactcctaaaccacagaaacaaagataataaatgtctattgttttaagtctctagatttgggggtaatttgttatgcaggaataaataactaatacaagtggagagaaaactcattgtatagatagtgttcaaaattctggagctagatgagatacctaaaggaagtgtgtcattagagaagaccaatgatagagccttgaggcaccaaggtcagaagcggaggaggggacaacagagaggactatgaaaaagtggccagtgaggtacaggacaaaccagggaaggagggggtcctcaaagtccaatgaagaatatgattttagaagggaagattttgtttttgttttaaagtaggctaaataagatgaaaactgagagttgcttatttacttggtaaaatggagaccgttagaaaccataataaaagaaatttcagtagagtaatggagataaaatctgataaatgtggattaaaaagagaacaagaggtgagaaagtggagagagctcatatgagcaatatattcaaggagttttgctataatgaaaattataaaaatggtgtagcagctggaatggcacatgaaataaaggaaagtaatttaaatatgggacatattacagcacgtttgaattgatgggaaggttagtagaaaggaaagactgacgtaggagaacagggaaataggttagtttcacaagctattgtttcagctactgtaggctggagaggatggcgtcctgtgtacaagtggatgtagagaggagcgcttattgtttgtctaggtttacaagagacaagtcagattataggcagagatacaagcgactggtataaacaagtgacgggaaatggtgtaatttttcttttgatccctattattttctcattgaaataagggagatgggtaaggaggagctgttggatgttttaagagaaggaaggtgttagataggttgttcaggggaagaacaaactatgagaaaaagataactgtgttgctgagatttataataaaaaacgtaacgtcaggtgagtctgcatgattatgatggtgctaataagattgtgtttgcagctgggcttggtagcttatcccagcactttgggaggccaaggtgaggggatcacaagatcaggagatcgagacgatcctggccaacatggtgaaaccctgtctctactaaattacaaaatattagccaggcatggtgacgtatgcctgtagtcccagctactcaggaggctgaggaaggagaatcgcttgaacccgggaggtggaggttgcagtgagccgagatcacgccactgcactccagcctggtgacacagcaagactctgtctcaaaacaraaaacaaaaaacaaaaaagattgtgtttgtgttgttttcctccagctcagctactcwgctgtagctgtggatgaagaagaagggtgaagttaaccagggtttgggttttgctctgggaacgtgccacaggaaaaaagagacaaaggatcagaaggtgtctgtgamctgtgatcatattgatggatcatggcatctaagctgagtaaataaggaaagaagggaatgcaggaatggggtgatggacaggaaataaataatgagatcatcagttggaggtcagcatggggtttgcatgctggcaacttcctccactgtcttcttcccttatataatctctccatcccttggtcacaggcttgtagcactccggccataggaaactatctgccaccccctcagatagatcaggctgttaggtacatgcacttgcatttttgcatatgctttcctcttagtttagaacacttcatttcttcatcaaactgttctttcttgactctaacagtcacttcctccatggtatgcctctagcaatgatcacagcatcctgtagttatattttatgtactttagtcagtttccctaattaaaatgtgagtcttgtaagagcggagaccttatattattcatgtttgtattcctggcacagggcttggtctacatgaaataaatggcctatgttcctatgtttttctggcatgaaagaatgttttgggggaactgcagtaaagacaacagatgaggaggctcctctcacagaatattttatttccactctcacatcctccattataatattcaagaggcatatgctttttgagagcaaatatattttaatagtacttttatgtggtttccttatgtatttcctaatttttatatcagcttcatttataaacagtaacaaagtagaaataaaagtaggatcctgtagctagatccacagcaactctctgtatacagaggagacagaaactcctcattgacatctactttattctttgtggacaggtaggtgagtcagtaagaacatgtgtaataatgacaaggttacaggttaaatttcatgagaagcatgttgtctttcatatttatctatccaagtttgtacataatggtgcggaaatgtgaacgaattactctaactctaccagctcttctggaagaacccctcagttcatgaagtggaaacacagtagtgattgcatagataacatggaagagcattcacttggcaactatgattaattaagagttaattcagaataacttataaagatggaaatagtaaactgagccagagagattagcaggcaaaattcttgtggagcaaacagagaggaaaaaaagatacaagtaattaaatgtaacatataaccatgtttataatgaaaatataggtcaaagctcactagagcaaatattattatgacactttctgcccagaggaaaaaaattgtaaaccctagttaaggatccatttttaagcatgattactatgcaaaacaaaattacagtacagcaaactaacatttgcagttccatagggcttattttcatatttataaaatagaaacacggagttctgataggtattattatcattttgtcatttaatgacatgagaaaaattagcctaaagttgaacaaagaacatgaaaatcagaaatattattttatattgttccaaattgacattggtatcataggaataaaaaagaaaatattagtgttggtaataaacaatgttatgcactagaataaaaggatattcttccatagagtagacatattttattctttttaaggacagagaagacatttaattattatggttatcacttattattattgaaacaaaccaggtgtgagacctttcttgaagtgcagattctttaattaaaaattattactaattaacttatatcctctactatgccaagaaaaatcttggccatgctggcaatgcttaaaaatttagaaagtggctacatttgtagaggtgtaatttaccattaaattttattaaagtagataatattttgatgacagtagaaaatgtttttattacagcatacataaggatgcccttaagcttatccaatttttcatttttgagtgagtgtactaacatttctcctgcaaggcagtgaatgaaatttcaatcacgaaagggttaaaaacattggttagaattgaagtatattctattttctagaattcacatgcatagtttagaaatgctatcacagcacattaaatgttattatactgattatttatcacatggttaattatgcctaatgcagagtgagagtttactgcaactgattataattagatgtgtttggctgcagttagaattcataatggtgcaaggtttatattttcgctcggtatgtgaaagggaaaggctttagtaatgaatttatagcaataattaggtcatagatttactgctaaatgcattacagttaagcaattctatatatacatgtctcaggactgaatgcatacgcacatatttatctgcaaaacataaccaaagacgcattaaattgctgaaacaaattggttttcttttgctatctggtttttaggtcattgtttccaaggctctttgagatcactgaattgagaggtgtgactagaagtctttatacatatattcaatagtgcaagaytcattgaaattgctgtaataaatgattaccaaattcagttacatattttcattagtctgggcatctatgcaagcaaagcctattagctgggaaggattacagaatagrgcatctaaaatttccttgcacagcacaataaatgccttcaataggatgtcagcatacctcttgtccttccattttctgtggtcaattataataagttctttcaaaattaagttctcaggttggaaattgtgaatatgactatttctactttatcctcttttgtgcagggagcaaactcacctcagaagtcacatcagaaagtacatttagaatttttatttttgaagtacataattcaaatgtaatttttaaattttatatattttagtaataaaatacatttcatacatttaaatgttgtcacaagattttgttgtctatcctgtttagtactttgatagttgcctgaaagttgggaagaagagctaatatttcaaatggcaaaataaaagttcagagatctgcttcccgccgtgccccgcggccagccggggcagccgggaagcggatggggcggtgcatcactcgggtccgctccacaccgtcgccactgctgtggtagccggttggccgaggggccacgataactggttgcccgcagtaggagcagaattcggtatgtaccgccgccaggaagatggaggggcctttgtccgtgttcggagaccgcagcagtggggaggcgatccgctcccagaacattatggctgcagcttcgattgccaatattgtaaaaagtgctcttggtccgttgtcttggataaaatgttggtggatgatactggtgatgtaaccattactaatgatggtgcaaccatcctgaagttactggaggtagaacatcctgcagctaatkttctttgtgagctggctgatctgcaagacaaagaagttagagatggaactacctcagtggttattattgcagcagaactcctaaaaaatgcagattaattagttaaacagaaaattcatcccacatcagttattagtggctaacgacttgcttgcaaggaagcagtgcattttatcaatgaaaacctaattgttaacaaagatgaactgggaagagattgcctgattaatgctgctaagacaatccatgtcttccaaaatcattggaataaatggtgatttctttgctaacatggtagtagatgctgtacttgctattaaatacacagatataagaggccagccacattatccagtgaattctgttaatattttgaaagcccgtgggagaagtcaaacagagagcatgcacgtcagtggctgtgcactcaactgtgtggtgggatcccacggcatgcccaagagaatcataaatgcaaaaattgcttgccttgactttagcctgaaaaaaacatgaagcttggtgtacagtggtcattacagatcatgaaaaactggaccaaattagacaaagagaatcagattatcaccaaggagagaattcagaagatcctggcaactggtgccaacgttattctaaccactggtggaattgatgatatgtgtctgaagtattttgtggaggcaggtgctatggcagttagaagagttttaaaggcattgctaaagcttctggagcaactattctgtcaaccctggccaattcggaaggtgaagaaacttttgaagctgcaatgttgggacaggcagaagtggtacgggagggaatttgtgatgatgagctgatcttaaaaacactaaggctcatacatctgcatcgattatcttacgtggggcaaatgatatcatgtgtggtgagatggagcgctctttacatgatgcactttgtgtagtgaagagagttttggagtcaaaatccatggttccaggcgggggtgctgtagaagcagccctttccatataccttgaaaactatgcaaccagcatggggtctcaggaagagcttgctattgcagagtttgcaagatcacttcttgttattcctaatacactggcagttaatgctgcccaggactccacagatctggtcacaaaattcagagcttttcataatgaggctcaggttaacccagaacataaaaatctgaaatggattggtcttgatttgagcaatggtgaacgtggagacaacaaacaagcagggatgtttgaaccaaccatagttaaagttaagagtttgaaatttgcaacagaagctgcaattaccattcttcgaattgatgatcttactaaattacatccagaaagtaaagatgataaacatggaggttatgaagatgctgttcactctggagcccttaatgattgatctgatgtctcttttatttataacaatgtgaaatgcaattgtcttgtaccttgagttgagtattacacattaaagtacaacaagctgttaaaaaaaaaattcagacatctgtgttaacaaacctacacatgtgcccctgcacctaaaataaaaggtaaaataagaattcatacatcttactaggcagaaatcaattctttgtaaataataagaatatgtgtaaagtccatcagttagttcaaaattaacaggcagatgatgaagtcttaactttgcagcaaaatgtcaaaaatgcgtttgggttttagtgaaccacaggcttaagagcagccaaatggtgcttaaaaagttaaaactaagagaactgtgctgaggttaagaatggttaatgagattcctggatctaaggtatttgcatcatgtctcctggcctgtgttagggcctaggtgctgcaggggcattccttatctggagtccatcatggtgagatgacgggagaggaggtagaagcgttcccagggtggttgaagtgaacctgggcagacgcagaagaaattgataagacctgacctccaagggagaatcgaggtcactgcacgtgctcaatctggagaagaaaagacatcatggagactcaactgtgtgccaaaaattaaacactatcattcggaagtgaaaataagtttatttttcagtgttctgaagcaactagaagtcaaagtgatgagaatatttatattatttcaataaaagaaactttcctaacagaagcatgaaccagcactggaactgctcatctcacagtgagtccctggacatctgaagtgtgcagatgggagccaaatgcccagcttgttcaggcataacatgtggaggagagtcgtatgacataggagctttgctctgatgacctcccatgtccctaacttctttatggttctttagsttatctggacgttttaggaggcatattttgttattgtgttcaacaacacataaaagcatctgaggttaataagtattccatctgggaaaagagaaacagaattctaactactgaaggccaaaatgtatataacaaatggtggagtttttaacttgagattccttttttcagtcctgtgtacaaggaatatttctgctggtgattactttcagttgcaacattataattcacagaattgagtaggaattacaaaatatagaaaaagaaagaaaacccaaaaccgttagaatccacatgaattttaatgatttattagcatatgcacaaagcgtgaatgttaaatatggcaaattgattgatctgaggcaaacttccaaggggaaaaattgctacatactctctctctctttcagttaacatctgccatgtagtggaggttccagagaaaaagtgagagaagctgagtctgcaccctcaacatggaggaaataagctctcttaggaccaagaacagaggacagaggaaggactccagcatgatgggcaccaagggattttggtccttctgagaaagaggaggtaaagtgaatccgtgtggtccttgcaattgttggtggtagtggggtgttggaactaggaaggatcacccttggagtctgagaacaygtagaggagaaaagcaacaaaaaccctatgtccaagagaatgtcagggacgggttacctgctgaggaagtggtagtaggtaaagcttgctttgcagaactagccataagaacatttactgggggaagtatcagcagattgagcccctcaggcctgagctgttatctaatggtgtttctgggcactgacatcagaattaaagaacatttgtgagtctccagctttttcacaacctgtggggaagcagagaactctaaggggagagggaggagcagagttgtctggcagtggatggttcactaacggcctgcaggtagcagaragagagagagagagtgtgtatgtgtgtgtgtgtgtgtgtagttgtgttcagagacacttttccaccctttaggacaattgcttaaggaatacctgtaaggagggaaactgagtctttaaaatattttctccttttactgctaaataatgaaacacaatccagaaccatgttgagtcagagtgcaacttttcaacattttcttgttgcttttaaagcagaatggtcccttccaccttggcagaagggagagctgttgatctgccgttgctctgtaataatcgtctagggttccaagctggcccaaaccgagctttggcttaacgaattatggaggcaacataccttttaaataaagccccacctaggagaactgcaaaaaagagaaaaaaaaaagtacctgtaagaagactgcatgcggtggctcatgccagtaatctcagcagtttggraggccaaggtgagaagatcacttgagctgaggaggttgaggctgccgtgagccctgttcactccactgcgcttcagcctgggtgacagagtgagaatttgtctcaaagaagaaaaaaagagtacctgtaaggaaaacaaacaaacaagcaaacataaaagcaatagagcaagtgctgttgtttaaaagcattcccagcaccattagcatctgggtacctccattagcatgtctttttctttttattccccatatctaggccttatcacaagcctgttatttatccatccctctgccactctctgatttaggttgcatcatctcttgactggatcacagccacagcattctaattaccctctctacctatcstctaccctgtagccaaagcgatctttttaaaaagctaaacagattatatcatcctcatacttaatgtacttcagtggcttcatttttcctctgagggtaaagactaaagtcattaccatggcctatgagccctgatgtgatttgggctctactcctgtttcatgagtactamcctctctctcttctttattctctgcctactgtaatgtgtggaataactgctgtaggaacagcacagatgaaactccaccagaggacatggagagatttggaaacaggaaaaaggccttactgccagtgtgcaaatatgaaataagagagatcacgagaaaatatatctgaggcttaaaagaagagaaaggtccagtatttcagctgcaaccaggaaamaaaggattcctccagggttaatgccyggtttggataccagctgtcatttcccattacagcttgaaaattttgcaagagcctgcctattactaagcttcatgacattcctctctggtcttcatgatagtctgcagagtcaagggctgatcacagctaaagtccaaagtcctttatgaattttcatcaaaattagatttccggaaactatgcctgctcacagtggcttttaggtatatgatagcagaaccagcaattcaatattctttatggagagttggaagtgaaccagcataattcaactgaaattagagagtgtaggggttaaggggtatctcccaaaggataggtgggtgaattgatgtattaattaattattaatattaattaataggtgctataataagtgaatgctgatggttcagtggcttaatagaatatgtttcttgctcacataaaatccaaatcgagtgtttgtggatggcattccaggcagtgattcagcaactcgagcttattccatcctgtcagtcttccgtctcctgcaaaccctagagtccagtaatttcagtgagcagatggggaaagaatgatgaggaaggcacaactgctgtttatctacttcagcctagaagtgactcactctggctcatgttccattggtgagaaccggtcatatggctctatcctaaatgaaagttgggtagctgctttccagaacaacaccacggaagaagagtatgtttttggtagatagctggtaatctctgcaacagagtgagagaaaaatcatgtttcatctgttgattcctacctgttattattattattattattattgttttaattttaagttcaggggtccatgtgcaggtttgttacataggtaaacttgtgtcatgagggtgtgttatacatattatttcatctcccaggtattaagcctagttattttttctgatcctctccctccttccaccctcccgctgtctgacaggcttcagtgtgtgtagttccccctctgtgtgtccatgtgttctcatcatttagctcccacttataagtgagaacatgcagcatttggttttctgttcctgcattagtttactaaggataatagcctccagatccacccatgtccctgcaaaggacatgatcttgtttttctttttcttttttttttaacctactcattattatgtattaatttttcttcccttagcaataatcactaagttgaattatttatcatttgttgactgaatctaaaaacagttggactctctcaggagaggagagagactggtaggatttcccgttgtgagaaagtttgctccattcagtttttgtctacaggatgaataagcattctttctctcactgtggtagtggtagggtgtgggagatagcgaaattcttgtttgtttgagatctgccttgtactcccacttagactcatgtccaatgacttaacggcattttatattgatcacacacatagttgaggggcttggtgcagatattatttactagcatgaatttttgtgtgtgaatattatatagtaagaagtaatattgttcagtatatacattttcttcgtgacatgaaataagacaatgagttgtttttttccgtaatccactcacaatggacagaaagagtattaactaaaatgtttgagggtgaagaataagttaagagtacatgggggaaaattacctgttctactaagtaagaatacttagtattgtctgttaatgcagagggctgggccagagaaggtgagtaaatgttaatataagagattaacacactatggttgggtgcagagtctgaagcagatcgtttgatattgttgttttatgctctactacatctaattaggtagatgacaacttyaagaaaaccctttcttcctttactaatgccaaggaggatcagctcaagagccatttgtatgtctttctttctctgatgtttttcatgtttgaatattggaaggacagagaaaaaattcatttgcttaagaaaagcaaatagactgggcacagtggctcaggcctgtaatcccagcactttgggaggccaaggcaggcaaattacctgaggtcaggagttcgagaccagccttgccaacatagtgaaaccccatctctactaaaatacaaaaattagccgggcttgctagtaggtgcctgtaatytcagctacttgggaggcataggcaggagaatcgcttgaacccgggaggtagaggttgcagtgagctgaaatcgtgccactgcactccagcctaggcaacagtgcaagaccgcccgcccccgcaaccgccaaaaaaaaaaaaaaaaaaaaaaaaagcaaataaatgttctgtgactctaatggttggaggttggggaggcagagcagggtatctgctrtgagggaaaattaagaaatatggattcatcaattgaaattttattcaagtcccatgtacttacctagggtggcattttagtaactggtgctgactcaaacaatgtttttyggagatattttacccatattagaaacaggtgaaaggatcttggcctactgttaggattcattttcacagttagcccgatctcgcggtggttgtatatttgcaataaaatacgtgggtggacagagcagaggattatccctgagatgtagaatagaaagattaaggctgtgacatcaagatgattccgctgcatacaaagcctgcatttctttagatatcaggaatatctgccaaggggaggccatcagagagttccatgcaccgagggttctattatctgtcagaacacagatctagacctaagcagtgggcattactagcaggcacaattttctaaatatcaatatcactaaaatatggaaacagtgagagttgtctcagaatggaataggccactttgtatgatggagtcctccattac

SEQ ID NO: 9980 - DNA, 27867 bp, Homo sapiens
  misc_feature (1904)..(2021): n is a, c, g, or t
  misc_feature (19115)..(19115): n is a, c, g, or t
tcttgtagatattttcacatatttgtgaaataatgttatatacaaggtaagtcattacgacatcatagcaaaactggaaacaatgtaaatgtctttaagtagaggactggttaaatgacttgtgatatatctatattatggactatgacatggctattaaaacaaatatatatatatacactggtaagaaaaatattcaagatgtgtgctaagtgtaaaaggcaagatacagggccaggcgcggtggctcatgcctgtaatcccagcactttgggaggccaagtcaggcagatcacgaggtcaggagatcgagaccatcctggctaacacggtgaaaccccgtctctactaaaaaatacaaaaaattatccgggtgtggtggcaggcacctgtaatcccagctacttgggaggctgaggcaggagaatggcgtgaacccgggaggcggagcttgcagtgagccgagatcacgccactgcactccagcctgggcaacagagagagmttctgtctcaaaaaaaaaaaaaaaaaaaaaaaaaaaaaggcaagatacagagtactgtgcatattaatgccttcatttgtataaaataagaaaattacatatatgttttgtttgtatatgcataaaataactggaaagataagggaaaaaataatattggttgtaaaatggatggtttggggacaggaaggagaggaagacttttcctagaatgtcctttatacatttgaaaatttttttttttttagcaatagcaaggtttattgtttattgtgaagagcgaaaggacaaagcttccacagtgtggaaggggacccgagcagattgccctacatttgaaatttttaaactgtcgttgtgttaactgttgaattaaaatttaagtgtttggtctgaaagtattacttctgtttctttgaatctygaggtactctaacatttaatgtttatcatatattcagatgagtatggaataagatcatgtatcatctatgttatttaactatgtccatattgtagttttccaagctaaattatgacaattatactctatatctgtggtttttaaaaaaatgctactgtcagagcacatcacattatgtatatagtaagcactttgtagatacctgccaaatttatttaaataccttacatttggcttccctaccagagcagtgcctgcagtagaacaaattgagcttattgtctaaaactcttagtaattgtacagttactcaggaagtcactggaagaggaaacgacaatggtcctaaaaattagacgaattatagcaaagtatgactttttaaaattttactcaaagcagtgggagaatataatacatttttaaaggattattggctggatgcagtggctcacacttgtaatcccagcactttgggaggccgaggtgggaggatcagttgaagccaagagttcaagaccagcctggataacatggcaagactccatccctacaaaattttttagagctgggcgtggtagctcacacctgtaatcccagcattttgggaggccaaggcgggtggatcacttgaagccaggagtttcagaccaacctgaccaacatggtgaaaccccatctctactaaaaatacaaaaaattagctgggcatggtggcgtgcacctgtaataccagctatttgcatgactgaggcacaaaaattgcttgaactggggaggtggaggttacagtgagccgagattgcaccactgcaccccagcctgggtgacagagcgagaccccgttacggcgagctgagatcgcaccactgcactcctgcctgggtgacagagcaagaccctgtttcacatggcggggtcttgctctgtcacccaggctggagtgcagtggtgcgatctcagctcgccgtaacnnnnnnnnnnnnnnnnnnnnnnnnnnnnnnnnnnnnnnnnnnnnnnnnnnnnnnnnnnnnnnnnnnnnnnnnnnnnnnnnnnnnnnnnnnnnnnnnnnnnnnnnnnnnnnnnnnnnnntgtgatctgcccacctcagcctcccaaagtgctgggattacaggtgtgagccacctcacctggccagtactttttttaaaaaaaattagctgggtgtggtagcatgcacctgtggtttcagctacttgaaaggctgaagcaggagaatcacttgatctcaggagtttgaggctgcagtgagccatgttcaagccactacattccagcctgggtgacagagcaagacttgtgtcaaaaaaaaaaaaaaaagaattattagtaaatggttaaaatttttagttttgaagttgaaagattaaacttgttatcttagagattgactgatagactctgtcaccaatcatattaaaagatcagcaaataaattttagtgtctactatgacccagttttatactaggccctgaggatacattggtgagctaaaacagaggtagttttacactcattgaacatacagcccagtgagggagacagacattaaatagtaatgttcatgtttgattaattacaaatgaattaaatgctctaacaaaaagcaacagattttcttatagtgtgtataaaagaaatctgatgtagatatatggtatcagggaagatgtagtgcttctggacctaaaaaaaaaaaaaacagaggctgtgcagagtccacatcatgctgtccatgttaggtatttcagtcatttccagatttatcaatgatctattgctgtgtaacaaaccacacccaaacttggcagcttaaaacaactccacaattctgtgagttcactgggtgattcttctgctggtcttgcctgtggcggctgcattcagctgggggctgagctggggggctggtcttccctattaggcctctttggtctggtggtcccaggattctcagaaggtagactgaagctgcaaggcttcttgargcctaggctctagaacttgcacatcaccactgttggttaaggcaagtgagaaggctagtagtctagattcaagactgaggagatagattccacctcttggtggatggaatttgtggccatatttttcaatttaccagtctatcaagtaactaattaataaatagttatttactaagcattgttttaagaactggaaatcaaacatgaataagagacagtaatatataagttgccttttttccttttctgtggagtacatggtatttgctcattgtcattccattttccatagagatcaatatttgtgaatgtttttttccatagtaatgaatgatgaaatgaataaaatataaacagtagagtcttaacctaattagagaagaggaggaaaatccctggggattataagtaatttttagtctttccaaatttgcataaagaaacatattttgtagtcagaaaagaattagtgctatgctggtgtagccatgcagttataaatgatatctataagcacaaaaattaatttagtagtgataatcttagggaactcaaatttttctttctagttattatcactttgctatcaggtttattttagctacttttcttttctttcttttttttttttttttttgagatggagtcttgctctgtcacccaggccggagtgcagtggtgcgatctcagctcactgcaacctccgcctcctgagttcaagcaactctcctccctcagcctcccgagtagctgagattacaggcatgcaccaccatgcctgactaatttttgtatttttagtagaagtgggttttcaccatgttggccaggctgagcttgaactcctaacctcaagtgatccacccgcctcagcctcccaaagtactgggattataggaatgagccactgtaccccacctcttttagctaccttttaaaggtggtttcttcctagctcaaactttacccttttgaataattctgaattaatgaataaacattatatgtaaaactaataacaaagacattagctacctggaattttgtttttgcaggaaacatcccataacaacaaaagtatttgatttgcttagagagttattttattagcagtaatagcatctaactttccaatttttttttaaatctaagaatgataagaatgctgcttttcttctgatggaaagtgacaggctaatcatcagtttacccagagtgaagtggacggaagcagcactgaccatggcgtctcagcttcaagaaaaatgtattgcatttattgtagacaacttctccaagattattcagagtgaaaattttgctcttcttttacaggtactatgcctaaattatatcctatatttagttccatctttgtgttctgatttcaattatgtaagagcttttaaatgcaggttgcttttgattaaattaatgtgatttaaataaactccatagcagatggcatgtttacataggatttaaggcagtgatggacaggatatttggctcacaagatgagaaaggcgagagggacaggtttgagtgccctggcaaggcacagtgtaattctggccaactctagccctccctcagcaagccacattttagaaaccaaagtcataaaggtactgttttggccagtaatacaattatgatccatgcagaattctctgtcttattgggaagctacttyctctaaaattattcacagaataactcctattgtttatttctaggttctgtatttagggctatgttggcttttaaaaactgtgtgtccaacatggcacatgtatacatatgtaacaaacctgcacgttgtgcatatgcaccctagaacttaaagtataataaaaataaataaataaaaataaaagctgcgtgcatatgcatatatgcgaattttttaacaaagggaaaaaatacgatttctggttgacttcatacagctagttataatgatctgttacgccagactttcacatttcttgtgcattttatatgtattcctcttaaatattaatttctgtgttttatagtcacaagcaatgagcagcacagccgatctgttggacacaattttaaaagcaattgaagaaaatatcaccactgaaaatagctgctctcttcttatggctctggacacactgctgaactctgacagtacaaaggaaatggtactgaatgtaatgaaatttattaaaataatgcaatatttgaactaagatttttagatgtatgtgcattttaaatgttgcagggtcattgaagctaggcagtggatacctaggggtggattaaggtctctacttttgtatatgtttggaattttttataatactaaattttaaaaattccgtttgtctccaaatggacttcttataaaagtttagaaattgrcagtttggctgggtaattttaaatttagtgtgatatttagcaacattatttggcacagcataactctcgtatttctccctggtcctacagtaaattttctagatataaaatgtatattttagatataaatgtatattttagagtttttaatcatcagtgtcttttatttttataatcttawtttttctcttcaaaaaatcatattttaaaattaggctgggaagcaaaattaaaatatttatttttaaatacaattaatcagtggccattaattaggtaattacaaattattggcattctgtatttgttcgacaagaatggtttttaaaatgtatcatatttattactattccatagagcatttgaccttgtaatgtcatagttgatatgaaaaggctgtggaaggtgttcatatcaagggcattggtgttttaaaataacatttggttgaaaagatgagattttttagctttgtgttcatttataaaattttgtyattaataagtcttcataaataacatgtacccaacgatcttaaaaatctaaatgatgacatcattgatctagcttaggagtaagtagattctgaaaggaataatgactggttgctatgacaatgtggctctcaccagctgctgatttgttgcttgaacacagggttttacgtgcaagatccaggctctgcgtgataagctgtggatcttcctggttcagtctttctatgctgttcgtcacacagaaagctggaagctgatgagcacagatgatcaacagaaaatccaagcaggtacgttagccttgagatatttcaattcttatgtaatgatcattgtgacmgcagatattttgagggcattctgrtaagtgaaaaggttaacatttgtgtgcttctgttggataataggataactgaaactggtgctcatatgtttaggcagttttaataaatcatgctttttagctgttcttagaaaatgaaactcatttcctttatatatatatatgtttctaatcttactatacattagcaacaatgttctaggcaaatttgcttacaagcattcttgtgaagagattaaaagtgtaagaaaatgtaacccacatagaacagagtatcgaacatactttttcctcctttttaaatatgttttgtcataaagcttttccatctttttcataagacaccctttcttgtggttttgcctggaatagatggctttatttcacaactgattggttcaatgatgtggagtgtgctattgcggactgtccctcaggagctgcacagtggtctgtgacatttaataggtatcatctgaaacattagcattaaacaaaagatgtatattgctcagaacatgtgtttaaaaaaaatatcaaaataaaaatttgagggtgtggaactgaaaatgtcttcatgactatttttgggttaaagcaggtgccttagataaaatattggcatattcagtgtgtatactttttaaaacattttaagagactgaattttatgaagcaaacattttagtactgtaaacatggaagccatgtctgttaaaatatattttgagaatgcataaatatttaaattctttagtggtatcatcagaataggatctgcttttacattataagcattacatgatagtgtagctagatgtgatatgaagagcacttttcaaagaaattccattattttaaacaaaaattatgagaagaatctcttagaaattggacatttttttccttgtgactatttctgtgctgatttttaaatgatggtttatttttacaaaatttatgtaatgtaaagtaacaagataagatcagcattccttcagtaggtgtcttcagctctcttccgattagtagcaaactttggttttctctattttagaggatttcatagttaagttgagcttctgtgttctttaattcttcaaagtgctaattaaaaatacatgtaaatacccatatttaaataaaatgttattggtaatccaactatccagctaatccaacaatcctttttgaattgtcaaaaaggacttttcgttctgttacattatatcagtgtaataataatgttttaatcttaaataagttgaattataatgagttctgacttatgcataattacttcattgggaaacccagataaaggaatggttctgggttgtctgttactacatttcgtatgtcatagttgagttactgacctttgggagaaattttttagtttaatttcttcctgtgtattattgtgcagagtcatttgcttactgcaaatcagtcctatagtgccattttcaggatcctgctttgtcttatagcacatatcctatagaatagagatcatggaagatgcatggtagttacagataatttaatgtattttttattagctgatttaataaaaatcaaataattttcagagattgtatatatttcttcaaaatatgtcttaaatcccagtaaccttcaaaagaaatacatttgctaaactatatttgtagctctcatataattattccagcctacatattttcctgacattcaaattcttatttgaagagcatagacatgagttctgcaataaattcccatataaacctaacttataaaatgaatttttatttaattataaaaagaatattttgaagatkcttattttattttcagtagaaccttatttttttattttctctttcctccttcctcattatatatctgcaaaaccagaaaatatttttaatttcaagagtatttttacatttagtataaacattttctcatatttaatagcttgtagaatgttacatttgctataatctgtaattttttgtaatttggagaactaaatgaaaccaattatctaaaatgtcacagtttgagaaaattctcatgtttttctaaatgtatgaatcttctctgtgagattgtacagttcttatttattaattttaataacataaaacctaggggccagagaataagatagaaaatgaggttcttttaaaaaaattctaaaatataatagggagttgttttgtatactagattggtttcaggtttattaagttatttccatcaaaatataaccttttttctactgacatactatttttcctttacttctaaggtaataataatgttccttataaaaacaaattgctgtttctttctacagctgcatttgacaaaggtgatgatcgaagacttggcaaaaagcctatattcagtagctcgcaggtaaactttctaaattttataggtacaaatgaaaaagataacaaattatttaaagcttattattttatatttcagaaaaagttttaaaaatctattcattaattgaagctatttcttaatggaaaatttttctttttctaaatcaagtgaacatttaataaatgttttaaagtgaattttttatatccagttggcactggaagtatctacctttttcatttccttgaaaacctttttggcagctaacgtattagagctatttcagtctattagaagttgtttagaactctagacctaattcaatgtctrtttttctaattagcctacttcttaaaaaagaagattttaggctaggcatggtggctcacgcctgtaatcccagcactttgggaggccgaggcggatggatcacctgaggtcaggagttcgagagcagccaggccaacatggtgaaaccccatctttactaaatacacaaaaattagccaggcatggtggtgcacacctgtaatcccagctactcgggaggctgagggaggagaattgcttgtacccgggaggcagaggttgcagtgtgatgagattgcaccattgcactccagcctgggtgacaagagcgaaactccatctcaaacaaaaaaaaagattttaattcacataatgtatttttggtgtttttgaaaaaagcaattagtactaagagtacaactgtgttttactttaaaagttacttggtatacttttatgaggtatctaaagtagttgaattcttagaaggtagtattgtggttgctgaaaactagagggagggagaaagggggagttgttcaatgagtacagagtttccattttgcaagatgaaaagttttctgttgtgcaacgaagtgcatgcagctaacattactacactgttactgaagtgtattaaagagtacttaagtgtattaaatggttaagatggtagatttcatgttttgtgtgttgtttgtttgtttttgaccacccacaaggttatttggtgtttttcttataacctgaaataaatttgtcttcccaaaaatgttattwattatggttagggttcctagctgacttacagatgttcacttaaccaataatatattcaaagtacaaaattattctaacctctgtgtggtacaatgatagacatacattgagagttccagtttggaatgcaatgaacgtattgccctagcagagtggaataggaaatccttttttcttcctcatcagccagttgataggaactaatgcagctccaagccacaactgagagttgtcatggcttgaggaagaggtcaagctccaaatgtcttgagtgagaaactgggagactggagtttttgccaattaacctcttaggattgtttccaaagtgggtttcacaagatacgagctccatctagcatcaactataagttggagagtagctacacaccatagctcctctttttattttttgagacggagtttcgctcttgttgcccaggctggagtgcaatggcatgatctcggctcaccacaacctccgcctcccaggttcaagcagttctcctccctcagcctcccraatagctgggattacaggaatgtgccaccatgcctgcctaattttgtatttttagtagagatggggtttctccatgttgttcaggctggtctcgaactcccgacctcaggtgatctgcccgcctcggcctcccaaagtsctgggattgcaggcgtgagccaccrcgcccarccccatagcaactctttatagaccgacgatgcatattataccttgaaagtgctgagaaacactaaagaatacttttgaattgttgcatccaaaattttccccaatgttatagctatggaatacgactagggtcccgacaacccttttaaagcatattatacgattccacagaacatactctaggaaatggtgcactaggacatttttttctgtgttycctgttatccccgtgttttttaaaggcccccaggaattagcctacttgccttcctatcccctrctactcaccaggcttttctgccttccttgccttactgcagaatagaacaaagtttcattatttttcctcatcctcctgactttgtggttgtctaagtcttttttctgttaagaacaatgggaaggaaggaagtttcccccagaaagacagtgatatgctgaaatggatgctggacacaaaatcaaaagagttcaaattttggctttgcatttattatgtgtcatctgtgagtcttagtttgcttatttataaaatggagtaataaaacctagcaggattattgtgaaaattaggtgaaataatttatgtgcaattatctggtatgtagtaagtgctcaataaatgtggagcaaataaatgtgttttccaaacagggatgagctatctaggaggtgggagaaagttaatcagataagacagggaaagaggttttttgtttgtttgttttgttgtggtggtggttgttgttgcctgcttcatttttccttcatagagcgatttaagaagaatgcttagtaccaaaatacttaaggataaaatatatgatatctgggatttgcttcaaaataaaatgggggtgggtgtgtatgaaataaaattggaattaataatgaattaataatttttagagctggctattaggtacgtgaggattcattatactcttctgtcctcttatgattatgtttaatttttcctattttttgagacagggtctcactctgtcacccaggctggagtggagtgacacaatcacaactcactgcagccytgaccttctgggctcaagggatccttccacctctgcttcctgaatagcaggcataggcccaagctaccatgcctggctaatgtttgtatttttttttgtagaggyggggttttgccatgttgcctaggctggtctcaaactcctgggctcaagcaatccgcacctggcctattgtgaaatttttcaaggcatacagctataccatatactatatagatttcacccatagcgtaatacttcaagatgcataaattcaaggatagaataaattaagtagattcagtgttaagggtgggaaggagttctaaaagcagaagtcagcctggttttaggtattaaaaatagagaaatgttttttttttgagctaagatttgagcaagaaaacaaaaaatgaggaccaagcctatctgaacgttttaaatgttagaatcctagaagactgctgtgaataggaccagtctctacgctgtggacaggcataagctgagacccaaagctgttaataatttctgaaatgtcccaggctggttagaagcaaaactaggacaagaatctagtggttgttttatcaccgtgctttccttttttctaaatttaaccaagttatttattgtgtatttttttgtgtgcacccacattcatatatgttattttatctttgacarcttttaatgtaattggaagcttttcatatttaaaaatagaccttaaactgcatatcaaaatatgcaatatatgcccagcattaacaacattgattacgttttttgtttgtttgttttttgagtatccaatatgtgacatggtgccgagggatacaaaagatgaagagagcacaggctctgcctcagacctctacaatytcatacagcttccaaaggaaaaaaaaaaccgtttgcatacttacataaagaatgacaataggacgggcgcggtggctcacacctgtaatcccagcactttaggaggctgaggtgggtggatcacgaggtcaagagatcaagaccatcctggccaacatggtgaaaccccgtctctactraaaatacaaaaattagctgggcatggtggcgcatgcctgtagtcccagctactcgggaggctgaggcaggggaattgcttgaacctgggaggcggaggttgcagtgagctgaratcgtgccactgtactccagcctggcaacagagcaagactccatctcaaaaaaaaaaaaaaaaaaaaaaaaaaagaatgacaatatyggccgggcacagtggctcatgcctgtgatcctagcactttgggaggccgaggcgggtggattgcctgagctcaggagttcaagatcagcctgggcaacacggtgaaaccctctctctactaaaatacaaaaaaattagccaagtgtggtggcatgtgcctatagtcccagctactcaggaggctgaggcaggagattgcttgaacccaggaggcagaagttgcagtgagccaagactgggccactgcactccagcctgggtgacagagcaagactctgtctcaaaaaagaaagaaaaaagaaagaaaaaaaagaatgacaatatgatcttaaaatattatcctagaatttctaccaacttaaaaattttctttgttccctttcatatcaaggttggttctaaggaaaatgatgaagtaggtatgtttatcttcagtgccattttatttgtccctttttagcctatttcagctatttttaggatcccttttccttcgcttcctatagccagccagtgctatactagtatcttatttgtmcaaaaaccaagctttgcagatgtagtgtattgatgtgctgtgcttcctaggagcttttaaaaaaaaawttttttaaataaggactccaagaagtaaaggattcttcccacagaggattaagtctttaatgataaaatttctggcacttggaataaggttgaagagagaatttttattgaaaatctttataatgtccctcaaattatgctatatagatgacttcggtgtgaggttaaaaaatgagctcaagtcctgattccatccctcatcagcctgagacctggggtaaatcacatacctactttaatcctcaatttcttgtctaagaaatagaaacagccacaggagctagttcatgggactgttgtgaggattaagtgggatgatgtatacaaaagatgtagtataaaacatgggagtaagccttctaaaaaatcatggatattatcattcctcagggcatcctgaatctttatagacattaatctctatcaaaacttcatacattaaaaaagcyttccttttatttatttatttactttaatagatagaatagcatgcctttaaaataaacacttatgctgtatttcagatttgattacggtaatctaagacaaagttttgatccaaatgatcaaagacagttcaagctttgaccttaaatcataatatgaacttttctattttttttctttgaaagactggcttttggaaacataaaatattatatgttaaagatttcagtcaaattacaaagtattttttttcttttttatagcaaaggaaacaagtttctgactctggtgatataaaaatcaaatcttggaggggaaataacaagaaagagtgttggagttatctctctactaataaaaagatgaaatctgatggattaggagcatctggacattcgtcaagtaccaatagaaatagtataaataaaactctgaagcaagatgatgtaaaggaaaaagatggtacaaaaatagcatctaagattacaaaagaactaaaaactgggggaaaaaatgtttctggaaagcccaaaactgtaacaaaatccaaaacagaaaatggtgataaggcacggttggaaaacatgtcacctagacaagttgtagaaagatcagcaacagcagcagcagcagcaactggacagaagaatttactaaatggaaaaggagtgagaaatcaggaagggcaaatttcaggtgccagacccaaggtactcacaggaaacttaaatgtgcaagccaaagcaaagcctttgaagaaagctacagggaaggattcaccatgcctcagcatcgcaggaccctccagcagatccacagattcaagtatggaattctcaatttccactgaatgtctggatgaaccgaaagaaaatggatcaacagaagaagaaaagccttctggacataaactatccttttgtgattctccaggacagatgatgaaaaacagtgtagatagtgtcaaaaattccactgtaggtgggttttagcactgtaatttttaatatctcctgacagttaaatttccttcaaaaaacaaaaacctaaacctgtatttgggcttttatttagtttcagatgccaacagaatacttatgtatatgtacttatgcaaacagagaaaatggtagtccttcccactttaatatttcattttgtttatagtgtctaaccagtaaacttacacgtttgttacatatttaatgtattctctcttatgactcactttttcttaatttatagccataaaatctcgacctgtttcaagagttaccaatggaacttccaataaaaaaagtattcrtgaacaagacactaatgtaaataacaggtaggtcttcattcagtgttttaacctatctgttagctttctctcaaagttaattatatactaactgctagctaaatatttttaaaatatcttttattttttgttaatgtatttacataatattttaacacagttttttatttattaaaagaaattagtatatgcaaaatgattgaggcacaatatttaaaagaatatattaatgtgtactatggcatatgattataccttgctttattatacttgatctacagttttataaacttaaaaagacttatgagcatatgatttttctattttcaggagagatgtattttttatttcttgaaaaaaactgtttcaggtattggtcttttaaaaagttcatgttttggaatctaagtgtaatactgaatgcaaataattttttttagtgtactaaagaaagtcagtggcaaaggatgtaktgagccagtaccacaggcaattttgaagaaaagaggaactagcaatggatgtactgcagctcagcagaggacaaagagtaccccatctaatcttactaaaactcaaggtaaagctgaaatagtactggatatcttgaaattatttccttgtgtaaactggataagccaaactctgatttgcaacttcagtagcaaataagcaaaatatggttttactcattttatgtttgtttcacaccatagagatgagattgtaaacttttacttttcagacaggtgttttgggatgtaggtttggtttttgttgttctgttgttgttattgttgagacagggtcttgctctgtcacccaggctggagtacagtggcatgatcacactgcagtcctccttcctctscctcccaaagtgctgggattacaggcatgagtcaacacacctggcctctgtttggttttcattgtcttttrtgagagaaataattaagggagtcactaatttatctgcatttctggtccttttaaatattatgcccatgtttcttgaaagttccattgataattataggaatttcatttgtaaaactggcactaaagagctctataaaaagtaatagtgcaggctaggcgcggtggctcacgcctgtaatccaagcactttgggaggccaaggcgggtggatcacctgaggtcaggagttcaagaccagcctgaccaatatggtgaaaccccatctctactaaaaacacaaaaattagccaggtgtggtggtgtgtgcttgttgtcccagctacttgggaggctgagacaggagaactgcttgaacctgggaggcggaggttgcagtcagctgagatcttgcctctatactccaggctgggcgacagagcgagactctatctcaaaaaaaaaaaaaaaattgataatgataatartagtgcagtctaaacaactataatacataaggaggaagaatttcccttccagaatctgtgtgagtccattgtttttcagtgttctgaaaacgaaaagagtactgatcagattgcataatttgctaaaataataaccaattttcaaaattgcttttatgtatcaagcattaacatatgtaaaagcagttcktaaaatgctaaaaacagttttgatttagattatgaattattactgaaaatcaattaaaaataaggtagagaaaacattttcatatcctagtaataactaaatgttaaacattttaaaatatttgataattctgtttggcagatttgaatgtccaaaatatcatctctaagactttcaccagtataaacaaatggattccccaaattaatccccttctttccagtcagcagttttagtttccactggagatctaagttgttaatcctaatgagctacagtaataataatctggttatgacaagtaaattggttttattcatgtttgaagaaaacaactgcaacaattttaacagttctatttattttatatttagcttgattctccttttcagctatgtagagcacactatttttttttctccaaaaacttcaaagggaagacctttcttgctcctttgataaaagaaaatccgattttttcaccctcatatatttttgcaaatccagttttggcataaaaatcaagtctstttacttgaggaagagagatcctattttagtaatttttactgggaccctggagtagtccctctatatttttaattgaaaaaatttttttattttatcatgtaactgattcctaatctgtgcttgtccatttgatcatagatatgttacccttccattgtgttcttgattttattttttctgaagtaattttaaaacaaattactaaattttactcacaaattggaggtgatattacattactgaatataccctcttacttttcttaggatcccaaggagagtcaccaaactcagtaaaatcttcagtctcttcaaggcagtctgatgaaaatgtggcaaagttggaccacaatacaactacagagaaacaagcacctaagagaaaaatggtcaagcaastacacacagctttgcctaaggttaatgcaaaaatagtggcaatgcctaaaaatctaaatcagtcaaaraaaggtgaaactttgaataataaagattcaaaacagaaaatgcctcctggacaggttatatcaaaaactcagccttcctcccaaagacctttaaaacatgaaacatctactgtccaaaaaagtatgtttcrtgatgtgcgtgataataacaacaaggacagtgtttctgaacrgaagcctcacaaacctctcattaatcttgcatctgaaataagtgatgcagaagcactccagtcatcctgcaggcctgacccacaaaagccattaaacgatcaagaaaaagagaagttggcrttagaatgccaaaatatttcaaagctggataaatcattaaaacacgaactggaatcaaaacagatttgtttagataaaagtgaaacaaaatttcccaatcacaaagaaacagatgrttgcgatgcagctaacatatgttgtcattctgttgggagtgataatgtaaattcaaaattttatagcaccacagccctaaaatacatggtttcaaatccawatgaaaactccttgaactctaatccagtttgtgatttagactcaacaagtgcagggcaaatccatttgrtatcagatagggagaaccaagtagggagaaaagatacaaacaaacaatcaagtattaaatgtgtggaagatgtttcactgtgtaatcctgaaaggacaaatggtaccttaaattctgctcaagaagacaaaaaatcgaaagttcctgtggaaggactgacaattcctagtaagttgtcagatgaatctgctatggatgaagacaaacatgctacagcagactcagatgtatcttccaagtgtttttcgggacagctatcagaaraaaattctcctaaaaatayggaaacatcagaatctccagagagccatgaaactccagaaactccatttgtgggtcactggaatttgagtactggtgttctgcatcagcgagagagtcctgaatctgacactggcagtgctaccacctcctccgatgacataaagcccagatctgaagactatgatgctggagggtctcaggatgatgatgggtcaaatgacagaggtatctctaaatgtggcactatgctgtgccatgattttcttggaagaagtagcagtgataccagtactcctgaagaattaaaaatttatgatagtaatttaagaattgaagtaaaaatgaaaaagcaaagtartaatgatcttttccaagttaattcaacgagtgatgatgaaatccctaggaaaaggccagaaatttggtctcgatctgcaatagttcactctagggaaagagaaaatattccacgaggcagtgtccagtttgctcaggaaatagatcaggtatcttcttcagcagatgaaacagaagatgaaagatctgaagctgaaaacgttgcagaaaatttctctatatctaacccagctcctcagcagtttcagggaataattaatttagcttttgaagatgcaactgaaaatgaatgtcgtgaattttctgcaantaaaaagtttaaaaggtcagttttactttcagtcgatgaatgtgaagagctgggatcagatgaaggagaagtccatactccctttcaggcttctgtagattctktttcaccttctgatgtttttgatggcatttctcatgaacatcatggaaggacctgctattccagattctcacgagaaagtgaagataatattttagaatgtaaacaaaataaaggcaatagtgtatgtaaaaatgaaagcactgtcttggatcttagtagcattgactcttcaagaaaaaataaacagagtgtttcagccacagaaaaaaagaacacaatagacrtcctatccagtagaagcagacagcttcttcgagaagataaaaaagtaaacaatggaagcaatgtggaaaatgacattcagcaacgcagcaaattcttggatagtgatgtaaaatctcaagaaagaccatgtcacttggatcttcatcaaagagaacccaattctgacataccaaagaacagctctacaaaatctctagactcctttcggagtcaagttctgcctcaggaaggtccagtgaaagagagccattctacaactactgaaaaagctaatattgctttatctgcaggtaatgtacagaaatagaaatgctaaatgcataagaaaataagtttataaaattttaaagttgtatgaagccctgaatgttatattttagtcagatagaataattacttaagcaacagattaaaattttaaatgaaaaatgtcttaatatgaaaattactcattctttattgttcacttaaaatcctaatgaagaagtaatatctagtaaaaattttgattgttatatagagctaacctactaagagattttaaatgaaagaataaaaagaaaaacttagtttgctgctatttagttatttatgtataatttaacacaagaattcttgactattagaaattttattatacattggatatgatttatagacttgatagtatataagaggcctgtgcaataactctagtaatatgtaactaaaagcactgaactattttaacaactagattgattattacaatttatatacattttacagagattaaaattttcaggatctgtctattctaaagttttcaaataaaaagataaatttcctaagagattatatttagaagcaatgataatatatgaaaaaagcccaggcttatttcatattgtttagatgattttctgtctaattgttttgtgttttttgtcttccttattatagtaattcagactaatgacccacatttaaaatatgcaatagtggctgactgagtagctattgtgtattataactaagaaaaatactgatcagtagtttcctgttcagcaaaatcggaagaataaggaggtctttaaagttgtactttttcgtttgtttgtccttgcttgcatcttcctttgcatgtgcaatatacaaataagcctttaggtgaaatgtatttatccctgccttttgcaacggacttaccctaaaagtcatcatcaaaacactawgtcttttttttttctctttttctattgtagtgaattagatatatgtgcacattctatgtttatgtttaaatgatttatgttttctgtatcacaagttttcaaattaaagtatggagaattattgttagttgcctatgttgattttgcttytaaacattacccttgaattttaaacacataaaaatgcctcaaaaatcttgtcaattttgtatagawgttatttttcccattctgtgttttttttttttttttgactatcrctgttatattgtgttaatattctacaaaactctgagggtaccaacgtgcaatttttacattgtgtagtattatgaattatttcaggagacatagatgattgtgacacactggcacaaacccgcatgtatgaccatcggccttcaaaaaccctgtctccaatatatgagatggatgtaatagaagcatttgagcagaaagtggaatcagaaacacatgttacagatatggattttgaagatgaccaacattttgcraaacaagattggacactactaaagcaactgctctctgaacaggattcaaacttagatgttacaaattccgttcctgaagacttaagtttagcacagtatctaatcaatcagacactacttttagcacgagatagctcaaaacctcagggtataacacatattgacactttgaacagatggagtgaactaacatctccacttgattcctcagcgagcatcaccatggctagtttttcctctgaagattgttcgcctcaaggcgagtggacaattctggaactggaaactcagcattaagtgttaacattttggaaaaatttatgcyactcctttattttttgatgcctatattatatccaaatgataattgcattagccggatataaactttctttaatattgagtctttccaatttaatgaggtaaacatagtttatttattaatatatcacatatagaaaaatgtttttctaaagtttttgagcatgttttctctaattattagagaaattagaagacttataaggaaaccctagcttcagttttcctttcctagctgatgatttgttcacttaatcattattcaagaatttaaaatgtgaatgcagaagtagatcagtccctttactttttgctctgcatagggtaacatagtaatttaacaataaaaacttaccgtgcttgtgtccattcatgtagagttttctgtgactaacattcaaactcacatttaggtgattgaggctgatagctgagtgytggggaaaatcttagctttcccaacaattcaggcccaggaaattctgaagcaagtacatctcaaatttcaaccacatcattactaaaacaagagaaatggaatttcctgtctctctcttttggggatatatccacagaagggaatctgcccttgttcaaaagcatagacttcctttacaggtagtcactcattctccattttccattccatgttagggatatgttggaactgcacctgcaataagccagcactaaatataaacttgaaaatgagtatataaggcaattgagttacggagtttaaattgtgtgtatgtgtatgtatgtgcacacacacgtttgctttcttggtgtgtcattagacaccagttccttatttcctggatcagattgtctttcagtctgtaattttggtagtaagtcaaagataaaaacctttgctacaaaatgctacctggtagcgagtacttgggtacttttgatattgccaatgggattatgagatttcataaataagcctctctcaaagctttgtgactcataattctctgaaatatgtctgaagcaaggaaatagtttagaactccttttctaaattagtaaagtcttcaaaaaataatatgatctataactgtattgaataccaagtcatattaatgcacaattatttgttctaataacatagttatgttacggttagctgctaacctattataccataaatttgctatgcctttttttaaactagctctgtgaagaggggcactcgttcaagaaacggttactaactcattcattcaaagtcaagaaacaggctctggatttaggcacttgggtgtaaagaaaataagacttgattcctgctctaaaaatatataaataaataaatagtttagtttctagtaagaggacatgggggtataatgtaagaaaaagttcaaaatatagtattacaaaaactttgtaacttagagctggatgggaatttagagattatttcgttttctctcttcaaattccaaagaagggctctgatgcccagaggaattaagagcttgcccaagatcccacagctaatttgtgggctaggattcaatatctgtagcccacaataataccactttggtattatttctaccacacaacacactttatttttctcacaaacctgcgatcaaatacatttacaggtagtttgcagtataaagaagtattatatgatagagtcaaagacagcacaaattcccaagacactgttttctttttcttcaaatatgaaactgttaagtgttattttcaaaaaacttcctcagaagttcacaaatttataattgaaaatttcttttcccagctttgaggtcttaaaatcttcttaaactgctaaacattaaaatctactcagtttcacatcacatctgcaagtagataactaactaggaaggcattttgcttatgtaataaccacccagagaatttcaggacatattgtgttttcatagcatgctcttttgtgaaccacacatctaccagtctgtttgctgtgggactctttgtactagtgcctcatcattcaacaaacaaaaattgaaaaagaattgctgacattgatatagcacttacaacatgctagatgctatgctaagtgctttaagtacgcattaacacatttaattctatgagatatgtcttcttatctttattttacacgtaaggaatctaatgtagaatccttaacctggatgtgctaccattgtagaagaaaccaaaggagaaagtaacacactacactattgtttgtatgggagcccagaaggacagcttgtcaggaagaggttagagaaaacttcttagggcaagtaatagtctgtgactgcttcagaatttctgtggaggagttttattagctgcaatctagttgaaagttaggccaagggacttatcttgaagatgcacttgtatagcgagtactttgcttttacttagtatgttgcagataataaaaatacaaatctttttaaagatgctttttgtacatagtttacatgagattgcaaaactccatccatacgaaatatttttttaaattttgatttgggttgcttagggaggactaatgagatttatggaaagggtttaaagcccccattataccatgttttggtgaaaccaggtaacatctgatgctggcccaaggatgaataagaatttgcttggtgacagggcagtctagatatggcactacattaaggaatagtgaccagggtgggtactgagtataggtagaagaatagtaggagatagggctaaagagttgagctggtgggccggtcatgatggctcacgcctgtaatcccagcactttgggaggctgaggctggtggatcacaaggtcaggtgattgagaccaccctggctaacacagtgaaacccagtctctactaaaaatataaaaaattagctggatgtggtggcacgcacctgtagtcccagctatttgggaggctgaggcaggagaatcgcttgaacccgggaggcagaggttgctgtgagccgagattgcgccactgcactccagcctggcgacagtgagactccttctcaaaaacaaacaaaaaaaaaaacagttgagctggtgctgggttcccaaagttgttactataaatgcaatcttcaaagtgtttaagccttggatttggtgggtattatgtcttctttattatgcattcatttatttagtttaacacaatgtatttccatgttcttgggaaataaccacctacaactcacaatgagtaatgatcaaagttgttttttaagtagttaggtaacataaccagatgtgttttagaaagataaccggcagtaatgaagatggccaagtatggagaagtgccctaaacctgtcaggatgcaattatgatagttttgttgaccttagaaatagggaattgagaaggatttggtaatagagacgttaggtgggttgagactagaacttggtgaatgattacatggtgtcagaagatggaaaggaatttttaaattgttgtcagaggctggacacggtcactcacacctgtaatcccagcactttgggaggctgaggcagacrgattgctttgagcccacgagttcaagaccaacctgggcaacatgacgaaactgcatctttaaaaaaaaaattttttttttaactagctgggcatggtgacacgcgcctatagtcctagctactcaggaggctgaggcaggaggatcacttgagcccaggagttagagactgcagtgagctgtgattgtaccactgtactccaacctgggcaatagagcgagaccctrtctcaaataaataaattgctatcagaaataacattcgttccacacattgagggcctactatgttcccaaaactttgctagtgctgggaagaaaaagatagatgacatagtatccatccttgagcatctcaatctaataagggagattgttaaataaaaattgcaaaattgcaatgttaagtgttataataaagctgagtataaagtgtaatttggagtgcttggatgggctcctttgctctctaaggattagtaggaattcataaaaaggcacactcttggcagaaaaagttcaaaggcagtggggaattctgttctgtatggctagagagagaaggaaatggattggaagggcaggggatgaagttggacaggaaagtagaatccagagattaacaggatcaggtttgcattttagatgactggtagcaggatgtaggatggaatggagcattgtgacaaggcaaggggactaatgagtcgattgcaataataaaagcttgaatagggcagtggcagtggagacagaggagtggacgtgtttgagggatttaagaggtggaattgaaacccttggtgagtctttggatgtgggaaatgagagatgggaatcatcttaaaagacagttttctcactagggtgcctgggtggttgatgatgtcattaaccaaaaacaggagcaagtgtaggagtgaagatcagtttaatttgggacacactgagtttgagatgcctggggggacattcaggaggctgaggacaaaatgctgtggaatagtcagaaaaagaaaagcctgagacagagactgaaccggcacattcagaagtagaagtaggaggccaaggtgaggagagattaatgttttgtttgttttgttttgttgaagcagggtctcagtcacccaggctggagtgcagtggcgcaatcatcactgcagcctcaacctctcgggctcaggtgatcctcccacctcagcctcctgagtaactgggactacaggcatgccaggctaatttttgtattttttgtagagacagggttccgccatattgcccaggctggtctcaaattcgtgggctcaagtgatcctcctgcctcagcctctcaaagtggtgggataacaaaagttttttttttgctttttaaaaaattcaatgttagcaagagaatgataagtttgggagcttcatatgatgctttagaagtgtaaatttcctttctgataagcagctaagcaagctatatcaggaatgtagctttttggttgttttttgagatggtcttgcgttgttgcccaggctttgagtgcagtggcatgatcatggctcactgcagcctcaacctccctgactcaagcgatcctcccacctcagcctcccaggtagctgcgactacaggcacgcaccactccactcggctaattttttattttttatttttgtagagacagggtcttcctatgttgcccaggccagtctctgaactcctgggctcaagtgatccttctgccttggccacccaaagtgctgggattatgggcgtgagccaccatgccaggcttgtagctttatatctttagccctttctcctcttgggatctaccattaaggaacaaggcctgtttaccgccataccaccctgaatgcgtccaatctcatgtgatcttgaaagaaagaaggccagacatggtggctcacacctataatcccagcctcccaagtagctgggactacaaggcacctactgctgcacttagctttatcttttaactcatattttaaatgtcttctacaaggcacagaaaaataagtagttgtgttcatttttaagtaaatagtagtaaacagtttcaaatgctgtttgagatgttaattaaggcacacacttagactagtccatttgatttgaaaattaggattttatttgtgctttttgttaattactggcttttaaaagatcagtagtggggcagaaactagactagtgggttgaagggtgaataggaaataagtaatacttattctttcaaggagcttgactgaaaaggagacagtggtagtttgaagatattgctgtttttaagataaaaatgatttcagcactttaaaaataaaaagttggaaatgatcaatgaatcaaggatcatcaagaaagaggcaagaggaagtaagattaagcacaaagagtatcaactgataggtggcatttcaaggaacttcaggtgttgaatatctaaagcaccaaatgcgtgtggacagcagtgaagataaagctggaaatgcgccggcagaccaacacatgatgagccctgtaggtggtggacaaagactatgagcaagccatttaggcaaacatctgaagaatttaaaaatcaaaggcaaacaaataggactgtttcattaagatcacttgcattctaacaggttatgatgaatggaaagctgatggttcctggttggaaaaaagataattttcaatttggacatgtcacatttgagatgcagttgacacacccaagatacataatatattgtctttcaaaattcagaaacctaataaaccatgatcttaataaccgccactccatctcctgc

SEQ ID NO: 9981 - DNA, 16643 bp, Homo sapiens
  misc_feature (10252)..(10252): n is a, c, g, or t
ctggagttcagtggtgcaacctcagctcactgcaacctccgcctcccaggttcaagcaattctgtctctgcctcccgagtagctagaattacaggcacgcaccaccacgcccagctgatttttgtatttttatttatttatttatttattttttagtagagacgggatttcacgatgttggccaggctggtctcaaactcctgacctcaggtgatccacccacctcggccttggcctcccaaagtgctgggattacaggcgtgagccaccacacctggccaaccttgactatttattataggtaattctgtgcagatgtctgacttatgttggccatctccaggatggacctgaactttcacacgtatgtccctrtgactaaatccaggtgtcatttgcaaaaaacaactaatattattaagtagctaccagggctaggtatcactcaccatacatacacacatgcacacacacacatacacattcctacctcatccttacaacaatcttcattttacagatgaggaaacagaggcacagacaggtcgaataacttactcaaartttcacagctagtacattcgaacccaggcttaaggacccatctttgtccagaccctgtatgcaagtgtctgtgacactggatgccaagactcacactagagatgttgaatttaggtctgaacaatatccaattctgtgtgtgtgtktktgtgtgcatgtgtgtgtgtgttgtattcatgtcttaaccatccatattcatatacacatatgaacatctgtgctgtgattcttttttttttttttttttttttttgagatggagtttcactcttgtcacccaggctggagtgcaatggagcaacctccgctcactgcaatctccgcctcccgggttcaagcgattttcctgcctcagcctccagagtagctgggattacaggcacccgccaccatgcccagctaattttttgtatttttgttagagacagggtttccccatattggccaggctggtctcgaactcctgacctcaggtgatccacccgcctcggcctcccaaagtgctgggattacaggcatgagccaccgtgcccagcctgtgctgtgattcttgaagctgcaacccatgtgcatgcaagtgaatttcagcttccagtcctgtccatagctgtacctaagtgtggaagctggatgtgcatgtatgcatgtccatgaccttgtatagccacatctgggactcatactgcacactgaatttggctgacatgtccagactctggggccaaggctgggtcacacatactgagtggccacatgcgtttgacgtctgtgacaatttggtgaccgtgaatgactggtttcaagtgaccacctgtctgaacctgtatccagtgcccctgtctccacccccaaccacagaggacttcttgccctctggtctgttccccttsctctctctcccagagtcttatagcaaatggggtgggggctagagttctggagaaaacaggcagcggttgtaaataaacaacagggcaggcggagcatggtggctcacacctgtaatcccagcactttgggaggctgaggcgggcagagcatttgaagtcagaagtttgagactaccctggctaacatggtgagacctcgtctctactaaaaatacaaaaattagccaggtgtggtggcgggcacctcagctactcgggaggctgaggcaggaggmtcacttgaacccaggaggcggaagttgcagtgagctgagatcatgccactgcactccagcctgggcaaaagagtgagactccgtctcaaaaacaacaacaacaacaaaacaaaaaacagggcagggtgtcttgagaagttaggggaaaggcataggcatatagtagttagggcagggtgcaaggaaggtgtaggaggcaatgtaaacgtccctgtcctcaggcatcctctaccccttctcttagcagcccaggatggtgacaagttgctggaaggtgacgagtgtgcaccccactcccagccatggcaagtggctctctacgagcgtggacgctttaactgtggcgcttccctcatctccccacactgggtgctgtctgcggcmcactgccaaagccggtatgaaggcaggggctcarggtcctgagggagcctggttcggggggaagagctcctakatttgggggaagacggaggcagacgccasaactcctgggttctgaaagacgaggaggccggatgtcaagcccctgggttaggaaggagtgtgtgtttcaaagccttcgatctctgaaggaggaaggagaagactagttccagcttttgagcctcagttctagggatgtgagaatcctggattcggggacagaccaggagggggctgggagtagttggaggggatcgagttctaggagtgtgcctgacttcagactcgttggtccttgaggagcaggggctggaaccattggcttcagggtcttgggaaaaggtaatgggatgtcgagatttctaaagggtcgggagacctcgggttgcccactctttgatctttctgtcctctacttgcgggtaaccactggcccgcactccactggcgggaaaaccactcgcccgcacagcttcatgagagtgcgcctgggagagcacaacctgcgcaagcgcgatggcccagagcaactacggaccacgtctcgggtcattccacacccgcgctacgaagcgcgcagccaccgcaacgacatcatgttgctgcgcctagtccagcccgcacgcctgaacccccaggtgcgccccgcggtgctayccacgcgttgcccccaccygggggaggcctgtgtggtgtctggctggggcctggtgtcccacaacgagcctgggaccgctgggagcccccggtcacaaggtgcrtgaaaggatggagctggatgcgaggcctcaaggaatcctatgctccagggctcttgggcggaggggacaagggccggaatttatggatytgctccaagtccactgtcttccccagtgagtytcccagatacgttgcattgtgccaacatcagcattatctcggacacatcttgtgacaagagctacccagggcgcctgacaaacaccatggtgtgtgcaggcgcggagggcagaggcgcagaatcctgtgaggtcagagcctagaggggccatcaggcggaagaagagggatggggacaggtgtgggagtccggatggggttggattttctttgctttgggccagagaagatgctagggttaggcttggagatggagtaggaagagaagttagaataggggtgaggttggarttggggttataggtggggattgcgttgtttgaggtggataatgtgatagttagtttgagatggcatgggttggggttgagaatgggaatggtttggtttgattctgggtgggaaatacgtcagggttgaattgggatgaggtagattttgtttggaatgcagaagacatgaagattgagattggattttgagatgggcatgggtttgatttgattttgaatggtgaggatgtgggctgagttggatttaacttagtacagttgcactggagttgcatgggggtragattggatataggttgggtgagttgtattgagctgtgttgaattggggttggggttggggttgggttggctctgtttgggataaactgggctgtattgagttgagttgggttggggttccctgggatggggatggattgggtttggggtgagattgcaamtggtgattaggatgaggatgaatccaggaggtttcacycaacctgagaccccctcttttccccacagggtgactctgggggacccctggtctgtgggggcatcctgcagggcattgtgtcctggggtgacgtcccttgtgacaacaccaccaagcctggtgtctataccaaagtctgccactacttggagtggatcagggaaaccatgaagaggaactgactattctagcctatctcctgtgcccctgactgagcagaagcccccacagctggccagcagccccgcctgacatggaacagaacggagccatcccccaagaccctgtccaaggcccagatgttagccaaggacttgtcccacctgaggacaaagctggcgctcaaggtcacctgtttaatgccaagataacaaagcgctgatccaagttgctctgtaggaatttctgtgacttttttctggggtcaaagagaaaccccragacactgtacactgttccttttcacccaccaccccgatccctaggtgaggagaagcrgcttgaagcagggctccattcattcaacacacatgaccacccgtgtgatcttgaacaagaggcccaatctcacttcgcyttggtttccttatctgtaaaatgagaccatcttattgctgacttcmaagggctgttgtgaggattaaatgagatgattcgtctgaactgattaaaatcgtgtctggcactgagtaaataccctctatctctggatcccagttaaaggacctaacagacactagattacsaagaatggctttttctttaaggtttagttctgggccgggcatggtggctcacacctgtaatcccagcactttgggaggccaaggcgggcggctcacttgaggtcaggagtgcaagaccagcctggccaacatggtgaaaccccatctctactaaaaatactaaaaaaatttagccgggcgtggtggcacacgactgtaatcctagctacttgggagggtgatgtgggaggatcgcttgaacttakgaggcaggagttgcagtgagccgagatcgcgccactgcactccagcctggtgacagagcaagactccatctcagaaaaaaaaaaaaaaaaaaaaagatttasttstgggcttcctggtagccatggcaaaaaggcaaatactgtcctttycttagccaggtccctgatatacarcaraggctggaaytctgagctgctttgattttaccaaaaagccaagacaacctgttggaagcctatgggtttaccattgaggctgcaggaatctagttcctaattatcttcagagaccacaaaatgtgatgttcaaggtcgctgaatgttgaagtacatgaacctggctcgtgagacctaaatattgtactggtggtgggggggaagggtcattggaatctgtggttagcctgatcttgacctgggagggaaggttgtccagatctctgggactttggaggacaggacgttgagcacccmtaactgggagcaagaagtgggaggctcattgagaccccagcattgtttgggagggacaytggattttgtaatgctaaagaacttaccctgggagacccctgaaacttcacattcctggatctggaggcactaggaatgtggtgatgtgtaccccaaaattttattatgaaaggaacagtagctttggggacctaggtcctgggtctgggagtgcaagaaccagggcattctgaagkccaaggcttatatttcagggggaactggcagctgagatgctagtatcttggctccgagtggtgcagggaatcagagccctaactgctggtgtttgagggcaccaggtctgggggtgcagggccttaattgagactgaggtatatggggctttgtaccaggggtcactgattcctccgtcttcctgtttctgcttcccctcagtccccccttgcctcactggctgctccccagagcaaagccccagagccacaggccctgccccacctggcttcaaccccaggaatgcgtccagcgtgatccagggcctgcagaacaggtgctggttctccctccccgtctacagctctggggatcggrgssgggggggcaattgtccagcccccaggcaacaggggaagggccttggccaacatctgggtgccagcagggcaggggtggggctctgaggggataagggcttttaaaagsctccccagggaggttccccagttcctccacctgctggcccctggacacctctgtcaccatgtggttcctggttctgtgcctcgccctgtccctgggggggactggtgagacagtggggggatgtgggagggggaacgggccctgattctcttgctggcctcacatccccccccgataagaccttcccctccaacaccccaccctcatccctctggcycacagtctatcctagtccggggtgccccggctcttatctatcttgcgcggscccaccctaaacttccacccccgctcctccatgttgtcatagtgytcactcccacaccagattcctgctcctcccaggaagcctcagtactttctcctcttccctagccaacgccctgtcccaccgctttaccaaaggggcagattctgggccatctctgtctctctctggaggaccccaaccctcccatgggcttcccccaccccacaggactctgatcatcccctcctgycccctagttccctgcggccacctatttggctcctgagtctacaaatcccaccacactccagtgactttttccatccagctgtccgctctcaactgtgtcctccagaccctgacatctggtctccccagtccttccagggtcccccaaatttcaccagaaaaccctgcttcccaaactggcatgtgggatcccccayctggtatgkgggggggtctgcaaatgtcccttcccacccagcacccccagctctcccaggaaaaacaccamaccctcccaccacatgctcctttccttggggaagttccatcccgccccaggccccagcccttctctgcctgaattgttcctacacagctctggttttctggaaccccacsccaaggatcctgaatgccttctcagccagcgcttctgccctggcctcccccaagtcagtatgtgattctacaacctcacrtcaagtgggtcctgcattgcattcccacagctgcttggcgcctgttctcaccacttctccaatcctcttcctaggattgcctccaagaggaccccatatccttccagtaccctcagaccatgaaccccatccccatgagaaacgaagatcccatccttcaccctgtccgagaaggactgccactcacgcctccctcctcctgagccccgtcccagtcctgaccgcaactgtgttctcagggccccaacctcccctcakattgccattcctggttcacaggaaggaccccaaaacctctcrgaagcccacctctagccttaaccatagccctttcttttaccctttaaccaggaagccctgaaatctaactgtcccagccaagctggccccttccaaccccaatgtagggaccccaagtcacccccaaactcttcagtcsagatgctcttctttacctctcagacctggtyccctaaagctgcatcctttcctgaacctcaaaagcccaacccaggtcctgtttccctagcctaggagcccsttagccctccagattcttcctcagtgagcctctgatcctgtcccacccttggcgccttgatscctggtttccagaatccytttccactcccctaacccaccacctcccatcccccagccccagaccccaaatgacctgacgcccagatgcagtgtctgctccagacactgtctcctgtctcctaccctgatccctggaggctgctctactgtcagagcacaaaatctccccaccaggtccagccaccactccaaaagcccagggaacagtccagagtcccaccccttcccaacaccccttgcccatgtccccaacctccagccctggtcctctacccgcaatgtcccttcagacccacagcccagctccctctcctagccttgtccctggcctctcctgccaaccctgcccttcctgacccagcaccgcctctgcaggtgctgcgcccccgattcagtcccggattgtgggaggctgggagtgtgagcagcattcccagccctggcaggcggctctgtaccatttcagcactttccagtgtgggggcatcctggtgcaccgccagtgggtgctcacagctgctcattgcatcagcgagtgagtaggggcctggggtctgggaggagggcatctatgctgccacaggattgacaggccagtggcattccccttggataacctcaggcaagactggggggctgagscagagaggaaggctctggcgcaggtcgcctggcagggcagagctgggctggacacccctctccaaggctgcctgggtctcttgggatctggttctgcttgtgtctctgtgtgactgtgttctggtctctgtcttcctctctctcctctgtctccttgtctctgcatctcccctgtctctgtctgtctctgagtctctctgcggcatctctgtcactgtgtctcaccctccatctctctacccatctctctctctctgggtctctacctcaccgctccctcatccctactaaacacacacccagatggacctaagggaggccccagagtaaaggaagggctttatccccaacttgtgtgcctgggagggggygcctctccctctgtccagctccccgccccacaggatatccctccactctggagagacacagggaagggctggtttcagcgggagctgggtggggcaactgagggaggaggaaggaggaggcggggcgagaaacgcgcgggagggtgctgggaagggaagggggcctcgaccttggacttcaggccaggccacctgcccctggggagcccgcaccacagccccagctgcagctgagccgctctcaggcctcccctcctccctacctgcccccaccctccccacctgcccccaccctcccccagggcctccctcccttttctctcccacactcggtcactcctgcttcctctctgcctctgtttctagttctcactctgacgtcccgcgtcctttttcatttgtctgcttctcgctcccttccrtgttctgttccctcttcctccctcttccctgggcctgtttctcgctgtccctgtcttttatccttctcatctgcctcttttttgctcaccctgtttctcactgccctcccctccgcctttytcacccctctgtccttttgagctcttttttgctstgtctcttcatttgccttttgcactctcaaamtctttcatcttcccattcgctgtctgtatttctccataactatatctttcttcctctgtctccgcccacccacatttttctctttccctttctctctttggggaccctcccccatgctcccctgccccatccccttttccccttcccrtcttctcatccctccattcccatctttccccagcaattaccagctctggctgggtcrccacaacttgtttgacgacgaaaacacagcccagtttgttcatgtcagtgagagcttcccacaccctggcttcaacatgagcctcctggagaaccacacccgccaagcagacgaggactacagccacgacctcatgctgctccgcctgacagagcctgctgataccatcacagaygctgtgaaggtcgtggagttgcccaccsaggaacccgaagtggggagcacctgtttggcttccggctggggcagcatcgaaccagagaattgtatgtgggggcagactgtgtagcccaaggcrgggatggggactcctgygtccaagggagaaagggccagggaagcaggtgaggtcgggctgcagccctttttctcccgggttcgtagtctcatttccagatgatctccagtgtgtggacctcaaaatcctgcctaatgatgagtgcraaaaagcccaygtccagaaggwgacagacttcatgctgtgtgtcggacacctggaaggtggcaaagacacctgtgtggtgaggcagccctgcccccagggtctggaagggctgagggaggggactcagcctstgaactggyttctgagagctaaccaggcatctgcttcactgcttcccagctagctgtagccactcgccccatcagtgccccagctccccctccttcccccgcccatccagggacaactgcatctcaccccccacaccagagttcaccgttcctcgtggtaatgtgttgttaccgtcgagtcagagagtagtcctggagaggtggcctctgcgatgtgcccrcaggggcagcgtcctgcagatggtcctgcccctcctccccctracctgtctgcaggcactgtccwcctggaccctgccccatgtgcngkmgctggaccctgaggtcccttcccccttggccaggactggagaccctgtcccctctgtgggaatccctgcccaccttcctctgggagtgggcactggaggccctgtctgcgagctggggctccccaggcagaacttgggccccgtagacctttctcactctcccctcccaccttgtgctcccagggtgattcagggggcccgctgatgtgtgatggtgtgctccaaggtgtcacatcatggggctacgtcccttgtggcacccccaataagccttctgtcgccgtcagagtgctgtcttatgtgaagtggatcgaggacaccatagcggagaactcctgaacgcccagccctgtcccctacccccagtaaaatcaaatgtgcatccaatgtgtgtcacgttctgccatcacctatctttccagatgtggtgcacctggacccactcggctgaggctggggccaccccagctgtgtcartctcatgcctggaagtctgaggtcaccagcaggtgggraaargaaggggctgtgacaggtgcagacaaacaggcagggaaaggctcagatcccaaagggcragtcagggacgccagaacagttcactcacactaggatggaccctgccctggtggggaggtggggggcaatggaaggtctgaggctgagaggttttattgtggcggggaagccagaaaaggtacagagggatgttattgcaagccatgccttcccagggaggggcccgttctgcagaagggtggagttgcaccaaatgctgggcggtgctgtgtccacctggggacaagggtggacatcggagctgaggccggaactccgggacaagggtggacatcggagcaccctggctgagcgggtggagagtggcttcagggtgtggcctgcgaaggctgggcaccaggggcagggccacacaaactagccacactgccgagctcagcgggacgctggacaagtgtctgcagaacgggaggggatgctgggcctctggggtggaggyactgtgaggacccagtgggcagggacaaagccgcaaagggcgggccctagagcgagggctggagtttgccaccggtcccctcggagggcgtggcctgayatcagggggtggggcctcaggggaggtcgaatatccagggcgtggccacgctgaaggggttggccgggcatctggccatggctaccggtcggtgtcctgaagacctcgggtgctattccttggaggtgcttgggtctcatcctcgwgggtgtatgaaatgggaaggcccggggtgcgctcggagtcagygtctgagttccgctgtttggatgtccgcctcgctgcgccctgctgcacggcccacccgcggtagctcagccgccgcgcattcaagggctgccctctgcttcacatgcccactgggcttaggtaggacacggctcctgggagatggctaggtgggccgctgtactccgagtcccaccctaggccccacccgcttcccgaggccccgccctcctcccgaggccccgccctcaccggagtgcagcatcaagtcgctggcgtcccagcacargtaggaggtcaccaggtaggacaccaccggacttgggtgcaccgccttgccgttaactgaaaagagcgtcaggctgaagagaaatcaggagccctgcaatggggtggggccagagacagaaggctggacagtgagccctatgacccccagtaagaaaagagggactgagacatyctctcccaccctccgtgacaagcagacacacacacacacacacacacacacacacacacacgccctcacaacagacagaaagataccyggagagaggggacaaaaaaagaaagggaaacagagagtgggggagagagacatcccacagatagagtagaactgagtcagagctccccagagacatgctaagacagaggcccygaggggagcagcacggaagtctagatacacctccagaaagccagagagcagggctggggttagggagggcccccrccccccaagccaacacctaccaatgccgaggcagaggaaactgaagacaaagtcggccatgttcaggcggaggaccactggccaggaggagagggccatgggcrggaggaggactcagcacagggccacggccagtaacatgaagcccttgctcatatggatgagaactggggagagggggacaggggccccagagtcamccccagatacccctcttggtcaccctycaaagtcatctctgctgatacccacaagcagcccaacagacaaccccaaagtctggcacatcctcaaaatcacccctactcacctccccaaagtcacctcctagaaaccccaaagaaactccaatctcactcacaaggtcacccccagggacccctaaagtcatcccccagtcacacccttagagttgtcccaaatcacccctacttaacctaaaactcaattctcagacactctcataatcccacacaccccccaaggtcaccccacagaggaccccccaaaggtcatcccactcatcctcaaggttaccccacagaatcacctcaatcatttctttctttcttcttctttttttttttttttttttaagatggagtctygctctgttgcccaggctggagtgcagtggtgtgatctcggctcactccaacctctgcctttgggctcaagcaattctcctgcctcagmctcccgattagctgatactacacgcagctgctgccacgccagcctaatttttgtatttttagtagagacatggtttcaccatgttggccaggctggtctcaaactcctgacctcaggtgatcggcttcccaaagtgctgggattacaagcgtsagccactgagcccagcctcgatcatttctagaaccacccccacagacacccctggtcaccctacttgaactcctaaaaggtgtctcataacaactcatgttagtatcctcagtttcactcccagacaccctcaacagcaccctcaaagttatccaagacaccacggtcaccccagtcctctccaaagtcaccctacttctgctctagtctctgctagtcaccccccaaggtcccctagtggccccattcacatgccgagaatctcctcagacatcctaatgtcatctcttgttcacacctgagagcccccacaaaacacatacagatttgcacacaagaaaaactttcaagtcaaatactctaaaaccaatgtgcccaaaagcttagttccagtttacagtggatatttatccaacttagacttccagcagaagagaggtwtacctgtttccgagatgctacatctcctccttttagccctttttctactttgtctacttttcaacagtgcaaaattgttttagccaaataggccaagacctcatctgctttgtttctggcaaactgcacatctctaatacccaacaagaaagataaaggatcatcatatatacagaasagcaacagcactctgggaagtgggggaaatatcagaccccttggttttttgtttttgttttgttttgttcrtagagatggggtctcactgttacccaggctggtctcagattactgagctcaagcaatcctccctccttggcctctcaaagtgctgggattacacgtgtgagccaccatgcccagccagttcccttagttctttctgctcattgaagagtcaagaagcagaggtcagggagaaggcaccaagccagaaaccaagaccttgaatggtgaatttggtctgcccagaacagcagcctgacatctcttggggacaccctccacccaactcacataaccctggatgagggattctcctggcatatgctggcctctgggccacagaggtaatcatgtgattctggctgagccaatcacagtacccyagctgcagaccctgcaattggcccaaagatggacacatgaccaaagcccaaccaatcaagctctgccccaagactttttattaggaagctgtcaaggaaragcagtctctcctcaaggattacaagcctgaagctgcctaagccttggacctagcytcatggggagagtaaaactaagaaggaaaacagacaagcgaaagagcattgagctgacactgaagtccctggctctcgtcatcccagagagcagcccactctgtgatttggtcagaatgagtggatatttgcagcttacctccccaccatgcatttcacctcctgcccattccccattctcagccccagtcwtaagccaatcagccaactgtactccactggccatataattggctcggggtgctcatgtgccccaagccacacaggattcttgcaagaactgttgataacttttttctaccggactcrgcagttattaccaactctgccaagttgctaacaactctrccagttttttgtctgtctgctctcagatccatttcccrccctgycytgttctgcactgcaaggaccacatttcccagcctcctttgctcaccatcttatcactgtgtttgactaatgggaggcactggcagaagactggttctgggaggagagggcaagccagggtatttatyagcctctctatctctgcatgtggtgggtcttcmgtagtagttgtatctattctctgattctagccacttctgagcaatccaaccatgaacctatgcsttccagagggctgcagtttctggactgtagtaataccacctcctccctttgtccttctggccaagtagcagyatcctgtagttcctaactcctggtttgcctcactatttcctattggcttctcagctcctctgttactcacgaacaaattccctgtatttacttccttctgaagaatctggaatgatttattttccttactggattctgacttgccactacacagagccttgagaatgaagccaatcccatagccaaaaaacagtaatatctgatactatcacttgggcccctggatccacccatgcctgaaggcattcctaccattaccatttttcactcaggtgatcccataaaggatcccctagctagttcaagttagttcactcaagctaatacaactagttcactcaagctagttcaagttagagtttgtgtcacttgtggctgggcacgatggctcacacctgtaatcccagcactttgggaggccgaggcaggtggatcacctgaggtcaggagtttgagaccagcctggccaacatggtgaaactccgtctctactaaaaagayaaaagttagccgggcatggcagcgggcgcctgtaatcccagctactccggaggctgaggcaggagaatcrctcraacccggggggtgaaggttgcagtgaaccragatcacgccactgcactccagcctgggtgaaagagtgaaactccatctcaaatttaaaaaagtaaaaaataaaaaaaawttaaaaaaaaagagtttgtgtcacttgtgacccaaaaactcctgactaattcaagtcccttccttaggacagcagggagcacagaattcaatgttccctgcataccaactccaaaatcacaatcaaaacctaaaaataagtaatgagaatttaaaaaaacagaactgaatgytcatcaaaaatctggagggagaacctcccgaagccaagaagcaattaataaagtcacagagacaaaggtgaagaaattaaactacctaaaaattctaaggctgggcacagtggctcatgcctgtaatcccagctctttgggaggctggggtgggcagattgcttgagcttacaagttcgagaccagcctgggaaacatggcaaaactctacctctaccaaaaaatacaaaattatagctaggaatagtagcrctcccctgtagtcccaactacgtgggaggcagaggtgagaggatggcttgaacctgggaggcggaggttgcagtgagccgagatctcatgccactgcactccagcctgggtgatagagccagactttgtctcagaaaaaaaaaaaaaaattctagatttctataccttaaaaaataataataagggccaggcgcagtggcttatgcctgtaatcccagaactttgggaggctgaggcaggtggatcacctgaggttaagagttcgagacccgcctgaccaacatggtgaaaccccatctgtgctaaaattacaaaaaaattagccaggcayggtggtgccaattacctacaattcccgggtcagtatccaagaccctccaccagccaggaacagtcacggggtcrgtatccaacagcctccaccagccagcagcaatcgcctggtcagtatccaagaccccttgccaattattcacaatcaccaggtcagtatccaagaccctacaccagc

SEQ ID NO: 9982 - DNA, 95588 bp, Homo sapiens
caccctccgcaggtcccacggtcgcggcggcgatgactgtggaggtaacgccggggacgtcctgggtcagcctgcaccgtctccctcgaccacagcccgatgaggccgcgggctccgggccggctgctaagagagttaatcattacttcgccagcgacactcagcctccctccgactctctcgcccggcctaggggaggaggggaggggacagctggccaggtggggacttcggcttcgcacaaaccagcctcttcaggcctcccagagacaggtggtggcttctcagttccctcggcaactctctaaggtcctctttcttcccctcctgtctctccctccttcgagcctcctcccagccaggcctctccccaccgtctcctgtccgctctggctttgactgattaactgcaggtcctgggagaaccaactttctttgtttggaaccggaccggacgggatttccttccctaggtctccgccaatgggccagctcctcccgacggttttggcggactggctgaagaggaccgcgcctgaggccacaattaacccggctgttggtggtggtggttggggggtgggcagtgaggaatttaaccgatcctctagcagctgcgctggtgcagttgggaggggggtgcaggaagtgggaatggaggagtggcaggaggtatagacagagggaagaacgataaacctggacaggtgtggcatagccaatagaaggggaaacaaaataaaacaggaaggcggcgcggggaggaatccccagtaacctttataggattgaagttgggtggaaaacgccacctcctgccctaccttagcactcagatccctcctttacctctttgtgaaagggtaagagttcagaaagctggccatttactccataatctactagagaaatgtytgggtttgcaaaatgcctattgattagctccatggagtagacaagacaggcgtaattatccccattttacaggtgagaaaactgagtctcaaagaagcaaagggactgtgtatgtagtggctgtcactttttcctgtaggctgtggggtgagtggcccctttagctgtgcagaggtccatgggtatctagggaggcggtacaggctgtgtccaggtctgagccagaagtaccagggcctcacggggctcctagcccttttagcttgttctctgttggacaggaccttcactcttactctctagacctgctggctgggtttctcccagcttcgctattttttcagttccctagtagagtggcccatgggcggkagccacctggctggcccgtgccactaagaggcagctttggtggccaagtggcttgcattgttgttgctcctcaaagggcctgtgaagggctgggcaggtcgcaaagacctcttgtgaggggaagctagattaaagggggagggatcctggaggataaaggcccagcacgtgcgcctggactccacaggaccaacagaccgagcgggcggggccagctgggagtcaggccccccgggcttcacgcagggagcccaaatattgggaacaaaagcaggaaaagaagagtgagagcaggagggagggagggagcgaggaagcagaaattagggggtcttagatgaaaaaaaaaagaaagtagctttagggggaatgtgctgtggagtgtgaaattgcagcccatggtgctccatattgtaccagaagctcttccaaaaaaaaaaaaaaaaaccatcctccaacgtgaccagagggccaggcagggggaagggcggggagagaatggggaggaggagggggaaaggccgggcaggagccggtcaggcctttctgcggaaggggctggggtgtaagtttcggctccctgggatctgacagccgagggtatgcgccctggggtgcgccgggacccagagggcgagtgagcctcggttggtcggctctggagttcggttgtcagaagaacttttatttttctttttggtggtgacttctaaaagtgggaataatccagaaatgaagctcagctgcggagctgcagctctgttctccctctctcccctscctttctgcttctcttcccttcggactacttttctccccttggttctaaayagctttttcccctctgaactttaatgcatttaatttggtccgcgctgtggggagcatttcctggggagatgcatttaatttcggaatttctaatcccctccctcagaccccggtcctagctcccctagccgctccccgggaagtggaaggaggaaggcaggtcccggccacgggggaggggcgcggctgggatgctcccgcggccccctccgtctcaccaaggctcagccgccttcccaagctactggaggccgggcgcctgggccccgggtcagggccctgcaggaggaggagaggcaaccacgcttctgccttttctcgcctgggcagaaaacgctgggccagggaactggaaaccggaaaacaggagaaagggtttctggaaggcagcgggagcgggtggcagcggggcagcgggcagtggactaggtctacaccggcacttcacttttgcacaacatgcccagaaacgcatttgagagccctggagtcgcgcttggcttggcttggggcgccggtgcgtgggtacactcgaggtgcggggtgcctatccgccaccccgacacctacacccagrcagagcaggcgcggcccagccagamaaccaggccggcagtagctcggcctggagggcggaggcaaggttgggggccgccaggcgcctgggcaagcctggcagggaagggagccgagaaggcaaaggagccgagatccacaaggaagatttattgggcagatcagatgcacagaggcggctaatgaagcaaatcccgagatgggtatcagagcaactccccaaaagtttatttgcctttaaatttccgcagggaggcgggctccttgtttgaagtgtaaatgcccctaggttggggggtggaagggccgctttgaaaacaccagagagaaaaggttcatttagaggcggacgggaaaagcaaccaaccctgacaggtcggagcccgggtagtgtttggggttgggttgttttctttctttctctttcttttcccctttcctcttctttcttccytttttttttttttttttttttttttgctttcttgcttccccccacccctctactagactstatagaagaaagagaacagaaaagggggagtcagaggagcggccagtgactggatgaaggccagccctycatcctggagccccaggagaaggcagagctttggagaaaaggggttcctaatctccagggagcattactctttgactctctagacccaggaatgggctggagctaatggggaagcggccaggarccrgcctggcggaagagtgagtgtccagctagtgcagtgctggggagacgatcccaggagcaggggggactctcaggggctacctgggaatgggactatcagaagggtctttactcctcagaaggtgcatgtgaaggacaggtgtgtgaggacaacttccagcacacttggcgcattaagtccccttctctacaaaatggaaaatccttctcgcccaacatgtgaaaatgcttgttgtgggcacccacatttcatggtacttgtaacatagggacatgtctagctggttctagaaaaatctgtgtctgtgtggaaggggggggtttactcacagctttcttccttcaatagttcacacaccccgagacaaattcctggatgaccaacttggagagacctggggcaaaggttactttagttctgagctcctctaaataaggaccctttctcaacgttcctttcaccccagttctgggttaattacttcccagaggggaaagccaaggctgtgctagctaataccacctgagatcccttgcactctggcctgggagctgttacttttcggctgcccgaactgttttccttcttcggtccctacacgaagttagtgcgtgttcgtggggttgtgaggccaaagcaaacccgggagcgccatctgcaggcctcaagaggaagagactgaccttagaggctaggccctgcgtcttcaacctctagcccaagggaaccaacctgcctagccacccaagggaagtgggataggggctgggaggggcaggcggtgaggagtgttttcctcccagactttaccccgcaggtggattaagcttattgggctctggaggatacaggagggagggcaaatgccaggatcccagcggacccaggccccacaggagtgagaggctcagaacctcgtcccgctgagcctggcctgagctcctcctgaggaataagggcatcccaaaaacccgggtacaagacgcccagtagtagtagttaggctgagtcaggcaggtgcatctctccccatggtatctgccgcccaggctccggccagagggaggggagcgcgagtccgcsgcgcttccgcggggcgcccggagctgcagacgggggctggaggaatctcggattcgggctgcaagagcgctgcgcaagmttcgccgagccgccctttcgcagacccagggaagcggggggagggagcgaaggagggagagagagttaaaacatcagctgaagtgccaagatgatttatgagacgagggaaaatatttcatgaagatctcccggatattctgtacttaaccagttaggagacaaaggkcttcttctgcctggtgcgtgcgagcggaccccagcgagcaagggagctagtgccagagagagctgcggaggctccggcaggagtggggacgtccccgtggttgcgcctcctgcgctcgccccggatccaccgagctagcagcgggcggcgctcagccgcgtccgcagcctcctcttctccccagccggggagagccagcctcgtctcccacatcctctgccgccagcgacctgcagctccgcactgtttccctcccctgtacccccttcccagtcacccgagggttcagaaaccaagtcccccggctctcccgccatccgctgggtcccaccraggcaggtgggtactcgccggaggtcttcagctcgattctgaaccaagcgttctggactgcccagacccggtgggcaaggggactggggaggccctgcgcacagtcgcgtggaacgggaggggacaagacaaactgctggacacttttccgtggaatgagaagtggggggtgcgtgggtgggaaggtacctscggagggaaaggccaaagggaaggaccagaaagagaggaaggaagagccgggaaggaacggaagggaactcagagccgagggtggtggggttggggctagggatgcgcactgggcccggggccgcgcggcccaggcgggcactggccagtggatggcagggctgggcgagttagaactgagagcccggcttcacagcgcagcgcgctccgaggccctctgtcgttacctgaatattcattagactgaccgctctttatccttatctarcgtttatcttatcggcgagtttcgtttctcagtgtagttttaatcccgggctcccattccccctcccccggtccgctcccctccctccctcttccttcgccggctgctccctccctccctccctcccatttctccctcccctgccctcccctwgccggcaccggagtgacaggctcggggccctcctcgccgaagctcggggctccagcgctggcgaatcacagagtggtggaatctattgcctttgtctgacaagtcatccatctcccggcgcggggagggggaggaggtctggagggggctttgcagcttttagagagacacacaccgggagccgaggctccagtctccggccgagtcttctagcagccgcaacccacctggggccagcccagagctgccagcgccgctcggctccctccctccctcccggcccttcggccgcggcggcgtgcgcctgccttttccgggggcgggggcctggcccgcgcgctcccctcccgcaggcgccacctcggacatccccgggattgctacttctctgccaacttcgccaactcgccagcacttggagaggcccggctcccctcccggcgccctctgaccgcccccgccccgcgcgctctccgaccaccgcctctcggatgamcaggttccaggggagctgagcgagtcgcctcccccgcccagcttcagccctggctgcagctgcagcgcgagccatgcgcccccagtgcaccccggcccggcccaccgccccggggccattctgctgaccgcccagccccgagccccgacagtggcaagttgcggctactgcrgttgcaagctccggccaacccggaggagccccagcggggagcgcagtgctgcgccccccgcccccgcgcgccccgcagcagccgggcgttcactcatcctccctccccyaccgtccctcccttttctcctcaagtcctgaagttgagtttgagaggcgacacggcggcggcggccgcgctgctcccgctcctctgcctccccatggatatgcactgcaaagcagaccccttctccgcgatgcaccgtgagtaccsgcgcccggctcctgtcccggctcggggctctcmgtcccaaccctgtccagtcccagcgtggccccggcccctcgcgctcaggtcccatcttggaggcctccctggcttctggtccctcttttcgttctttctctccctcgcccggtgtttctaatgcctccagtttctctcctgccttctgtcacccattcttacctctctgtctgcctgccttcctaccttccctgatccctatcacctgcctttgctctttctatccgctccttcttaggtcatgggatccacggcctcggagccctggttccagccaccctctccctagtcagcctcttgccctgggctggggggcaaattagcaggcagttttcagggtgttgttttgttgttttctctgtcttttctctctttctctcttcctctgtttgcctccctctcctgtctccccacatctttatctttctcaaacttaagagtcgtggggtccaggagactccaagagtattcagcctcagtgtcaggacaattgggcagaagagtgtgggggtggggtgcccccttctgaccctcatctctcagcatctccaggcccttccagcccagcataggcttcttgtgggttggtttgaaatattttcttcctcttcctttctttcccaccccccttcccttgccttcccttcccttcacattgggaatcccaggttgtcaagacacgatggtcatctttccctgcctctgcctgggggatgctctaaaaacaaagaggggctccgagaagaaatcgaagtcagggagagagccagcagcgcagccttccaggtgggcccccggcagagtgcagctctgctctcagctctggaggctccttgcctagactgccgactccccattgaggatcacgcagccagcaacctggccagggggtcagcaaagagcaaaaaatgagggggaaagaacaaaaggaaagcaaatgccaaagctgaggagaaaggaaaagagaaatccaaacacgggaaaggaaattaaagaaagaaagttgacatgatgttacagaagaaaagggagaagggagaaaaaaatagagaaaagagggaattattttaataaaatttgaatttatgccatgtctttagcttgaaaaactattctgagattttttttgcaggcttttttttttwaaagctaaaattctaaatagaaaactcctccctatctgcagattaataattaaggataatttgtaacttttcacaaggaaactttagaccyggcttggacctgtgtttaggacaagagagccgaggagggagagctgtgtttttcgctaatcatatatttagcgttgcgggggttggggggggcgtttaaaaatacttctgggataaaatatattttyctaagtaatttccaagcgcaggaaagccgcgccgagggcatcaggcctccgcgggtctcggcgagcgggccggaaagcctcggtccttttcgggaggagtggaaccgggtccacacgccgttttckcccagccagcctgcctcgcggcccgctgccacagctctcgttctccttttttgcggattccgccgggggtccgccgagtcctggctgcccgcgggcagccactttgaaacccaraggtttctgcacggccaagcagaggtcggagggagagagccgcagcgcgggcccgcgggccggtggactggtgggtgagacaccgcagcccgagtcggtgctggcggccgtggcgcattccaggcccgactcagcgccgactcgctgcagtcccccagccctggactcccgccgtgtccccttcccatccccaccccttagactggggctgargggccgggccctgagcccggggaggctgaattattcatctttaatctgcccgcagctgccgccttttcataccggtaacgcgagttctcccggggcytaaattattgatggtcggggtttggagggaggggagggtgagaagtggggctagagatagggagattaacggggtgggcaagggggtaaaagaagrggcttcagtctctcccagcaacscgatcagaggtctttccccagggtttcaccgagcttgctctaggtaccccccgagaaagggaggggagagaaatgaggggggcacagatgtccccgctttctccgaaactcgcgtgaggctagcggggcaggggctgcagcttgccagtccgggccgacccgactcggccgctagaagtctctgcgcttggattgctcagtacctgcggctacgggttgatcgctctgggtgcaggatttctagactgctgtaggccagggagaatggggcacaggaagcaccctcaggcctggcacccagtggccgcctcggttccgagatcgggagcccgcgctggagccgggttggaaaccccgtgcccttctcttggccgaaagagcaaaagcccgagccgctcggtttcctgggggggctgccgaggtctgaggggtcaaagggackcgagtcgggtttgggtcggctacacagggcgccccgagagttattaactcgccagcgaggcctatgccgtgccacctgggcgagacggtgggccccaaccaggctctgcgaggcgcggcaggcaggcgagcccaagcagccggcattctctgcctgctgcctggagccgctctgcctccctgtctctgagcgcagcagaccccgggcccctgcctcatccgccttccttgctctacttcagatactaaggaggtgaaagagagatacggtccccctacagataaataacattagaaaaacttcccatcaaaaacaaacaacacaggaaagaggtagaaaaattccgattacaatttaatactttttaaagaagaggcagagagcaaaggggggtgtgtgtgtcaggcacttatcccctgtctgtgctaggagctcggataaacagtcagccgagcctcgacgcccccaaatcgtccgcctccaagccccgcacgcgcggacagctcccgggttgcctgcggcgcaggcgggatgctgcttcgcactagtccagtcctctgccaggcccttcctctcctcgctttcttacgccctttccgctggcatgaattcccctttggcattttctcccctctcccctcttttctgtcatctggtttctctccagtcccccctttgctttctaccttgcgtcgcaaggcctgagtcgccctctcgcccagcccccagtcttcagcccagcgtcygtgcttccagtccccactcctccgcgtggtcgtggaggtccaccacctttcttctcaagctcgggaacatgcccttccgccctgcctgcttccttcgcccgtcccgggccgcggaccctgactaatggccgstccctgctgtgtgtggggtgttgtgtttttttcttgtctctccccagcagggcacgggggtgtgaaccagctcgggggggtgtttgtgaacggccggcccctacccgacgtggtgaggcagcgcatcgtggagctggcccaccagggtgtgcggccctgtgacatctcccggcagctgcgggtcagccacggctgtgtcagcaaaatcctgggcaggtgagggcttcgcagctgtcccgggagacgccttgcctacttccccggccagccctgggtctccagctggaggacgtggctaaaagtccagcgtgccaagccagagagggagatccccaaaggggtctggagaggtgctccttttggagagagtgttcagatggtggctgaagacccaggagcgagggtggcgcagtgtcacccagtgcttgccctgcccctggtccctggtgagaaggcagcccgtttctggcttcagaaagggaaggatgactttcctaatggagttaaggcagatayggggtgggagacattaraggaatggggggggagtgaaaatgggtccccgagaggagaagcagcagcatttgggaggcagaaggagggtcctggttcccacagatgctctgtgcscagtaggaaagggctcgaggtggtgcctcaaccctggcctcccagagaccttgcagcgctgttcgttttgctcttcccaagtgaaaggctgggctttcactcccacgggtgcctatttgggctggtgcgaacccagcccctggtgtggccgtctccctggagggatggtaccccttgtcctcctactccgcggcgctcctcctagccargcaccctcaggaagtcagctcagccacactgggccttttccctccactccgctgcctcggccgggcaggagagtggctcagcagctctggaacctgcagcccccctgccccgccacagtccgcttctggctgaccccgccggctttcccggcgcaggtactacgagaccrgcagcatcaagccgggtgtgatcggtggctccaagcccaaagtggcgacgcccaaagtggtggacaagattgctgaatacaaacgacagaacccgactatgttcgcctgggagattcgagaccggctcctggccgagggcatctgtgacaatgacacagtgcccagcgtctcttccatcaacaggtgagcaagccacccgggttttcagggctggactccagctcctggctcctgcctgcagrggtgtcccacgcccagtctctgctctttgtccagcctctgccctttctccctgcttccagccccaaatccttctgtcagagaaagggaacctgtgaggcagagagttagacagacagacagggctgtctgcagttcagggctgggtattccctgccaggcttctcccgccggcgtcctggaaatgaatccaagtgtttgtggtaattaagactccaagattacgagcatccagccttgggatcttgagacaatcacagcctgcagccggagcctttaaaatgaccagtgtctattcatccctccaaacagactggcctttmtaaaggctgctccttccccaggggccgccgcttgtcctggctccctcaccctccctgccaactcccacaaagctcacctcccaggagtctggtcttgctagccagctccacacaaatttctggcctgtaggcactgggatccgggcttgcagaacaaatgccaaccaccagccagcaactggcagggagtagaggagctggacaaggagggagtgccaagcagggagggagaactccagactttgagactgaaccttgggtgataccctcaaccacctaaggtgcctgtctccaggctgaagtctttgcactgatgacaggctcacacacgtgaggacagcacagggctgagtcagcttgacgtgtaggatatttaggtctcctggtctccaaacccctccagtgtgctctcggggagaacacatgtgcacrctccatgcatgtccaccctagccagtgtgccartatgcctatctgtggtagctacagaacatacaagcagcactgggctcaggaacccaggctggtttcaagatcacagaactgtacaaactgacagttgttcacagagtccctgcacaagtcacacaccagccttggccccccattttgagacaccccaaaatgaaaagagggctaagcagttcatacctttgttattttttgcattcttcataagctcattatcagggcaactaataattcacatggtgccttattctgaaattggcatcacatataaaggattttttaaatattttgcaaatgatatggaattatcccaaatcatcctgaaaacagcaggtaaaattagctggtagaatgtrccttggctaaagaagattccctctgccacactcrtgctgtaatgtactgcgaggcgaccccagaaattatcccagtgtgtgccatctgtattaaaatggttatycagttatgaacagggtaacataatactgatcagctaattatacaccctccgaaaaccctccagctccctcggcctggctcagccaggtattgaaagcatagcgatttgacattcagataccttccaaaggagctggagaaagacgctgggtggtttgggagaggaataagccctttgctttaaaagccaggagaggaggctggggcagctttgggctgaggcaagagtggcacttcgggaggggaaggggacaaagcattgttttatgagccatgtagagactcagtctcttsgctgattgctggtcctgggcatgagttggaactgagatctcaagagaagaacagccaagggccaagagtggccctgctgtgtgcagtgttgctgggactgggtagtggtcttctgcagaacatttaagagaaatgcttgttgtcagtaacagaattttcaagcctttggagaaacccaagtcatgtaggatttaggtaatttgtttctcttgaatggggtagaggagtggcgcaacaagtcaggtgtggtggccccgtccaacaccccctgcccctcccctcaacaacatgcactcctcattggctgagatgattttggaagctggcttaggcataagtttggaaatacttctatcctgaaaagccatggagaacaagggccaggtgaccctaggatcaagctccagaggtcttgaggtgcacccaccagaattaggacaaagtagacaagtgagccacaagtgagatgagggtggggaaagagtagcctcagcttgacagctgtgacagctgcagaacctgcccagcacagagccctatcacctgaggggcacacaggcttcctttgggtgtggagaaatagccatctgtgggcagatgttgctggagatggagagggagtaggaggagaggaacaggtaagccaccaacaacacgggcagcctaccctgggtccgtagttaggcttcatggctggctttgtctacaaggagcaggaaaactattcycaattttgcttttgtccagaatcctctcatggttcatattttggaaagaattctgggggcttccctgtgtgctgctgagttggggctggagaaatccacctggggaaccacgctctcatcttcatccctgtaggtgctttttgctctgaagagggaaggtttatctgagatgtattgtttcacccaaaagcctgataaaaacaggatgtttctgctagtgctggttatatcagaaactttgccttttatcagttctgggaattctcactcactgtaggaagagcccggagattttcctgtgtgcacaaagtgtggtgcaccggggaacgggtggttcttgagtttagagctttgttggtagtgacctgcccacttgtgttgggtactttataacagttatgagtaaggttgtgcatgagctggtggttggcaagaaaagaagtccacacatgctcacccacctgagctagtggtttttcatcttctccttcccaaaacagatgctgtcgccacacttgaaatatgctgttatggttataaactaaattgcttttttcactctttaaaaatggttttggcattctctgattctgttgtgataaaggcctggccatccagcctgtattctccactagcaaatcctcagaaatgcctctctgaaccagaggactgggtcaggaaggcctccccactgccacaaaccacgttcaaaaatcccaaggcttgactgggctccttagcatgtggaatttatctgaatctttctaaacattgggttaccaatggctgagcatggagttgccagctttttggtttgtacaccgctgctgtaaagggcaggtgtttataaacaggggactttagattgaaacctggtgtgggacatggcctggagaggggagaggtggagggagatccatgctactgaaaaaggaaaaagtcgtctagttacatmgctgagcaattgtctaagcaggagggattttcctgattatatgccaaaatcttctggtttggctgttactctgggcagagaatacacctcctttgaaagaacaggcacagaccccaaatagagtctggggttactgacaatccccygagggtgctcttttgggaagagctgacaataagggtgtcaccttctaacttttttagcttgcctaacactctttggagtcagggcactctctgcccctagatctttggagtggaccctggcagaatcaacttctcacggatctcccactatccacactctctcttagcctgttaggctctaggtgagtacatkcattctcctagcagtggcaacccagggctgtgttaaggaattccatcctgtrtcatttgggtgtccctcttctgtcattctcaggtctttgagtcattctcaggtcattgttccccttgggtcaggcagtggggtgacaatggtctactagttgttcgttcaaagacctttccaaataagctgggagctattaatcctagccccgtgaatgttgaagatatgttccgggctaggrtctgtttctccctctctgaaactcaggttccagaacattgcctattctactcttggacctggcttggcatgaagcttggccagaggggtggtactgcctaccacatctccatatctttgtagctgtttggtggtcagggctgttggtctcatggcaaagagacagggcaagttggagagttcagaaaaagacttctatccacagaggaatggcagaaacaaggacagggaactcrccttctgtggcctgagcctagcagattgggcccacaaatarcagaccaacatgccaatttctgtcagagaagcctcgctcacctgtcctttcccagagacagtcccctactgtgaggttacccatcattggaataacatttgaaacaggcatgatggttgaaattctcattccttaaaatgagctggagttgtcctcctgaaaagcctctttttgtttttgtagttgttttagcctgggcttcctggcccacagtcctgttggtctgactgtctccctgttggctggttctgtgggtgttcaggctacaaaaggggtttctggtgagagcaattgctgcttgccctgccttcctacctcagctggcaactctcgagaagaggcagacaggaggcactgggcctgacaacagctccaggtgcatttcagaaggtgacgcaaagaagaaaagagagggaaaacccaaaatgaataaataaatagtgtcccaactgttctgagaactcaataaaacaatcacatcaaatatgaagaggcataaatcttgtgtctgcacaggtaacctactcaattgcttttattatcgctcaggctgcctccatttattaccgttcatggcctgggcaaaggaggctgcgtggagggtggtctccagtgcaatcctacaccctgagaggcaacaatcagcccatacagccagagatttcgatgggagcccaggaagggcccatctgtctgcatgaaaaccaatcaataactctgtaaccagagcccttgtcacagggaaatggacaacacaacagttcaatagaggggccacagggggaattagccaagtggagatggggccaaacaggagcagcccctagagaagggaaacagggrtgcctggagtaggggagattagggaaggggtggagatgtggcaggggagagcaatagcttcatatgcatgttggtattagatggggagtattgtgcaaaatagacccagggaatgacaggcaatgttggaagttgaggtggtagggaacatgtgttttggacagcatttgggaaatgggcttgttctggtgcacatgggagagtgtgactatgcatgatggcatgtgcttgcggactagaatgttacagcttctacagaaagaggaacaatagtagtaactggtgtggaagattaatcacactccataccccctaaaacccctctgaaaagggggttcctatgagcccacatgggatargggtcctgcttcccagtcttcttagcaggactgatgaaagagccccattgtccgctcccagcttcttaggtrtccaacaatagctactctgcaggttgcctcttaatactcaagtctatcttcaccccctccttgtgtctacctggaattggagtttttatattaagaagagaacaatggtgtaaaagtgacaagcatccagtagaaatcatacttcaagtacccaaacaaccattctgtttctcactttcaatacagtattcaataaattgcatgagatatccaacactttggtataaaatagtctttgtgttagatgactttggccaactgyaaatgttttgagcatgtttaaggtaggctaggctgacctatgatgttccatagattagctgtattcaatgcattttcarcttacaatattttcaacttatcgagccattaccctgttgtgagttaaggagcatctgtacactgaaaataatttatttttcacttcctgtcctttaaaagaatgctcatccgacctgccagttctctgcatccctgctgtttcttctcacacttcccccgcccctccaagccaggtgtccagagctcagattcttgcaggggaagcagcttcaggtgcagctatccccagtgcagctccccagccatgcagttgagtccagagaaggggaaagggctcctgaaactgagatgtgggaaatagagtctcacaaccmatgcccaaatagcaagtgaaatattagacagctgaaacattaaatcacgtttggtttttctatctaccactgaactactaggttgagatggttttctcttgtggaacaggctatttgttttggggctagcaaggcatggcttgaatatattcatgatggtttgcagtgtagaagttgatatcttctgtgcgtgtggatttgtgtgtgtttgtgggtacctacctatgtctgcttttaggtgaaaaggccctgaggccaagaggagaaaagggaggaaggctcacagracatgacctgcagtcacaggcaaggctggacaccttgtacttgggccatcagatcaattggcaagtagtcattgggccactgggcgaagtggcagcagcaataaggctaggctgaagattcctcatttcacagtctaggcaaattggagccacattttccttcagttatttgcattgtaacactctatagtccagttaaccctggataagaggggctttgctacaatgatgccacaagakctgtgcgaccagctgtccatccttactttgatacttgggtccaagccctgttggcaggattagttagggaccaattgcataagcagccaagaaggcgctcttcccaacacaatccttcctccaaagctgtggtcccgcagtgggaggcatggtagcagccytgggacacaacggtgggcagagctcaccccagggccagcctgcaagtctttcctcaatcatccaggtgtgaggggcatagggaagaggcttactgtttgtgagaaatgcagagctggccactgcagaaggcttggggtgtagatgaggcgtgatggcagaggcagcctcaggtctcctgaggaaggctgggcacaggggagctgttgagggtatgggaagctaaagaagaatggtctggcgctgtaggagagggagcagcctcttgtaggctgggaactctcaggtaagagaggaagtgtgcaggaaaraggtagacaggcgaggccgtagagccagggtcccctcatggcacatccgcaatcaaccatgggagaaatgaggccctttcttttgttttctgagagataatgtaatgagaacagattttgtgttttccaagggagaaggaaagagatagaaagagagcagggcagggggagcgagtcaggtgccattctttttttttttttttgagacggagtcttgctctgttgcccaggctggagtgcaatggcacgatctcagctcactgcaagctccgcctcccgggttcacgccattctcctgcctcaacctcccgagtagctgggactataggcgcccaccaccacgcccggctaattttttgtatttttagtagagatggggtttcaccatgttagccgggatgrtctcgatctcctgacctcgtgatccgcccgcctcggcctcccagattgctgggattacaggcgtgagccaccgcgcccggccgtcaggtgccattctattctagaaacgttcaggtttgttgtagggatgttgggggaaggaaagcagtgcccagaagtccagactggggtttgccaaaagcaatgatggagatgcgctgtggctgcaggagtcatgagcacaaaagactcccaggccccagcaggaagaggctccagaatatgagatgaaaagtggtgagaactggacaaacagccggagcacatgggccctgcctgcaggcagtgatgcaggaagaccggattttaaaaaactctctgctgaccgaataaaactcaactttgggcctgattccatccattggccagcattcagcagcctttggttgacctgactggatggacttatctctctgccttagaccagggcagtaacatccacgcaagtggaaggggatgggacatttcctgggtcccttggtccagaagctcctggggaaggcagtggaggagagattatgactccctatagccggaggaggagaggtggggtgtgggtagggagaggcagaaagtgaggatgaggactgggagagtgaggcaggaagcgatgaagctgagaggtggaaggaagggcgctgccttgggctggacagggttgttcgggattggagcacatggctgagcaggaaatggcacggcagagcccgcaaggggagcttggatttgctcatccgagctggggccttcagtggccctgcaaggtcttgggggtggtgggaggaaacctgagctccaggcatctggtagtacaggctgatgggccctgaggaggggcccagaggtgatgaaggagaaaggggaagaggaaggtaagcaggtttctgagaagagtatggagcgaaggaaatggcatgggaggaatagcggcctggctggagctatgcagccctttctgagaggaaacctcatgagtgtgccgcaatggtctggctgtggcccctctcggcaggctgtgaggcaggccagcagtggctccagcctagtccctggcaggctggagagggagagtaggagagcagccaaaagggagggaggcaggcccctgcctgctgggggttgcagattcgagagccatctccacccagagcctttgaccaggttgctgtggacttcctcctctgcctgccctcagtcctgcctgaaccacagatttctctctgctgccacctgggaacagaacaagccagggacaggaccggtggctcctggcagggctgaggcagggcagcaggctgggaggagaactgtgttcaccctgcaggcacagtagaatcaagaaatcagagaggaaggattggagaggactgggagagaggggagcaggcagaaagggagaacaaaagtggcccctgagcatgagcaaatgggagtgagcactgggggctgctctccctggtcttggtgctccctcttggcctgggggtctttgctgggcccaactgcycagcccatacctggcaggcagatgatagaagctgaagggcatgaggagtctgcaggcagcttctggcctgcaggacatggaggcggtcaggaaggagacactcattcagcctcttagtccagaagctttgatcctgattttggagggcaagcagtggtgcctgccttagtgcgttttcccaagagaagttggtgatgtgttgggagcctctgtgcatggctctgctttggaaagactatgtgtgctggtggtatctagctaggcctggcttctatgccctgggaagctgtctaaatggccctggctcccagggaactctcgaaaggagtcagtcttgtcaaactgggagttggtggtttgctattcagaaggcttccggctaaagggattgtttggtyccagaatgaaagtccctgttatcactttgatggcctgcctgtttgggatgttagttaatgttccctggagagcacgtggttgaatggacagtagacatcctgatgggtcaatgaacrggggttctgaaaggtacacacagggtcccgacacatctagtctgtgtgcatgcacaagtttggggatgtgaacgcttatgagtagtgtgcatttgctctgctggatgagtgaaccaagccatgtgtgatggccagggtggagggtgtgtgtagtatcgcactaggagaactggaagcagttgtttcttgtgtgtctgctgacgtcctcaaagggagcatgtatttaggtagagwcaaaggtcaagatagtcacctccttttatcatttgcaaagtggataccactatcccttcccccagtcccttacttttcttcctctttctcctcctcctcctcgttcctcaggttagctggtttgggttagggggccaatctcagaagactctaattaaagagtgaggagaatctgataagataaggaaggccatccttcctctagggaccaatggaggtttcatgttcctcactccccgctgcttctctgaggagctgacactagggcaggcagcctkccgactgtgactgtctggagtctgggagagccagagagaaggaggtgtgactggggttgggactcgggttcctacccatttgcaatggtcctggaagggaaaacctagcagactccagatgagagcgaggggagggtagaagagagagtgcagaagtcaggaagagagaagtgggagccagatgtgatcaacacagatatgcctcgctaagtcctagtttttggccacagaaatggactgtacggggtggggtgtggtacctttttttttttaattagggaaggggctatgaagccatttaacccatctttggggctgagcacttagctcctgcagagagtacagccctggttagggttcagctcctcctagaaacaatgctcacctgcgctctcgaccctccgccctcccacctagcacatacacttttctttttccccaccctcgtttcctctgaacttggctctgtggatcaggtcactcctggccccatggagacagccaggaaggccatgcagactcccttaggagatgacctcccagggtgggtacaaaaaaagttgagagaaattcatttcatggccagtggctgcttagaaaaggcgattccagcatccgaatgtgataaatgctaactgagcattaatcgcattaaagagggccctataaacttttcacttctaattaaatttgtccagtggtgctgcccaagcgagtactctgggcctttgtttatgtggaaaattaaaatgcaaatacaatgagatttatttccaggagtggagtgatgggctggcccctctggctactggtctccaggcctgtcargtcargtgactgcttctttggaggtgctatcccccttgtgacagattcttgtgtgaagggagaggccagagttcaaggtcaaatagagttagtaaatggggagaagatgtagaaagaattgaagagaaggagaaaaaggcaatagattaccaggaatatagggagacattattctggtttcccaccctccttccccaccaactcacatctctaggggtatagacccccaaaatcttacttgttaatatcaccacaagcctcctctgaagctatgagatgaaggagtacatgggagagagaatttggaggaagcagccctgccaggctcggcatggcggctcacacctgtaatcctagcactttgggaggctgaagcaggaggatcacttgagaccaggagtttgagaccagactaggcaacagagtgaggcccatctctattaaaaaaaaaaaaacaaaactaagtggccatcaggaagggtcaagggcctggatttctctccagcagtttgagggtcatctgctgtccacaccggggtttcactgggctcttcctgccagttccaagtggcattgacatggggcagtgaagcatagaggcacaaaccaaggaggacattgtgcatgcacgcctgcacgcacgcagccttcttgcacataaggagagccggtttctcataagaataaacaaatgtcccttgcaaggagtcatttagtgccgtgatcccttgataaaagtggtaatcctaaatgctactgaatggaacaatctaaatttcctatttactgagaacataaattaagtcgaggggagagaaaacctgcataagaaaaattagtagggtatatcagttagagacactgaaagatagctatgctgctctctggataaggaagttgtaaatagcattaaaaagtcaagcaggaaaggaaatggaggtaggagaaatgataaaagacagagcactaaatcacaaataggggtacatgtacgaagtcacaaaccggctttatgccaagmtttgcagaatccacagcttggactgacaatacatagagatgctaaacacacaggcatgcagacttccagagagtgtcagtatgcagagggtggattggtcgcaccatgggcaagctgttgtctgtgctggactctgggattgatccatcagttcctccttgcagggatctgattgggtacagttcggtaggcagtcgaggatacagctgtatgaggtttttaaaggtctttaaacacatgagtctcttgtgagctggatccaccttctaatggatctccaaggtagcaacccattcccagaacactgcctgcttgactggttttgtcaaatagctgctacccctgtcctcctttttctgttttattctgggctactcttttcctttttagtgttcacttatgcctcttggaaattcatgagcacttgctgacaaacaggttaatgactgtggcaactcccaaacatctggatggaaaccaaaacttcagtcaatcatctataaaggttgtcgatatgatgccaaagatctggcgatttagaaatgtccacataattgattgaatttctcagttttttatccaggctcagaatcaacacattgggaaacacctrttttcagagaaaaatattccaggaaacaaagtgttctcattagaaagcatctttgatgtgttcgagtctgatttctggcttgaaaggaggctgggctgggctctaagtcagatggagatctggtggttagagtagttagtattggaacgagcacagctggtgagaggtttccttcccccgaaagttggccaggagggtagatcactttgtccaaataagcttaggctgcctgttaggcctggtttctctaagggagtccattttgccattttaagggagactgtcaggttcttaagacatgtggctttttcttcatttatcttttcattcatccattcagaagcaagtaggtgcttgctaagcacctactatgtgctaggcaattcacataaagctatgtggcatagtgttagaaagcaggctctggggagaaactgccagagtttgaagctggcttccctactcactggctagagggtactgggtccaccttatatcctctgtgggccccagtttcttcactcataaaatgtgggggataattgtgtaggtctctcataagttttcatgagggttaaatgagtgagtccacataaaccagcttagaattgcacctggcaggtattaagtgctcaataaatgctagttattattattgcagtagtaataatcaagtctgtatttcttgttatgcgtctatttcagtgtgtatgcattctgctttgtgtatgcacaaacattgaattttttttttttttttttttttgagaaagagtctcgctctgtcrcccaggctggagtgcagtggcaccatctcggctcactgcaacctccgcctcccgggttcatgccattcttctgcctcagcctcctgagtacctgggaccacaggcgcccgccaccacgcctggctaattttttgtatttttagtagagacagggtttcacctgttagccaggatggtctcgatctcctgaccttgtgatccacccaccttggcctcccaaagtgctgggattacaggcgtcagccaccgtggccggcctgaaatatttttaaataaaaaagtttgaagagccaaaaggatattctgtgaacagaattgtgtatcatgaatgccagtgagaatcatggtccctcgtgagcccagatggatttaggaaggggacccactcagtgtatttccagaaaaaaagaccctctatgattcagtaatctgaccattgagcagaattagtcagataattgcccctttgtcaactttgagagcccagaccttgtggctgtgtgtgtgtgtgtgtgtactttgtataactrcacattccttctcttggaagcctgctattgcttgaggaattcaaggttggcattttctaggcttcatggcattttcgtaggttgtggtgctttgcattttgtagtttttttaaaagataaaatgaamtggtagtggggaaaaagtccttatttgatgcatttgaagggttccactgattcttaaatgtcatacaggggagaggaaagggaggtaaacaggaagaggaggggaagagaggagagaaaatggagataagacaaaggaagaagaaagaggaaagggagaagtgagcaaatacttaacaaattcaaatgaaatctgtctattcttgtctggcatgtctggatattctaaggaagtatgggagtttgacaatcattgcagttatttccattgctaaggagtaaaagtttttaagaaaaaaatttcaggaaaaaattactttgggcttaatctatttgatgaatggctccaactaactggacaactgcaaattctatttattctttgcctgacaagagcaaatatgaaacccagtttcccaaactcatgacaatgtgtttctcatctttatgggaacttccatggaacaagactgaggtgcaatcccattcttgcctcaagttctccctgcccctttggcttagttaggtgaccaagttcagctcaatggatggctgtaagacccacacccaaatacttacagagtcacttatctgataccttttataccttttgcatcattctcaaattcctagatttcattattcgtcatttatgcctattagctggtaaaggttctgattttcaaattagaaagtaaatgtttttaatgagcaaaattagaatcctgaaagctcaatcatccttacatttttcttgtagtacgaaacaagtcaagggctgcctattcattaccagatgcaggrccagatgctgccctctgtgtggrcataggcagtggtgagctctgtcaatccccagcccctgccactgcccagatggcagggagagaactwccctctgcccctgtgctacctggctgcaatttttgcacttctctgcttaaaacacacacacacacacatacacctcttaatttgtcttaggattttatgtacactagcacacatgtgtacatgtttatacacatacacaggccaatcttatggctgctttactcagaaagcctttatatttatcatcatcatcatcatcatcatcatcataagtggttaacaagtgcttactacagtaggaaccrttacaagcatgtttcatgcattaattgatttaagcatcctaaacaaccccatagggctttataggattgttatagatgaggtagctggagtacagagaagttaaataacttgctcaaggtcacagactaagtagcagaagtaggatttgaacccatgcagtcctggctctaaaacccacatgcttatcccctatgccatacttcatatctactttggatcaagggaagtgcaggcacaggcaatctcctggggaactctgtatattttgcagtctcttacaagctcaaaacaggaaacctgcaccctagcagatggtcacacctctgtgtatctctgtactcttccatggtgtgtgttcctcagtgcaggccactgctgagccacatcatctagagatactgggaaggaagaagatactaatagccagagccacagagtagagtggaatggggattcttggaactagagtttatattgctgttcccattgggattggcaagtttactcccgtccatcctcctccagctccaacagggatctagactctcaattggcataaggtttggactaggggcttaactctccaaatcaggcagacctgttctcgtttggtaaagtcgtaactgttcagcagagcagggacatttgcttccaagaagaatagaatcgtatttttggttatcaagaagagatttgtcctgcatctctagaatcttccttctgaaaagcagcagtgcaaatgaccaggccagagtaagctaaaaaagctaaaggatggatcctctcacccacaaccacaccaagaaggcaattaaagcaattaccgaatcatacaccatcacccagatccagcatcattactcaacccacatcaccaaggagacacccattaacctaatctctgagacatacattagggaaaaaagatgctgatatgatcaatgaacacaataattcaaagcagaaacacagacactgccaccaaacaatactcaaattcctccaactcagtgttacacaaagtgcagccacytcaatacaataccacaaaacacsaagtaacaaacattaagctagctgccggaatgcgtcaacacaatgcaataatacacggtaatgcacaacacagttcaaactctgtatcccataggcacacccatacccacaggctgaaatcatgtggccacttgagccacatgggcagacacacacagagacagagccaatagcgcagcacccaattctcctgcacasccagcagaaaacgatcacagctgcagtcctcccaagcacgatgcagcctgccagaaagcagcagcaccatgccgtttctccagcaggtggacgtgtccagaccatcacctctaataaggcctctgggctctcattgctagtaagagagtaaactgtcccctgagcctgcttcccgagacaggacaattcagttctatcctggttggggtttaataagacttcgctgttagtgaaaatgacagagctccagggataaagggaaaggtggtggtgggaggggagctcactaagctgggtgcaggaattccccttcctctacccagccctaccttctgtggccattccagagccaaagccctcatgctgggtgttcacggagtatcgattcagtctgcaagcaattttratatttcttcagggactttccagcaacagcacaagtcattaattcaccctcccaaattgcttattcaatagcaggaacatggctcctgaataaagtcccagaatttatgtgactcgcacgagtcaggaggtcaaacaactgttatggagcgaagttaaaaatccaaataaaatattgacacttttttggggagggggaggtgggaagcaaaggtatttaaaataggtttttgttgcaatgcccccaggataaagaatggaaggagactgaagacaagttggagtttataaaatcaatggaatttattgcacagctacttggcatttaataattctctcatttccacatccccctcccccaccccatcctggccatagacagagagatacacaggtatacaaatgcacatttwtgtacgtcaatactggtgcatggaccaatataaaaacacgattgtgatgtgaaaatctcaaacaccccaggaagggaacaatgatggtgtagagtctcgctgtagtttacatatttgacagaaatgggcataacttggcagatactcatgaagcaggttttgataaatatatccactattataaatcttagatcaatgcattggagcagacctgaatataaagataaactaatcatagaaatagatyctcaaaacagaaattgagaaacacatctatatgtagtatcatcctgcaatcatgtacatgatttggaaactagatagatgaaaataatttggaaaatttgccccccaaacctaccagtgcatataaaattcaccgaagcctatagcmrcttaatctaaaattgtgatttgttagtaacacagacatgatgcttatcaaatacarctatggcacatgcatgggagaggataagcgtgtttaaaatcacagctacctgtgctctctgttaattgtctacatatataattgctcaattttccaaaatcatggatatgaaaaggctgaaggaaaaatttgttcatgtccaaatagttaataaataaatatatatataaatttcccaaaaagatcaactgattcagcctacagacattgaagtcacaagcctggatccaatgtcgggctcttacccgatgcatatgtataattatatgtcaattgaaaaaaataaacaccaaccaaacaaacaatttctggctccaatgctattaagcatgtgactttgggcaagttgcttggcctttctgttgtttcttaggcaaaatagagaggatggctatttgatagagttatagttgaattcgaatgagaaaacacattcattataatgcctttcatacagtgaatatgaaataaacgatagttattgcttttactattattagattcagctcttctattcaggcctagcctctcatagattctaccatyggttcttgatatgactgactcattctactcaatggttagccgcataagttctagagtgagacactcaggtttaaattctggctctgttacttaacagctgtgtgaccttccgtaagttacctaacctctctgagtctcagcttccacatctgtagattatggacaataatcttcataggtacttgtgagaattaagttaaataatccatataaagtgctttgcacagtgcctggtacatagtaagtgtatattggcccactgtgtcccttaagattatgtcattgttattattggccaggtacagtggctcatgcctgtaatcccagcactttgggaggctgaggtgggaggattacttgaggtcaggagtttgagaccagcctggccaacatggtaaaaccctgtstctactaaaaatacaaaaatgagctgggcgtggtggtgtgcacctataatcctagctactcaggaggctgaggttgcagtgaacctgggaggcagaggttgcagtgagctgagattgtgccattgtactccagcctgggcaacagtgtgagactccatctcaaaaagaataaaataaaataaaataaaataaaataaaataaaataaaataaaaaaawaaaaammaaaaaacaagagtatattattgttattattattaataataatattcatttgttattgaacaaatagctatcaagtacttacattataccagacaccattgctaggtgctggggaaagacagtcgtgagaaaaatagcagacatctgccttctcagagcttggaggggtggactctatgtgaactgagtaagcaagaaaacaaggtttcagctctgtgttagaccctgagaggaagagggaaacagagagaaatagattggaaagctaggatagagccagataagggaagattttgaaggccgggctgaagaattctgaatttatcctataggtgataggaagtgattgtagggtttagccagatcacattctttcaggagacagagaaagactgacggactgtttttgaatgcctgagtaggcgaaaggtaggaaaggctagaggtagggaggccaggcagtcactagcgggccctacatctgctgctgctcatgtgactgcagagggaggtgagcatgcctgtggtgggacagggttgggggatggacaggtgcagagtgggagactttatcccagcaatgaatctatagcagtaccttgttcaccttatatcaagcagtcttcaagcctctggagcttcccaaacaggatcatgggggtggacagctggtagattccagctctagccagaagctctgacagatgagggcagggccagtggtgagaggcgctagtctgtcaygctctgggcttggcatgcaccacagactggtttccaaatggttagttaaacacattgccccttaatttttaaacctatgcatatcttgaagttaaatcaatccatatgcttagcattcatcatataaaccatcactattgcccccttgggccagccccatggcccatctagcctggtaaattgtctctggcctgggctctcaggggcacgtggcggaaagattatcgccctcaatgccagtcttggaaggctaagttgatgcagaatatatgcctggtatctaagtaacccactgggaatttatcatcctggaatgtaccaaaaaccattttgaaattatttcaatttttaacctatggttttgtttccacagagcaactgatagcttattgaattttggtgactatgtcagctggagtcagggttaatagatggagagaaatgtggatcgatagagtatgagaaaggaactttcttaactcactaagacttattcccagctcttccaaggatccccttgagaaaccaaccagaaggatggtttcttcacctcctggcttaagctagtcttctcaaatagagttcagaaactctaattcaggtctaagatgggacccggtgatttgcattttagcaagcaccccaggggattctaatgcaggtagttcaagggcagtagtttgaggaaacccttctgccagctttttggtaggactttcatttcttggagctcagctatgacttctgagagtcaacaagagttgacacatttgggaagaaccctggtaacctggaacctgtgtattccagcaacatcctgccacagccagaatggaaggtcctgcccacagctctgaagaatggcctggcccttatcagtggccatgttcagaaccctgcctgacatatggtcagttatccagactgaaacctgcagggcatatgagtgagcatgggcaaaaaaacctctaaactcagcccaaactgcagccagaggctacaaaaacagtgtgttaagtgattcaggcctgccttaaaggaagccacgtgcaggagagatgctgtttcctttgtgtttctgtggagagsaggaagtaaatttcaatttttcagttcctggggtatacaaagggggagactctagttccttagagttctcaggagtagggaccatttccaggagaggtaaacatttcctgggtgatctatgacatctcactcaaggttctgctgtgaaaagtctcccgctgttagtgttgctgacttgcctcggggccaagccatggatacgtgcctgatataggcagctctcaaagacttgtgttgaagcaataaccacctgcattagctgggcaaaatatcctttgctgaagcaaatatcttctttttttttttctaagacacagtctcgctctgttgccgaggctggagtgcrgtggcgcgatctctgctcactgcaactttcacctcccgcgttcaagcaattctctgcctcagcctccccagtagcagggattacaggcatcygccaccatgcccggctaatttttgtatttttagtagaggcgaggtttcaccatcttggccaggctggtcttgaacttccgacctcatgattcacttgcctcggcctcccaaagtgttgtgattacaggcgtgagccactgtgcccggccacaaatatcctttttaatatcttttttgtgtgtgtgacagagtctcactctgcagcccaggctggagtgcaatggcaccatctcagctcactgcaacctccaccgactccagtcgtgggttccacttcaccactgcaatcgtgggtttgagagattctcccacctcagcctcccgagtagctggaaccacaagcatgtgacaccctgcccggctaatttttgtattttcagtagagatgggktttcaccatgttggccaggctggtctcgaactcctgacctcaagtgatccacctgcctcagcctcccaaagtgctgggattataggcataagccaccatgcctggctgcaaatatcattttgttctctaggatgattgagtttataatgcccaggcagtctgagaccactggcagaggcccccatgaccaytcgtctggcttagtgggcaatggggccagctagtctggcacattttctaccctggagtgcctttgatttactgaatcaggaaagaccctccccataccagggattaaatattttctgcaaagactctaaagtggacagtttactccaggacaatttaaactgatttatacatgtatataacacatatatccagatacttgacatcttgctcctaagagcagcctgcctcaagcctggtcatgtcactggtttgttcaagctctgctaggaagtaattttgttcctctagggaataattctaaaattgggaaggaagtctgttctagacagcaggaaaggatttcatggtgacatacttggagatccaatgtacaggggttgtcagcaattgggtccagcaggtgttaatactcccattttctagtgaggacaactgaggttcagggaaacctctcacccttcatttctcagaagggactgaaaatagaagtttcaatttggtgcctttgggtgtctctcccctggaggcagtataatttagcaggtaagggattagtccctgggattagtctatgtgaattcaaatcccagatttactgtttattaaatgggtgactttgagcaagttgtaataagccttatgtgcaaaatgcgttgttgtaaggattgagtgaactatttatttgaagtacatagaacattgcctagcacatagtagatactcagtagacagttttttgtttttgtttttaaactggagcctctcctgaggaagcattgctcctagaaagcctgcccagcctagtccagtaaatgctgccacctcactcctcccaaggtgagctgtctgaggtcacctcaatgctaataggacctcttcttgtctccacctcagggagtttttgcacaccatktattatcatataatataatgcaatataatatcatacataacataacataatatgatgggtaggttaacttggaaaccctgaggcggacrgtggatggatggatagatgaatagatacatttgtactaagtatacatacattatatcattctattgatttgtaaaaagttcccggtctgcctggctgtaatgagatttttgaactttgcgtggcgatcaatgagaggaatattattggcctggagaattgatatacctgctctcagtggcttgttctgctcccaggctgccccggccccccaggtgtatgattccagcagacacttaaccttttttacagtgtcatcaggctaaaaggaatctaatagtgacacaggacttgtgctcagcactctgccactattgctttcctgtcacaaataatttatagccttctatttccacccctgagcctgcaccccagccttgcctcctgcttcccccagctcccaggaatcaataaactcacatagccwcggtgggacttcagggtgcaaggagwcagacagacagacaaagagaggggaagtggagagaggagcagagaaggagaagaagagagggacagagagtgaaacacagagaaaagaatggggaaggaggaggaagagagagagctgaactagaagatgagtaagaatgcctggtgctctcttaaaaggtggagcgcttctctctttcttcttgagtttaacacagtgttaatagragtttcatgcagggctttcattcttactcacagagcctgagactgtgttgatatccaagttggtgagaggtgggggtcttccgggaatttaaccagtaagggagtggcctccccacctgccctgtcatcctttgctctgaagtcctgccacgaccccctgccatcccttgggtctcctgtggatccttgccagtgaccctagtggggcttggtccagcccccagtctgtctgcttgagagtctgacgcaacctccttttgggtcagatgtcgcyrccgccactgctgctrtttcttgtcttctcaatgctcttcccagggtctcagtggcacctgcattgaccagkctggggcatactgggtagggaggtctcctgcctgcatcggcctaaattgaaagcacccgggcctaggggtcacccataggaataataatactggtcatcattgttattataggtagcatttatagaaccaaccatcatagtaatcacattacatggagtgtccctatttagtccttgccacagtcctatgaagtgtatggtagtattatcttattttacagagaagggaataagaaactgccaggggtttcacaggaaacaagtaacaaagccgggattccgactaaggcaggctgagcccagaacccatgtccttcttccttttgctgctctcactcccttggaagtgtgggagactctaagtgcctggaagtccccatgcggggcccaggccaaagccctggaggtccccaggaaagggygagctctcatcggaaatggtggaggagaaagagcatcttgtgaaggaaagagaagtggggagcaggcaccctggcagggcagtctctcagtggaaatggaaaaatgacacctcccagcttctgagcagagctgtgtcctccagggtcccagctgcaccctccagggatctatatccagaacttgaccttccaggtcaaacctgcctggggccgtggaggtttgatgtgtgtctggctgtcttgtgaggccaagtatgaaaaagaattggagaaagaggaggaggaacatggggaaacggtatcaggccgtcatcatcaacaactgctttacttcattcatcctttagccccgagtgaaattgccatgagttgttgggttgttgtatgggagacaggaggacaatggatgaccatcagatttccatgatcccagttcttaaattctccgagatcagctctagggactggcaagtgcccactgcctgaggtcatggatggacaccaagagcattagtaactcacagcaggcaccctgcccagctcctcccccatgcaccaccaagccgctgtcagggagtagtgattttccatcactcrctgcctcagctaaatttgcgccagtgccctaggggtcagaggctctgggtaacaaagacagaaactcctcaagcccgtccagttctctctctcagccagccccacccctggggttcccttagtcaagagcccatcagmcctcaagccagagccacccacaggcccagtgagctcacagaagctgttgctgcagtaaactaggagcagctgctctgagctgctcagcatctttctagacttttcttgtagatgattgtacactgcctctcagctactatccaatcttttccattgtgatcaaactccaaatcttccctccaactcttgggagatgaccttgccttctgctttgctgagagataaaagccgtaaaagctccttttcaaagctttggccacctgaaaatatgccatttctggctaacacctccctggagtctgcactccatttttccttgttctcccttgctctgttaatcatccacagtcccttaggcaacttcagtctcttcctcttcactggktcttcctcctcagtctacaagcttatccaggtctttcctacccaagaaggccttccctccacttagctgcccgttccatcctccaccttccatactttcctctcctttcgttttccaaaaacttctgaggcaatagtctccgtttactgccctgcctccttttmctccctatgcattccctaaccttgttctgtctggctcctgctccagtcgctttgctgagactcctcctcaaggtcactaatggctaccagaatcccaaatctgtgcttcttcttgttcctaattcccttcggtccccatgttgctgttggcactgcaggttgtgtttttcttgaaacattcttctccactgacttaggtgaaactgacctatcttggttctgccatttcctctgcaattaattctctgaatcctttgcaaggtcagtttcttttcccagtccctggaaataaatgtcctccagtatccactccttaggcctcttgtcttttaaacactcctttccccggtccctgacagtctcctaaatccatacctctgtgtgcctgctgatgcaggggcattgcccctggacgctcctctttcacctcaaatgctgcacatctaggaccaacatcaccacttccctccaaraccagtcacctccctatagccttattcctgacctgctgatgtaaactccaccaagcttccagttacacaaatctgagtttgtaaaaccatggttgactccagttggttgccaaactctgaccattctgccttcctcttgtcttgcaaattcttccctttctttcctgagaccagctccctatcrcctcatgcctcatgtatatgtatgttgctttactgggatctgtttgtagagatcccccctagtttagaaatcactcatggcttaaggccctytaaacctggttcctacatgttgggggcaggatgmcaaagtaacaaaaagcatagattttagaggctgcattytgagtyttccctaattggtactgtgattttttttttttttttttttgagacggagtcttactctgtcgcctaggctggagtgcagaggcacaatctcagctcactgcaacctccgcctcctgggttcaagcgattctcctgcctcagcctcctgagtagctgggattacaggtgcataccaccacacctggctaattttgtatttttagtagagttggggtttcaccatgttggtcaggttggtctcaaactcctgacctcgtgatctgcctgcgtcggcctcccaaagtgctgagattacaggcatgagccaccgcatctggccttttttttttttttgagatggagtctcactctattgcccagactggagtacagtggcttgatcttggctcactgcaacctccgcctcccgggttcaagcaattctcctgcctcagctgcctgaatagctaagattacaggtatctgccaccatgcctggctaatttttgtacttttagtagagtcgagatttcaccgtgttggccaggctggtctcaaactcctgacctcaggtggtccacccgccttggcctcccaaagtgctgggattacaggcgtgagccactgcacccagccagtagtgtgatcttgagtgagctacttaaacttgtctcagctttggttttcaatttgcaaaatgaggataatagtctytactttggaggtggttgtgcgaattaacartaatatatatgtcatataaattgtgtataatattggcacatagtagatgttcagtaagtggaaaatggtgatggttctcatcacatccaagttttcattcttgtttcctcttagtcccttgcctgtctccactcattctggctgaccactctgggcattaacccagaaggcagcaggctcgcgtggcttccgcttccaccagcttgtgatgccctcccctctacttctttgttcatcttaggatcaagttattttttactggggaaagagacagtggagatcctgtagtccaaccccttcatttaaagctgaagaaactgaggcccagagaagttgagaggtgagaccaaggctatgtggcttcttaaatgcaaaatcagaagcaggactcagggcccctgccatgcagcccagtgtcctttccgccatcctctgtgcctctgatttcagccctacttggctttgaagatctacatcaatttccctctgttcagcgacttcttccgcagttccctctcctgcaaggggaatggttcctctcctccaagtttccagcactaactacctgattccctcgggtaactgagcttttttggggattaagtctcccctccccaccttcatatccagcactgtgagctaggggccttatcccaactgcctgcaagtgttcaggaaaagcttttagagctgacttgctcatggcttgtgactcwcctggctggttgaggtgagcttggctcacatgcctctctgtggggacaaggaacgctatcagaaaagtggcttccaaaggcccctcatttgaccagtgggtagggggagcattcctccgtcttggccctgggactggtctttggcatcattgagccctcggtttttcagatccctgaaaagcaggctcctggaatgtttgatttggccccttctccccaggatgtacagggagggcaccagacctttcaaccaggctggcaaagacgctgcaatccaagtaagaacctcagaaaaggaggccagcaaaccagccagccatataggaacagggctctgacttgtttgagggcagtaagtgggctcaagaagagattgttcagcctgacatctggcaaagggactgtgtgctgtgttggagtcctggggacaaaagaaagggtcacctgtgacccagcccctccctggctacttctcattctttcaggatatggggaaatctcatcctctcaactctgaaggactgtgacacagtcccaagtaggaaagccagctccaaaatgatctcaaaacccaggaggtcctggtaccaggaagagatgcgtgtgtggttgaggagagaaaggtggacaacaagccactagggcagtcctcaccctgcagaaaaagaaaggatgctgtgctcactgggtctctgccctgatctttgctaccaaaaatcaaacaataatttgggtgatgcacatagcaggacataaggcaggctgcattcacccagagctgcattacgttggatctgcggagccaacagaaggaaaaccctgtgccttgcagcagtcagtgagggcagggacacagggagcagatggatgaggaaatcgctgaggaacttgggagagagcccctttgcagggctgggctggaattggccgggataggagtgggcatttgatgtgtgatgctgttgtgacgctgttgcagaatcatccggaccaaagttcagcagcctttccacccaacgccggatggggctgggacaggagtgaccgcccctggccacaccattggtaagagggctcagggaaggggaggaaaccagatcccacctagagaaaggcaggaaacgcagctccacccctgggaactgcctgcccgsttgaggtccagagcccaacctatttgccaactcctctcacctgagctcctgtccacatagggtcttcctgagagatactggttctctaggactgttctctgcctcccacttgtgtcacctccctctgccctgctttagtcagtccctatcctctcccctcctctcctctctcttaagtgtttttcttctagcatttcttcttctttttcttcttctcctcctcctgcttccctctccctcattctccaacatcttttgtttttatctgattctgtctccctacctgtgccctctttcttttatatcaactttcttattccatctttgtttaacattccatcttgttcttaacattgtcctctgtcttctccccttggctcctcttcttttctccctctgccsttccctctcttctctcttcttcttaggtgtagctctggctctgttctgtcttcctccttcctcatggcctctttcctcttggcctttctctcttgattgctcagcctctgtctcacccactctgtatctctcatcctttctccatcctcctcattctttgagccatgcttagggcctctcaaagacgtgacccaggcctactagaacacctgctaacactcctcctctgtccccaacgcacacagactagcttccctctggcccaaggagaaacttggtgctactgtagccatagatgaggcccggggtttgaggggctgggatgtggttacatttttcctgctgctcctcttggcagttgtctccttctgtcttgaccagcaggtaatagaaatgactagttccagccctccaggagttggcaggagctgttgtttactaggccagtgttacagtgtgtgctgggagggagggttgggccaggctgtacctgagttgatcaccatagagcgaatgggttcactaatcttgccctaagggggaaattaggagtttctcaagtgatttcaagaccaaaagcagctgagagagagaaatgcacactcctggggaacatcaggaccagtcttgtgtctcctggagaatcagagacagatcttagaaagccacagactctaaatcaggattggtaaagactcagcccaggagactgagaacaatgagctggggcttcattagaagggtttgcccagccccagggattggatgagctgtgcaagggggtatccaaggagctgtgctctctagaggaccatggaggtgctgcctagaaggagacaggtttgctgtttcctgggcctgtactccatccgtctttaggagagtgagtttgagaaccccagtgaaatccacaggtctgcagagaaggcctggggttaactgggcaccacttacctcagggctggacagaagtgaataatagcctgtatatggcaatgcagtcccctcttaaatagaccccagaggaagtagaggaatgagaggaacgtgggctcctcatccctccttatgtcctctgcttctctctgccccccagccttggggctttggcctacgatcacaactgctaaactgctatcctgatgccatttcctccttcctctcatccagttcccagcacggcctcccctcctgtttccagcgcctccaatgacccagtgggatcctactccatcaatgggatcctggggattcctcgctccaatggtgagaagaggaaacgtgatgaaggtagggaggagggaagaggtgtggcttccccttcacatgctttgtccttggactccaagctccggtttcggcctggcctcgcagctgctctgctgtgagatcaattttagtagcaaagcccaggtccccccactgccctgctggctcctggagagagggagggtggctgctagtggggccatcagcttcaccatctgctcagcagccccggctgcctcacctgccactagggctcaccctatcgatccctgtgggatgtcaggaggagaagcaagaaccgtttaccttgggaaggttttggagttgggggaacagctggtctctgrcctgaggatgaaaggccaacctaccttgtccttacctgatcccaatctgtctggaggtgaggkagtgatgtcatgtgcagcctagcctggtgtcctttctctttaacacctgcacaccgcccccagttcaaacctcacagggagctggacatgggacccctctctcctcttcttctccatgagtagaaatgccactccaaatcccctggccctctccctcacctccctgaratgcctcaaggtgcagccaggctgttaggaagggtgtcaaagggaagggggaaggaagaggaggaggagagaagaaaagaaataagggggagagtggtagggatgatcctgggacaaagtgtttttcaaatgtcgtgacaytgggggtcccttggtgaccatctggttctcttctgatgcgtgaagctggggcacagggctggcagaccctgaacaacagagacaccagtgtctccggcctgcgtcctgcccccattttctcatggttcccgctggagaastggtaacctcctggccttcagaggattttaaagacatctcccaggaaagaggcagaatcctcaaacartgagcmtaaaggggtgaccatctatcccattagcccagaacagtcccaatttatgcctgttgtctctgcatcttggccagtcagcatctcagcatctcccttttctctcaaaaatgtcgtgtttggacaataaattatgtggtcattccacacatagacaaaccctcggtaggggaagcctaatggagtgaggagcagagaaaagggacaacactgagcttgcctgggcccacagtccaagatcccccagcctaggctgagggaagagagtgggagaggccaggcccccagcggaagggacagcgtggaggggaggcctaggcctgacaagacagtgatgacctggcgctggcctccttccagaagccctaatggcctcgtttcacagggaaacagcttgtctggctctatttctccttcttcyaaaatatccaaaccgatttggcygccacggcctttgccattcactaaatttcattgtggttgttttggcggcrgcccctgatgggcagggggaggttgtgggaaaggccctaagtcccagttctccctgaggctccctgtgctcaggccttggccaagctccttggcaccccaagtgctttggtagaatctgcctcaaaccctaaaggtctctcccttaaccagcagcccctgtgttttttaggggtgagaggcccagcagcccatgggaggccacagatacccctctgtactctcccttttcagtctgaggctgtggccaagtatgccaacctcgtggccaagtatgccctctgctgcatgggctcctgtggggcaagaaaggctgggggtagggaggcactggcatgaggttgtggtcacccagggctgygcctggctggcccagaacagggcgctctcctgagtggttgatcgccttcattgtttctaatcaattcagttcagtgaacctttcctggacatcagtttcaagaaaggcttggtactataggatcccaaagcagaacaagatatgattcttgtccttaaggagcttacattctagtggggcatgttaaacatgtgagctcaaagagcagataggcccatcagatatcctgttgcgatggaggtctggtggcgggccacaggaactgggctggggagggagtacatggccaggaagggctgctctttgargaggggcctgagggatgaagaggagaatgttcagagacaatggtagcctgaaattctatctgatagactgagccttgtgaccagaaggccctttggccagccactgcagggcagctttagcagggatagaaggcacaaagagatgtggtggacagtaaggctgaggagacaggttagggccacaggatagcaggccaggtctagaccatagaaggagtttrggctttttttttttttttttttctgaaagcaggagtagtctgagcaggaagggacaggagcagggctgggtttgggaagctcatgctccagcagtgtgacagtgatgcaccagggccatgttgcaggaagcagtgaaagccttcaaagcaagagattacggtgcccccaagtttcctctgaaacatttacctgctgggcctatccgggtggcaagacatatcagaggcctcactcttttttgagagacggttctcctcctcttaccaactcctcttgaccaaccccaggccaaatggagatgtattttccctggtggaggcctggcctatgagggagaccagttctccctgacctccccctccaatcctgatccaccagcccctggtgggaagggagaggagagagcaaaggtagagctgtggcagcccctcctcccctttcccccactctggatgcttctaaggagccaggcccagtttgcattagggagcagctcagatgattaagaataagggagataattatgtgtcaagatgatgtagcccaactctgcagtcaggccaaggtagcaaagcagctggcaggccagtcacagaaggcagcctcgggcatgggctgcagacacccaggtgtgtccttcagtgactgggccgggactgcagcaaaagagaatactgaccaggggactaaggggtgttgggatgggactgagcacgcacattaaagggctagaccctagagggaatggaggggctcatctccytccaggaggacccttaaagaccctgccagactggccctcctttggccccaagcactgtggcatcttcctaggagtgtcataccccaagggcaagctgtgaatctctttgtcctccaggaagctgcycctcttttgctctgggtacagttcggcctattcttcagctctaacaatgtcacggtgatgggcattagtgaggacaatcactgcagtgagtgctggcattattggagacaatctcagcagtagttattggtgttcacagtgataatgcccagaacattattggcactggcactcggaatatggacagtgttattagtatctgcagcaatcatttccctggggatattaggaaaggactgatcagctgtgactctggggaaaaactggcagtgactgtgagcctgtttgagaccccttcccatgccttggcctttgagagtatggaaaacaccccctgactttcccttgagaaatgtgctggtcaagaggctttgaccctcatcccaagagcccaggagctcccagaatgagacaggtagacagtccagatagatgaggaagttatgttctgaagcacccagaagacaggctgtccatcagtccgagaaggtagaatccccattcatatcattcaaaaatcctcacttcttagctgtaattatgggtgggcatgttagtgctggattccctgggccctttgaagggatgccaattccctgaacactgtgtgagctggtttatgtggctggaggagagagattcttgtatttccctatctacaatcaggctgaaaactggaagtccttcgcctttacccagttgctttyggctggggcccaaaacattgctgttcatcggtgatggtattgaagmgcagggcagttacacaacttgtccaagaatccaaatgaagtcatatggtgagaatctgctggtctgtgtgagggaggtgtgttgggatcatcctttgaggtgtgagattgcagggggccatgattttgcattccattcattaggtgtacaatgaattgtgccattgagtggtgccaagctggtgcagttgtgcgtttgcaggcagggcaggttgcatggctgcagatggccgagtcctgtcactgcctttaatagctcccttctgctttggatgaagccataaatggaagaagcagtttatttccttagttagctaccatcctagaggtccccaagagtgttgctcaggttagacttggagcaaatgaggggattaagccrtggaaatgagaagcacctgcccttgtctacgagcctggcttgaggcagcagaaggttgcaaagactcccaccaggaaggaaggcacagggtaggagtgagcatgccatccctagagcagggcatggatgggcagtggggctcagtgggaatgaatgtggcctctggagtgagcacagcagggtctgaatcctggtgcccctcactagttgggcaagtcacctaaccttcatcagctcaatcttctcctctgtaaaatgaagatggtaatggcacttccttcctgggggctgtggagaggattccatgaggtcgtgaatttagtgttgagctgacttcatcttggagacgcatccttgtgtatctgggaaagaaagcctaattggcaggtttatgtttcatgaggaaatgaagttgtgttagaaagaaatttatttgggcataggcgccctaaccttggtgcagctccttgtaactagggcagcctttagtggatgctgggattagctaacccggatgggaccagcgcagtggaggaaagctgtcgtcctcacacccgggattgggagaacgtttgtccatttctatctgttcatttactctgtggttacccacttgggccacatgtcatctttcagcctccacaggcattttaggtgtgtataaataaataaacataagatcctcttctttttctaacatgtgggcatctctccctctattcatctgtggacattactgctcccacatgcaagtttatttctttaccttggaaaatgtatgtttgttttataaacccaaatgtaattttttacacagtttatgcaagtgtgagtatgcatgtgttctaccgctctgaggtctttgggtataaggggatgggaatgtcatgcactgggaaggtgtgcagttacctgggtagkgtgcgtgcttggagagagtgccgggtgtgactgtgtgakcggggagagctctaagccaggcctcagtgtgttgagcgcccatggtcctgggcacaggcatyaccctaccttctgctgataaagggaggggctgtcctgagcctgcctccaggggtggcctagggcccaagactagggagactaaggcccttacagccaggctgtgagggaattgcagctcagaacccttgtagcccttagaaggggagtctggtctcccgatcttgggatcctgcccccaatcttctgcctgcctgtctttcgggatctctcagtgtttgtctgtctcttatttgctctagttgaggtatacactgatcctgcccacattagaggaggtggaggtttgcatctggtctggactttaagaggtatgagggccagagggaacatggcgtgggggtcaagggaaatagcttgggggtggcggttagagaacattcagagagtgggttcctaagggccagagcatggaaaaggaggagttggctcaggcttccactgggagacctggaggctaacagagtctcagggcctggattacttccgccatgggccactgatggggtttgggagctgaggccccggtggcctggagggtcaggcactcagtggatggggggtcactttttctagcccttggaaaaacaaagagcagatcgggtagtaaaacaaaagcaaaggagacctggaagcacctgacagccctaattcatcacagcccaagttttttcctgtgttcccattatatttgtttgtaaaagtggaaatcaattttgaaggtaattttctggaaagaatggaagggaggtgggagggccggataaggcagagatggtaaaaggaaaaatttaggccaggcacagcccaggggcagctcttggcaaggtgaaagaaaattgcatattcaatctccatccatgaatctycctcactgctgcccgcctcctgcttgaaaacaatgaaggctttttcccaacgctgggcagggcctcggtatcagcctcactttaacttcagggtcattaattccctgattattgaaggagaagagagggttgcagcatcgtcaattccaaagrcaccccctcatgtgatcgggcactggctggggttgggtggggggcacccagggcaaagtgaggtgttgtttgagaraggtgtgaggagcgaggaaatgggggagccactggactatgggggaaggaagccaggagggtggaagaaggcagtcattactgcatacctctgttgtgttgttattgcaaattaaaagtagcatgttccactccacagctatctttggggagggaggggcaccgagggaggtgggggatcttatcattgcttcttcagcagaccagccgtggtgtcaccgtgtgaggtgacatttgaatttacaattccgctgagaaaagccattaattcacaaattaacatttctccctctccctctctctttaacrctctctccctctctcacatggatgtgcaagcaattgaaaagacaaaggaaatagccttaaggaagagactttactgctagtctgtkctgagattgctccccctgcttccagatagataaaccaattacctgagcagctctgctcctggccgcccgcgatcgcctccttttgtaggctgcctccatggctggattacactcggtgtatctcattaatgtaaaccaggcgtgccctggtcaccaagctctcttcccggctctccttctggaggggcagtgggaggagggctggggtcagtaaaggcaggcaaggaggaccccgaggaagaccagaggctgccactgcctggcttcccaggccctgggcactcgggtgcagcctgccatgttggctgaggctgatgggggaagtcggtgggtgagcgctccttggtgggcttgctctgaactgagtgagggctgggtatggctgggggcagaggaaggagacagggcctgagtctctcagcggcattttggtccagatgcagggggctggcagaaccagagagggatctgagtgctccctgcttgggaagagcttggagaagttttgctgagtacacactattttagtgggatgggattcagcctgaaggagcttggagagaggctgaggagggcccaggagacttggcgaggttgcaccatattgggtaaacaaaaacccagcacttggatacaattatgtctgtttaccacctaattcttgcatgcacacacaccccccccgacacacatacatgcacaccgacacacacacatgcacacccagccatccgactcttttgctagagaagacggggagaaggagtgtgctcccaggtttctaaagtgagcttacatcgtgggtagggaattgcagggcctctctctgcttttgctctcctcccagaccctggttcagcactgtaagaaggcatttatgttggtagggggcagctgagcagagtttttgcttctctctctctcttttttttggatgaagtttcactcttgttgcccaagctggagagcaatggcaagatctcagctcactgcaacctctgcctcccagttcaagcgattctcctgtctcagcctcctgagtagttgaggttacaggcacctgccaccatacctggctgatttttgtattcttagtagagacagggtttcaccatgttggccaggctggtcttgaacttctgacctcaggtgatccacccacctcagcctcccaaagtgctgggattacaggcatgagcgactgtgcccagcctgagtttgtgcttctctaaggagaggtgctctgtggattattggtgggattctatgatttcacacactgtactatctagcacatcacagactctcccctccctaggagacaggccctatgaaagtccagaaaccaaatctatatgatggtaaccatctgtctagacaagtttctgactttaactgcattggctcaacctatgttcattttccaactcatacccaaaacctggctaaggtccacttagtccaagaaagagctgaggttcaaaggtcagcactcaccaaaacacagggggaaaaaaaactcatttatgaacacacattcattgctatgattatatctccctagtaaccaaggaaattaaactgttcatacctgaggggggaggttttctgtcttagttggatcacatattttagccaaactctctgggtagagttggccgtgagcctgttgaatactgactatgtcattatccagaggtaggtgtaggttctgtcgatgttttagaaggacctttatcttgggccctgtgcataggtgatttgtactttttttgtggggaagtayaggggtttagccctggctgtgtggatcaacataggtgcatgcatctgcatataagtccttgcctttatatcagagacagcagccaaatcaccaactacctttgcttcccaactagttaatgctgttgtggatgaagaattccatctggttgtttggggaagtattttgggatttagcacaaaagagtatatattttttcatacaatgccagaaattcagaatagagaggtcaattccaccctaccaggagagaatatacagaattgccctagaggagactgtatgtgtccatccaccgctggaaattggggtgggcgggtgtaggtataccactgtctcagcaaaggctgtctggtactcctgcccagctccatgtttgcaccctcgtggacgagcacccatcttgtcagaatacatcttcaacttcctagtctttcacttggcaactaccttccagccctgcaggtaggcattgttctcctttcccacccagcaagggcaccaagcaggaaatctgctgcctcagctctgcccttcttccccaagcacaggctatggaagcaggaaggaggagatgagcgccgaagctatccccgggccctgctactcctgagttcacctccctgggcgcctcttcctctgcagacaagcaggaagctgagaagcgcaggccactggaaaaagggtttggagaggatgtaggctagggagaccccagatccctgcctgccagcggaatggtcctggcagcctccttgaccattgctgcccgccctggagcccagaaaaggacccctcctgccctgccttcctcagagccatggtggccttagggctgtctgggaccctctccattttgccccattggggtggaaaggcatagagggctgggggagggctgggcctggctcaggggctgcgagacagatcacgagcctcagagccaagttgcagcctcagagccgagttgcagcggagccagtaattcaaaccatcctgacccttcggtgaacctgaacctgctgaccttgacagcactagacaacagaggcctcacaaacctcaacctgcacggaggcctggccttccctccctcccattcttggagccctgtggcccatcctccaggtggctcctaatttggctgcccccatgaaatgtcagcatcccctccctccctgaggctccgcctgcctgcttcaaagcaccctttgtgctcatctctactggagacaagtgtgtgggcatctcctgggggcctttccaggactggggctggggctttatcctgcaggcagagcttttacaccttgcccttctctttctgccccaggcttcacctttttcaggaggactggctagagtgtgtgtgcatgtgtatgtgtgtacatgtgtatgtgtgtgcatgtgtgtaaggttggggtacacacaggggcagcagtagaatgtgatccagacagcagacaaggggagggaagagaagccagaggaaagcagctccaggaacctgcattaaagtaaatgcagtttatgaagtttatgctttcctcctagggagagctggattccatccaacagcctcccagagcctgccaaacagctcctgaagcagaaagtgtgagcaggagagcaagcgagccagtgacagagggagagatgcgcggacacactcacacacccttgctggctcacacagatctccctcggcccaggcagcctgggaagcctgggatggagggatggggacagtaggtttggtaggagtgactccaggagccgttctttcctcctttcttccctcctcacctgccatctccatctctttaggcagagtgcccagcatgagcccttgggcagtgtgggcacctgggtggactggtggtgtggggagccgagggcactgtgggccacctggggcagccagcttgtaggagccgcctgggtgagggacagtgtgggtggtcttgggcagtgggtatgtggtccasgcagcaaaagggaccagaatgctatacaaaggaacctctagggacttgctttttcttcggatgctggggatccatttttctctggcattttggtctgaaccatgtgggtgccttacagccactgaagataattattggagtcttttaaggagaaatagagaccgtattttttttcctggtaattcaaaggaaataagtggttgacaatgttaaagtatgaaagctcacagagggacttaaaagcaagttggaatattggagtatctgttcttctggactcttcttcacgtgcacaagcacatgggttcgtgcgtgtgtgcactaataatgtgtaagtgggccaggacccttgactttagatgaaaggggagtgtgggggagaaaatgcctggagaggaagtccgcagcataggcctttgctctggcctgtgggcttggcaccatcatgttgcttgcccctatggcttctgcgacatacctcagctggggacagacagtgagaagtctatctcccttctctttctgggaactccatgtctgctctattcaaattctaccaggaactgagacagaagaggatgacagaggtagaaccatccagaagcagaggatggggagaagagggcaaaaggatagcgaaggatgctcagaaattgctgactgtggaggacgccttgggaagccaggaggtgctaggcacaggaggcagaaactggccaaggatggcgttggtcctttctcccccctgctctctccctccccctccctcccctcttccctccacacatctttattggttctggtaatagcgttgatttgcatgtcaggcaaagccttgctacacacacaaaaagaaaaccccagccctggcggtgtggcagtgtcagctctcgctgttgttcgacagtgtaaaattaaattaataaagcccccaacacargaaaacataacaggaaattaatggcctttactgtcgctctgatgcagtcatttgcaaccctgctttccgcaccaaagacttcataaatkcaagcagtttctmtaaacaagcatacttagggcggcctggtatgtaatttttcgccttgcttgtgtcctttgagctaacaaagccccctttcctcttggttccagagatttctaactggttctggcccctgctggagccaaacggggacagcaccaggcagagggccccacccgctccctgagagcccagagaaggctgggaaagggctagggtcccaggagctagacgctcagtgagccctccttccccaccagcccctgcagcaggccagcaggactgcataccagtgctcccaggcaggaaagttgatctcctcggggaattcccctaaacccactcaaggctcacccctctccttcctccccgggtctgtcctccctctcccacaacttgtgtgttcccttcctgaggcctctggccttcacctccctccttgtcggtacccactctccaccgttccacttcttaatacatggatcgcacacatctaggctggctgtgacttggcagtggggtgccacgctcttcttctccacaggtaacctgggggctctttttcgggggagctaagttattcaaagtgaggaaagtaaatgtgctggtacaattccccggggttctaggtttcctccatatctccctcttctctaccggttggttaggaaatgccagggccctaaggsgcccctcagacaatccctctgtcctcggcagttttcagtgagctaagagtccttgactgctttggtgtgtaaatcggtaggatactgaggaaactgacaccttcctctctggcctctctggggatctttgtatcaatgtgggcccaggtgcccagtgtgttgggaggtatgagaggagcagagaaccgggatgtgactctcaggagcttakagcctgctggggaaggcaaggctgttgcactcagacaattggctgttcattaaatgcccagacacatggctgtgtgttccataggaatctggggaaatggactagaagggcaagcaggaaatggggcttcagcctgggagcctgggagtggmtgagattgagagaggccttggctgggctggatggtgacaaggcagagtgtcagattcttaagggtcatcctgtcttatctgccactcaccatagaactctttcytccaacagttctgcctgaaaggccacagccctgcctggacatatgtcagagatggacagtggccattgtttgtttgcagcatcactttataycaagtcatgcgrgttgagggaagaccacgggacrtgggatccaaatgtccagatgtgggtccatctccactccctacttgctctgggaactttgactcattacataatatctctgaatctcagtttcctcatctttaaaatagaggtaatggcatttgccacagagaatggtggtggtggtaaagctctccatttgacaccctcccttccctatcctccctccctccctttcatccactccaccttatttactgagctcttggcaaatgctgggctgggtcctgggtggatttcagattctcacatgatatggttcctgcccttggagttccctcaccatcctggttacccatctcagaattcattattgaaggttaaagttcctctgaaatgaacactgaactccagagacagtctaaccaatgccaggcacagtagagccttgccactctcccatctggagactctacatccataatatagcctaagattacatttgattttttagcagccatgtcagactcaagctcatattgagttcgtggtcaactaaaacctcgagatctttttcacatcaattgctatcaagccaggtctaccccattctgcacttgtgtaattgatttttttttagcctaaacatagggcattccatttatccctgctgaatttcaycttgttggtttgggttcttaattctacccgattaaggtcataaggatgtcttctatatcatcatccaactagttttttgcaaaagagttattttccttgaaaacacaggaaagccacatggcccaccaatggggacctcctcctggctgctgtaagtgaatgaatgctttgggaactactgagcccaacagccatcaatcattttacttgttttcatcttgtccattatgctaggaaggagattcttggttaaatgttaacactcactacttccacataatttccttaataaattatttttaaaaatctggtttacatcgatgagcaaattgagtgcctgctatgtacaaagtatggcaggactgatttacaaaggtaaataggacacagtccttgacctcaagaaacttacaatctagcagggaggtagacatacacatcattatataatcagaatgtgatgaatgccgtgatcaaggcatgaagtcatatgatgaacgaaaaaaacaaaggagcagttgcttccactcagggcaactagggaagtgtttatgagggagrtatttgatctaagcgttgatatggagtaaatatgccacaacttatttttgtgagtgcgtgcaagctctgggatatcaccattttcttttctgttgcccataaattaactgtataataatttcatttaaaggatttccagagcctgatcctgaatttatgattttgagtgtcatttgcatatgtgtacctcttcccccttttctgacaggcaggatggccttgggcttgtcactgcctcaccctttctttgtgacatctcagggatcatcaacagcagttttagggtcctgtgtggacctgggaaagttcactgaaatggccagaggttacctgcctggcccctccctgaccagggcactagtgccctcctactgggctcagtttgaagattctttcatttggagaagacaaaagcaagctaaggttgagaagttctgccttctctctcaatattacatcctcttccctaggactgagccaaaacctgcctttcttttctttctttctccaaggcccttttttgttgtctcagcttgttctgagcttttgtcttcctgacaggctcatgccaccctcatatccatccttggttatggtccccgcttccatctgtcatgtatcctgcataagaggaaaaaaagtgacttctatgatcctaagtgcaatacatgctcattgggaaatacctggaagagatagtaaatttttaaaaattcactcacaatgtcgtcaccaggagataaccactgttgaatttggtatattttcccattctctttcttttttgtgtatatataattttttaatcaaaaattgaacaataccatataaacagcttcatgtcttgccattttcacctaacattacttaatataggaccattttcacatatcattaaatattctttgaaaacacgattttttaatggctgcataatcttccrctgttcgatgtacatgtccttttaaaatctgggatcatcatattttaaagcttatctgtgtgcaacaacagtgattttcctkaaatgtccttctcttttcacccctcccccactcccactccctttatgctgtcaggttgattatttgagcttatagaagcagaatttcatttttagagcatcccatcctcgtggaattatggtctcttttagaatctcttgccatggaatccctggccatgtctttcccccagcatggagcattttgctttcttcarttcagattctgccctgcacccccttcctgagctactgccaactctagacatgcttgctttctccctgcatccccatcatttccctttcatcagtttttctttcttggtcagaattaagtggcctgcaatagtggaaagggatctgagctaggaacctcagttcccattcttatgacgactagctatgtgacatgggaaaattacctaacttctctgagcctggcttttggtttttgtcttaattttaaatatctaagagggaatccaattaaattctcttcatattttccagctgtagaacatgagtgacactgaattcagagtagcagcctcctttgttgcttctttttccttctaaaaggtaaaatgttgagcataacaagttaagaactgaccaatctttgcttttggaattcttgtcaacaaatcagccaacattcatgatcacyttctctacatgaagtttataaagttgaaaactatgggacccctgccttcaaaattcacagttcagaggagaaaacaaacattaaataataactgtgatacgaagagattctaaatttggctctgccacttattggctatcataagttgttctgggtaaattacctaatctctctatccctcagtttccccaggttaggagcttagctgccagaggcatgttgccagggttgagttctggctcctctgccatctgtgaggcgtgtaaccttgggaaagttccttaatctctgcactttcatttccccatctacaaaatggggacaataatgtttaagttcttgtgaaaattaagtgagttaatatatgtaagattatcagaggagtgcctgatatatactaagcacttaataaatgttagttgctgttattgtaaggattacatcagtgcatgcatgttaagcatagtgtctggtatccaagtagaaactggatctgttttagttattattagtactatttctacaatagaggtttggatagatggctgttagaatgcagagaaaggagaaattaatggtgagggaggagctaacagccctcttgtatatgtctgaggaaactcaatccagaaaagctcaggagatttatagcaagtgagcaacaaaactaggatttcaatccaggagatgttayttctggtccagcattgtgttagggtcactagtacagttagtgtccctagagrccggtgggtgtgaatgggtacagcaagcctgaggtcagacaggcccacagccaccccagcctctccctattcatgaactcactgagtgtttagaagctaggcttggtcaagtacagcaggtagtttcccagggctagaaggctgggcagaacctggtcttgccccgagccaaggtttgggccagatttccaaagccttcttcatgtccacctctttttttttttttttttttttttagacagggtcagggtctcactctgtctcccaggctggagtgcagtggcatgatctcaactcactgcagcctccatccccagggctcaagtgatcctccaatctcagcctcccaagtagcctggaccacagacacatgctaccacacccagctaatttttatatttttggtagagacggggtttcaccatgttggccaggctggtcttgacctcctgagctcaagcaatctgcccacctcggcctcccaaagtgctgggattacaggagtgagccactgcacccggcccactttatgcccacctcttgagcttggcttgggaactgtggccaggccagactcactgaatgtccagtttaaagatgggaggcaatggggcatatcatccatctccctggacaagcagtgtcaccatagctcctttcccagcccggccctctggagccccttccctcctctctcctttttcctatctattcctccctcactcccggaatcccactttcccctcatcctctcttcttccctcccttctcctatctcccttacctctctcttcattcctgaacactccttccttttctatcctcctccactctcccttgtgacycccccacccaakccatcaatcctccctcctctcccagtctggacagcacctgacctctggggagccaccccattcctcagctcccaaacctcactccctgttcccagttggacctccacctccctggtcctgctgtgccgccgtgggggtggggctgggcctgcacaggcaggctgccctgaatgacaagcggggatattgatcgcgttctgaactcagcccagccgatagaaggtaattaatgactccatttgcctcactaccgaggagaacaattgagtttgaaactgcaacaactggcagctgggaagactggggggcagcctgggggtgaacccctcagaggcggaagtaatgtgtggagtagctaggcagagagagcaccttctgagcagaggccaccatcakaacgggcagagcccccatccccagcacagctggcccctgagccccactgctcccccagcccttgaggcccaaggcccatcacccactggtccccccacctccacgcttttctcttttcttcccatatcactttttgaggtcattttctgcctgcgkatgaagactcagttttcccaagactgcttcttgccagctgtgcaatcttgcacatattttgaactctccctgagcctgtttcctcgtttgtaaaattgaactaacagtatcacttttgcaagcattctgtgaagactgtggataatgtgtataaagtaccttgagcctgcccagaacacagtaagtgctcagtaaatgatgatgggtccttgacagagaaggcaaacatggtagagtggagagagcttcagagtccgacatccctgagttcacatccaggctctgctgcttcctagctgtgcagtgttgaacaaataattttgcctctctaagactatttccttttctagaaaatgagagtartaataagtacctcgtaaagtttgaagaggttgatgagtgtaggtgaaagccctaatatcattactttctccatagacagatagatgtttgtatttgagcttagaaaactgaagttagtgtaattcttttttttttttttttttttctgagacagagtctcactctgtcacccaggctggcatgatctcaactcactgcaacctccgcctcctgggttcaagcgattctcctgcctcaggcctcccaagtaactgggattacaggcgcccaccactacacccagctaattttttgtatttttagtagagatggggttttaccatgttggccaggctggtctcgaattcatgaccttgtgattcacctgcctcaagcctcccaaggtgctgggattataggagtgagccaccgcgcccggccaaagttagtgtaattctttgctatacttaaattcttctcaaatacctcatcttgcttcctgggatttgatgggcaaccccgttcatcccaccctgattttgtagactttgatgagccttggtgctttctgcccaagcaaatgacatcatttcattttcattttctttatttttcttttcttttcttyctttytttttttttttttttttgagacagggtctcactctgttgtccaggctgaatgcagtggcactatcttagctcactgcagccttgacctcccaggcttaagcaatactcccgcctcagcctcctgagtagctgagccacaggtgcatacaactatgcccagctaattttttatttttgtaaagatgagtctcgctatgttgcccaggctggtctcacactcctggacacaagcaatcctccagcctcagcctcccaaagtgttgggattacaggcatgagccactatgcctggcccattatttcattttatctattaccaccacccccaactgtctcttgtcccttgcagtgacccttctgtccctagccctgttcccaagacagggttcagggggtgtctccctccccaagctgctgagaacccactggacaactccattcatgactggccagtgccagggccctgacctggggtgagaggtgtgagatagggcccagctccagggccacccaggaatagatggggagtgagtgcagggctgaatgaatgaggagatgagatattttggttgaggagtaaagacatttttaatagtgattttagaagtagcacatactaattgcacaaagcctggatggtatggaaaaacttagatgaaaagaaaataaaaattgcttgtgattgggaagtaaccactgtcaccatgccggcagctctccttccagtcaagttgatctttggttttggagttctcttcgtttgcctggagactagggtcctgctgtcagtagccccacactctgggctctggctgggcaggcagccactctgtccgtctatttagtccacagctgtcagggcacctgccctgtgccaggatccccagcaaatgtccccttgagccagtcacttgccctcgcttcacctgcacctcatttactctgagcctcagtttcctccccagtaaaaagggattaaaatccctacctaccttggagagtggttgggaagcccatataacctaagatctatgaagaccttttgttaaatgctaagcaaataggaaacagtcagataagaagacaatatgagctttgttatcctcgaaagaataatctatgtcaaagttttgactcagcagtttgtttaatygaattaatttatttacatactatctgtgttccaaaaagacctgtagtagctcacccccttgagagtgctcatgccacagtggacagagcacctggaatggcccagtyctgggagtcccattccccagttgtgtgaccttggaaaagtcactgcccacccctgctagttatggtaacatgaaaaatttggaccagacatcctctaatcatctgggcacagtctgcactcagccagcacmtgtgccacaggctgtagcctccatttggggagggtgccaggcaaagaacgagggatgccgagaggaaggctgtgccctggatggagccaagtggccttcaactgggcccactgtgtttggcacccaggctgcagagtgaaatgatttagagggcaagctctgtactccgacagacctggattcaaatctggctgtcatttactagcttcatggcctttgacaagctacttaacctctctttgcttcagcttccttatctttaaaatggttatcatagtagttccctcacagggttgtcggaaggattaaatgagctctgtaaataacagcaatggcatgtaatgagttcttgatacttgtgagctgctacagaatgggagctgggcaggrggcagacggagaatgaggctgaaccctccctctatggggactgactagcacacggtcccttccttgctctgtttggtcttattaaacccacagccaccatattttccagccccaatctaaaaatgtggccagagaatggggaagaatactggaaatcagaattcctcctgaaagcccaggacacatgaccagcagcctccagccctcttggtgcagggagttcaaatgtagatgtgttctccaggccccagtcttaagcagcctctgccacctgctttggatggcagctcagcagccccggggttaagttctgctgctcaccaggaacacagtgttctctgtctattggtagaggcaccagagatgggcaggatggtgttgctgagagtggaaaaggcctgtgcgtcagagctgatgctgttagaggctaacaagcagtggggatagcacatcttttgctagccagggatgtgtggggcttacctgatgagagactgggtgtccttgggtgccaggccagtcagatggccagtcccaaaaccttctgccagaggtatggctttgaatgccacccgggagagtctgagtacctactcggggccattcctgatgctggagctgcagaaatgcattagtcacggtccctgccacaaggtgctctttgactggctgctgggcmtgggggcaaaggggctgttggataggggatcttctttgaaatggatggtgtctaatcactcacgcgctctccttccctgctcactagattaagatctgcttttacatcctagaaacctagattaagatcggcttctgcttccacctctgtttcagcccagctctgccagacagcccttcaacagctgggcctaacagtggtctctttcttcctccttgccgtcccgtctgagactttgcccttggaaagtcccatgccgagctcgctccccatcttcccgggagaaccctctaggtggtcagcactgacagctgtcttccttctttcctttttgactcttcctcctttactctcttcttcttttcctcctcctctccttcccctgcaaagccaccctcatccaggccctgggcagagaaggtatcaggacacccagtcttcagcgaaagtagagccagctggttttattcctgcagtaagtgtcctcaccccagccagcacttccagcttctggtgcggaaggcttcttccctttcttcccctccttctttctgcccttccacgcctctgggcttcctccttccctgagcttatcctccttggaccttctgatccagggcttctcccaacctcctttcctcattcccttcctgccctctctccttgccttcattcctcccttccttccctagctgatggaaggatgccaccccctcctctggaaagagcccttgagagcctatggtacgtgtggtgtatttggagggctggctggctgtcccccaccagtaatgccactgccctctcctgggccctgcggctcacctccctgcaccccataagtttctttgtgctccttcgccattcatcatgactgctgccttccttctcctacaggagttcccgcaagcctcctccagcctctctggggggtgggggttctccgcatgctttcatcacaccactttgttttccttctcctctaacgcctcctttctcctccccacttccctctcctctgcttccccgcctcccactgccacctcttccagtagcaggcttccttagcctttgcctcctttccctcccccttcccctcctttgctgcctctgtaacctgtcttaccaccagggcctgagtatacaaaaaaataaataaataaataaaaaggtcagtgagtggagggagcagcaataacccctaaaacagtactatcagtggaacatgattgatcaattgaattccatagcggctgaaaaatgtgggattaagtagtgtattatacgcacaatgagttgaggcatgatgttcatttcaagttcatttcgccggcctctgccaccagatcaggcaatcaataggggcagcagatatcatatatcacctctctgcgggccggggagagagcaccataatctctcgcaaatttagagtgacagatttgtcaagatctgaagggcccctgaataaatgaaggcaaagagactcctccagccagtgacctgaggacaaagcttcagttcagcccctacacacacacacacacacacacacacacagacacagtgagccaagccacacacagacargcatatacacaaatctacacagaggcatgaggagagtcctgccacacatgcacacacataatgtgtgaacacacgctcacaaatacaccctctctgcccctacaataaccatatatgaagatatttgatgctttcctcagccctgagagtccggcttccccaaaaggtaggagggctccaggaagggagaatcaaacacaataggacacgcaaatagctacagggagtgaaatgaggatgatggcacatcctgaaaaaagaagtaggcacaggagaaacggggcatgtggcctcacagtcctcatgcaatcacacacagacacacacattctttcaggaagcttctcattctatttccacacaygcagacccttgtttatctggacgtttatatatgtacaagcgcgtagacacgcaatactcacacaaaagggaaaaataaatttaccacacttcaactttcaactcatatgttgatgcatacatcccgtaagactgaaatgattccagagccttatgcagaagaaaccacaaccaccaagttttgtgttcatgggaacaaataccattgaagctgcttctgtctgtcttcttcagatgtggtcctggtcttgatctctgtctctctctccctctctttctctctctccttctctctctctctctctctccttctctctctctctctctcacatacacayacacacacacacacacacacacacacacacacacactttctttgctttcccaccccctccagaatagatatggagggaagatgggaggtcacattaggaaagcaaaccccatgctcggtctgggaggccagcaagggaggatggctgcaggttgagttaatcaatatgtaatattttctatggtctcctgaatgatactgtatggtgttactgtatataatgcaatattgattatatcatatcgtataatcacctataaactgatatatataacattcccagaggaacaccctggggcctccggcatgggctggccccaggcccaaggctcctcagctggtcttgggctgagggaagcctggagtgaccaagctggtatggggtttgggggggaaaccccactttggggggctgcaaggtgtgggttcagagagaggccacagagcaggcacattgcctactgtacaccttgaaaactccaaggaaccgacgctgggaggcaaggataggggagggctgagaacgcctgaggaaaggggacatggagacaggattggcctgtagactcaggggagcaggcaccgstgtgataagactctgctccctctggagacttgcaggaggaaccaggtgaccaagaaactggctcctgtaggaggcttgagcctgggtytaggttggagacagasgccgagaaggcggccagggcatasaggcatccacasgggcccttctgtgggctctgcccaagcgggagctttgctgctctagcgacacctctttcctcccgcttggtttccctctggcctcagtcctggcccaacccaagcagagtgcctcagctctgcctcagagcccctcctccctcagggcgaagttgattacttcacccagtctccaggttacactcggcctcggaaatttgatggttttcaacccttggaattagtggaactgaaattcatctcggagccgagttcaattctccacaggctcagtaatgccagtctgagacacccagcttctttcttccccaggctggccctggcttgggggcagggggtggttcagggagacatgccccagggagctggctcctgggagccccctggctccacctctgcctaatccttcctgaccccacagtgtgaccgctccatctcttaccaggtcctcaggtccttctcttccttgggcttcctcagccagatctctgaggcagggccaccctctggtgtcagccccactggcccaggggctgagagtaaggggtcccataggggtgcagagctcckgggcccggaaccagatgcccacctctttgccctgcactgttcctgtgcctctgctggcctggcgctaacgccccgagtgtccatgtgttctccagatgtgtctgagggctcagtccccaatggagattcccagagtggtgtggacagtttgcggaagcacttgygagctgacaccttcacccagyagcagctggaagctttggatcgggtctttgagcgtccttcctaccctgacgtcttccaggcatcagagcacatcaaatcagaacaggtgaggagggagctttctgcttgcagaagtagaaaggagccrgcagagcaaggcctctcaaaaacttgttcactaaacaccacatgcatagccagcattgtatgtgttacacacgtgtgttctgtgtgtgtgcagtgtgaacaggctcacatgagacagtatggtatcgttaagacaaatcattatggtctgtatatggtaattagaaatgagttctgggtgcaagagyatggccttgggtaaatcatctctgttcagagcctcggtttccccatctatagaatgaagggcttggatgtagggtttgtcaagtcccttctagctccgcttttctgtggttcttgcatggagtactcaggaacatcctcttgctgtgtcccttgcccacaccccctcagggtcctacagaaagtctacgctagactggggagctctccttgcccagtgtcaggagagcctgcctgtgcctgcctcctgctccccaagccagcaattcaatggaaccctaggtaggctggcagcttcccacttacacccaacactttctgcagacactgagcagcccaggacacatagcatggggcacagcatgtaacacaccagcaaaacgcacaacgcagaaaccatctccgaacttttctatgtgctggtgtgcatgtgctcacactccaccatccacctgctcccctcacccacagcccatggtactgtgctcacacaccactgtccacctgctcccccacccacagcccacggtactgtgctcacacaccaccgcccacctgctccctcacccacagcccacggtactgtgctcacacaccaccgcccacctgttccctcacccacagcccacggtactgtgctcacacaccactgtccacctgctcccccgaccacagcccacggtactgtgctcacacaccaccgcccacctgctccctcacccacagcccacggtactcacagctagccccggcagccgcatggagccagtgggtgtgtgctgcccccagatcaccagctcagcatacccctagcatatgcctccacccacatacgctgggtggagcccccagcacacccgctcccacacaggggcacactcccatccctgctacacatgcagcccaggccaggcccacagtcacagcacaagacagcattgctgtgcttgcatgcatgcacacacgcacccacacatgcacgtcagtgcagccccacagcgttgaacgctgtagttccactcttaagactccaacagctcccagccactcgcctttctccccgcccgtccttttatcccataagctgtttgtcttcataaaacaaaaatcaaaagtctttttaaggtgccctgagccataaaccaacaaaggaggagctggccgaggcgggcggctcagtgcaccctccctgagtccccgcctgtattacaatgaataacctttatttactttcattagactattaaacaccagcacagtcatttttccccctgaaactcggagcagggcccataaagcaaatccgaagcctaattgagttcattttaatttckctccgatcacagcgaattactctggtgataaatcagggggcagcttcacccccagtagaaggcctaatttgcagctaattacaaaactgatttctacaggaagatcaatacgagaaggaattggaaatgacgaggcaatcccgtccagccatggaggggagggggtactctaggggggccaggaagcggaagggaaaaaaacagacccgaaagagcaggaaatcagttttaatttaacgtaatattaatcagagcaacttttcctgctttgtgcaggctcccggtctgcccagctctggggtctggcttggccgtggctgcaataaaaaggcaattacccgagtgtttcaggcaggacaccctttcagagtcaatgactggccccctcctacccttctgttagccatgtggactctccccctccccaatttcataccccagtgcacaggcagacagcgaggggcccatggggctgtcaytgtttgtttttaaaaaaggggcgcccatacccgatcagccagcagtgccaggctgaaggccccactaggcccttctcccagctactggctctgccagtcatgtcatggytccccctcctccccaaggctcctcgacatcccatgcctctcaacaagggtatccccactactacaccctacccgcaggggtgcttaggcaggagatgctacagaaacataaagggtgctggcattaagtgcccaaaatgtgtaaagggtgctgtgcctccggtttcaccaagtcaggtctactacccgyacaaaacttgccatcatccaccaagcccccgcatctcccctctgccccaccatctctttctaccccatctgggcgggctcccctgttcctcctccccatctgcacaccragccctttctctgtgcrtgcatcaatagagagctgtcacttttctctctcctcccaggggaaygagtactccctcccagccctgacccctgggcttgatgaagtcaagtcgagtctatctgcatccaccaaccctgagctgggcagcaacgtgtcaggcacacagacatacccmgttgtgactggtaagggggcttccaggagggtgggggcactgcgttcagtggagggtgcctcagcccatgccatctgaggcccagtgtgaggagcaggtcccccaccgtgatatttacagagagaacgaggcttctaaaaccagggtgcttcctgaacaggggtgtgcagatgtggggagaaaaaaactggggtcagggcatctgtgggcttcaacctggaaaggctgatgctaggaggggctgttgccagttcttcctcctgtccttcgcctctccctttgtctatttctcttccctctcccaagttgcccagaatcatgagcctcttgttaggatgtctgcagaaagcaaataagccaggctggtgagagtggagcatgggtacccagtgtccagcctccacacttgggtctccaaggctcctgggggacccgcttaccgctccctccaggcagcatgggtgatcatggctttgggcttgagggcrtggcacccagctctgtggagtttgagatgagtacaattattccagccttcctcctgcttcccagagaggtcagtgacaccaaggcttgatttcaaggccaggtaggatcaggcttggcccacaatcaaatgcagagctaggggcgccatggccaggagcccctacaaatgaagagcagcagggccagttagtttggaaggggaggtggagtccagggaaggccgcagagctccaggctgtggaatgcacgtgccactgcagaagggtttccaggccaggagactgcccaaatgggagagacacgcattgaggtgttattaaaattcacctaattattctggagacactaaagccaatgtgccrtttgttccttgggagacaggatgattgagaagggtctcggtggggattgggagacactgaggcgttacctgcagagcgaggcaagcggaggtggcctgcggacccagcagcagggctgcagagccagmggcaaaggcagggaacaggcaccgcccactctaggactgggccctggttctgcctgtgagctggtctgagtgcggctgcatttgagcctgagctgggctcagtggccacccagcctccacctgggggcttaggagagccctgtcagttttccyagcctctccctaaggggctgtactggtacaactgtttccagcctagatctttggctagggagtcagaggttgaattctagaagtgttggagacctggactgggctttcgggagtgacgaccttagctgggttagctgggccaggacacagcccatgaccaaatggccctcagcatgagccatccttcgcccagctgggaagctctctgacctgctaggtattctgacccaaggcagagagacggcccaggccaggccacctttctcctgacctgctcagaagtacagtggtcacttcccaaagatggccactccaggcactgttcaaagagaacccgggagacttctctaaccccatctgctgcccagcgctcaggccatagtctagaaggcaagggcttcctagggtggagctatggatcttcagggtagggctcctgccacaggagacccaggggctggtacagagaagtgcctccaccttgagcagcccccacccgcctcccccccatggccctggaacagtcccagctcagcctgggaacatctccggctgatccatctggatccaagtgtgagaaaagttcatttmagacccagcttgacattcccaggtggcaagttagcactaacatctcaatctgtatgcgacatttcaatcaagcgaggagtaacaaaagcagaaccattaacattcggagctgttcaccagtggtaatgacggggaaactcgctcagaaactggaaattaccaaaaagagacaagtgtgtggagaggtgggggagggaagatggggataggggtagggaatgatttttccacacttaggccaagatccactgtttggattaatagtgccattacccaagaaagagctgcagattatgctcattcttaaaatgtttttgctggcaattaaactgctgcagttattgatctttgttgattttatgtcctcctaatttgcataatctattaaagatgaatgatttatgatgtgtttattatggggacaaacagaatttgctagaggtactgtcaaggtgagccatggggcattgctcagagactccatatgccatctcagcagtgggtccagcatgttggccttcaggccaggatattgtgggtagtagtgagcagtgatgcaaggagaacagaaacaggagagtggactttgggtgagttcttctagaaagatactggcatctgtgagaactgggctccaggcagagctggagtgcgggagaggcccttagtgtatttgtggacactgacctcaaagagtctttaaaagcttattttcttggcaaatattaagggctttgstgggagaagagaaaaggaggctcttttaggtgggtaggtgattctggggaggtgtgtgctaaaggtaagggagctgttaggtcacccagtgcccatagcctggcttaggagtgccraggtgttcaaggagccctctttatcctccacgtctcaggcaccctgctcatcttcttccccaggactgacagctgcggctgmaaaccttaggggatgagggaatgccctagcccaacctgaaaagccagaccttattgagattcctgccacctcctggccctggaggctgatttcaaacttcaccagccacttgatgcagctattccacaaggtcaggactgagaggagagaggaacctagactattgtgtggaggggagagtggggcccagtgggccaggacacagctaatcacattgcaagcaagggtggctgccggaggctagggctcagccccatagcctcccctccccaccttccatcagggaacsgaggagagagactgattttgctgggtagtgtttgcaagttctgccgagattttaatttcactgcatcacaactcagcaagctgccaagtcaagctggttatttaaatttatcacccactttcccttccgccgctgggctgctctagctcagcggcatctcttctctccagcccacggctctaggctgctggtctggaacggagcctcgtctctcctaagtgataaagaaagagggaccagctacatgagagaatgggtcacgggcattctggccccaggctttttcaggttggctggctgtggctggtacctctcatcaccttcttgaccctccaaaggagcccagaggggctgccatccacctctcagtagtcccagggccctccgggtcagggcatctgcagtgaggactcgctccaactgcatgcaggaggcttcattccttaaagtctcccatccctggaagaaaagatagtccctgttctccatagcattctcaccttgaccccccctccccatgtctggccggggctccagtgacaaaggagcatgcagagacactggcagtgatgttgatctgggaggagaagatgagaacttactccaggattcccaaagtcactggggatgtttctgagcattagagagtcccttgacacagtgcaagtccaccccgaaggagagagcccagatgcaaggaacagtgctggagaagtcagagactgtgcagttccatgctctctagaaaagggttggccaatcttttggcttccctgggccactttggaaggagaagaaattacttaagtcacacataaaatacactaacactaagatagctgatgagctaaaaacaaaaacaaaaataaaatacctcataatgtttgatgaaagtttacgaatttgcactggaccacattcaaagctgtcctgagcagcacgtggcctgtgggctgtggattggacaggctcgctctagaagctagggaaagcaccagtccctggagccactgcacccacaggcttcactggcctctagtgggcattgctgccgcgcactggcagagccttgagcaagtgcagctctcaccgcccttgttttagtcacagagaggtaaaggaggaatgagattgatgtctgggacccaggcaggctacctcaccaaaacataactgaataaaatataacaacaaaaatgttaatacgcagcaaatctcactctttggtgccagaaatagaggggaactcaaagccagatcagtattggagaggccgctggcatcacactggagggagatgctgactgggagaggatggggttgtaacacaccagtcagggaatgtgactttgggaatcaggaagccagaactgagtatcatcctgcataaagcaaggaacagaacagggaccacactgtccgtgaaaggcaaacacatacactcgtctgagtagcccagggaaacaaggaagggggcagaatggaaggtcaccatgagacatggagacgccaagcctgatgccagatcagagtccaaatttataccatgagtatgttgcaggaaacccaagccaggaacttacataaaaatttgtacaggatagtaacccattctgaaacctcaccaggagcaatgacaaaccttctttgtagagacattctaaaatccagggcacatgggactcccacagggggaagaaaaaaccccaccactaatgatgagcttactgtaaaaaaaagtacacatctcatgtgaatacaaactttcaaaagggaaagttagtagaagcaataaacagaacagttaacatccccccaagacctgggaacaatagaataatccaaaagtgctataaactcagcatgtttaatattctaaaaaagatcaaaggggccgggcgcggtggctcacgcctgtaatcccagcactttgggaggccgaggcaggcggatcacgaggtcaggagatcaagaccatcctggctaacatggtgaaaccccgtctccactaaaaaaatatacaaaaaattagccgggcgtggtggcaggcgcctgtagtcccagctacttcggaggctgaggcaggaatatcacttgaacccagaaggcagagcttgcagtgagctgagatcgtgccactgcactctagcctgggcgacacagcgagacyccatctcaaaaaaaaaaaaaaaaaaaaaaagatcaaaggaagtatcagctgtatctttaycacagatccagatcccccagtcccttcccaccactgctcaccaaattgtcagataatggagatcaaaaagggcaaagaatgaggaccatacctatagattattgctttggggtccaggaggcatggaaagagctgagcctcaggcaactctgaaagtagagcctgttccaggcttgtccaggctcccagactgctaagcctcagcagaaaatcttatattttctttgagaaaatgtctgaacattagagagctagagatgggcacagtacctttctccccagtggggtgggggcaggtgggaagcctccgtagcttccccatcctggttgggggaaggtggttttattcaagagcttgggagaaatgtctcttaattgctgaagactgcagttttgaaggaagctgtaattaagatccaggaagasatgtggatgctgcccaagagggaagtgcccaaggcaggaagagggagcagaagaggctggtctcccagaagctggctgatttgagcagaggtaggggaggccagagaggcaaagttcacagctggacagcagcagggaccagtgtgagcagtgtggatgtagcttctgaaaagggttgccaactcagaagctcggcctcctggcccacatctgagatggtcagcaaagtggccttttagcagatagaggtgtggaccctgggaaacctcctcctcctactcagggcatcctgaggacctccaggaactgcctctttcctgtagttaacaacccccttccaatgcaactgcatttccctccataaaacaaacagcttagcccttggccagcccccgggggaggagagggcaataaagactgagaaatgtttctcaaggaggctgggagtctcctagtcttgtctgtcagctcaaagcccctgattagctagaggaatttagggcacagacatcatagttcctctccttgaaaggagagggctaagacaacttcagacgtgtggcaagtcagagatccctttactgtggaggccaaagcaagccagagggctgttcctcagtgctcacatgccctagacccttcctttaggctgtgagggtcccaagaaaagaggctagcctccttcaaacatccctgagtctgctggccacatccccaaggacctccagcccccaacctcagctctgatttaattatgggggcatttccatagcaatgagacattgacagatatgcggctgctctcggcctgcagcctagggagtcattggatcaggcctctttcccttcctcctttatccagtccactgatagaggtaaaggatatggaaaagaagaggccctaatccactgtcgggatcagagtcaggccatatttgaccagmataaaagctgtgccacctcaatctcaggtcccaatcccatgtccttgtctgtgcctaccggccaccctgtgctgctgggctgcccttcccaggagggtgccatggcagaagtaccctggctgagaatggggctgcagagggaggagcatcgtagggagggtgacaaaggtaggaagggtttgggstgtcttagcaaagacgtagttctggtgttttctacgctgagctcaaatttggcccttaaccttgggcctttcttcttacctcctcccttcatctcttccctctgtccgtgaggcccaaaaacctgaacatgccaaatggagtgcttattcctccaaggatggcctcacttgttcatcagagatcagagagagagagaaaggggccagtctgaatttgaatcaaaatattttctaagaaatcaatgatcttgctatcaagtgcataacaatagccaactcaggccaataaaggattgcccagttgagaatactggccactgctttcatgattcgtcaggttacgggacccttttggtttctgtagatgtcatttagatacttgatgtgtcccacaggggaattctccaaaaargagatctcccagcactaagctttttagtccgttatttggtactttttaagaagaaaatgttggctaagtaaaagtaaggtcagtcaacccaacattttttgaatgaccggaaatcctaaagactgctgtcccaatgaaacaggtatgtattggtaccaagggctcagaaatgtctcagtggcctcaaagccacctaggcaagacctgaaaacctgtttcccccagagggccggccayctccaaggtgacaggaagaccccccacttttttcccagggtagccagaatcccttccacctccacaattagctgtagcctcaggacaaacaagctagtgcttttgcaaccctgagctttgggagacaagctccgccactattgtcacttctgagagggctttgcatgccttcagcctgaatcctcccctcttctccccagtggtggtggcggctgggctggcaggcagggaaggaggaaatcctgcagggctcggagaacagcctaatgctgcagaggcttaagtggccgttttccttgggattagggtttcacttacacagagcgcctgaaaaacactgcgcttttggaaggattagagctgacaattcagtgctctcagagaacaaaataaagccagagaggaactgggaggcctggagtatcagaagactctgcaaacaggcttaacctctgcccacccagcatgagggtctctcatgctctgagcccatctttgagcctgggcccaacctcttgagtgccagtacctgcccaactccaatcttcatttgtgatttgctcatggagccagagaaggcaacacagggacgttgccttctggaaagaggactgggaagttgccaactgggaagaggactggaaatgtcttcccctctctctgagcctcagtttcctcctccgtaaaacaagggagttggactagaagatatccaagttccttctcagccctttgaaaatgtgattctccccaacattccctggtgttatcctaggatgctgaagctgcatttccatccatggtccagctgaattagaaggaaaccacctcctgtgaggccctgagccaacaggctacacagcccagaggagggcggggtgctgggagaagggatggaaacagcatgactggttgtgtccggccggttggctgtcaaggtgtagacctcactaagcccctgcagatctgggtaacatccctgcctaggacacaccagggattcaaggtggcagtgggagctgagatcaactggaagagcagccaccctgagttggaggcacagccccctctgctggaacctggagcaggcaagcctcaggtggggtatggggctgaggccagagcctggggctgtgggctgtcccatagtcccttctgccctagaggacaactcaaatcctgggaggatttggaagcttgggaaataagaaatgaaaggaaatatgtagatagttattttcctctccttttaaaacatcttgtgtggatttaaagtttgttactttagtgtaatagatatacgttgaattggtcataaggtgctcgtaattgttatagtaaataccaattatgcatttatatatttaggcagcaattacaaatttaataactgtgtatttttgtaagtattataaatgcctatgtcaaatgcaggcatagactgccagccttgaagaaatctaatgtcttcattttcgctaccttatgagaagcagacagaacttgaggatagggcagtaaaacaagagttatgttttctggccttagggtcctccgcagtgtcaartgggtagcaaaagtgctcattttcagagaaagatgctgaggaaaagcatctctgaactcctcgatagaacttttgctatataaatctatgtctaataagtctcatctgagccatcatgagcagcagtttctgcttctttcgtggcttcctttttatttccttgatcttctgaatgctgacattttccttgacttgagatgcaactccctgctacttcacatgttattttgctgtgctttgtatcatcctgtttattgatacaattcaagtagttgcaaacaaatcagtgtcttatgccaaagaacggggctctttcacttttttataaacagtgcttattaatctttaagccatattttttgagaatatgataaaagtcatgtaccatctacacagaaagatacagatatacaatgtccataacattttatgtatagatttatatagaccccttgaagtgatctatgggttcttgagggatcagttaaccccaatttaaaacccccactgtaaaaaagtggaagaaactgaaacacataagaaacaagaagtgacaagatgttctgttataggaaggattcacttagcatgatcccatattactttcctggaccaaacacctatctattttctgggtctgcactatttgagaacaatatcattccaggatcatttcccaagtatacagcctgttctgtaatccagtttctgccatctactagcagtgaaatctcagacgtaatatttggcccctctgagtttatttctcatctatagaatggggattaaaggccgggcgtcgtggctcaccctgttatcccagcactttgggaggccgaggtgggtggatcacctcaggtcaggagttcgagaccagcctggtcaacatggcaaaaccctgtctctactaaaaaatacaaaagttagctgggtgcagtggcaggcgcttgtaatcccagctactcgtgaggctgaggcaggagaatcacttgaacctgggaggcagaggttgcagtgagtggagattgcaccactgcactccagcctgggagacagagcaagactctgtctcaaaaamaaaaarggggggggagtttaaaaacatatcaatggctggtcccagtggctcacgcctgtaatcccagcactttgggaggctaagacaggcagagcacctgaggtcaggagttggagaccagcctggccaacatagtgaaaccccgtctctactaaaaaatataaaaattagccaggcatggtgacaggtgcctgtaatccctgctacttgggaggctgaggcaagataatcacttgaacccaggaagcagaggttgcagtgagccgagatcgtgccactgctctccagcctgggtgacgagagcgagactccgtcttaataaaaataaaaataaaaataaaaacatcaacatcatagggttgatatgaagattaaatgagataatacatcatataaaatgttaaggacaccgcccagcatatagaaggtgctcaatgaatgctaggtagtcctggcccaagtagaaacacagctctgaccttgaatcttagacctgatggtgaaagtagcacaaattacctgatgactacaatttttcaactttcttaataaagtctttcactttgcttttctctgtacttgtaaggggagctgcacttagattctccaaagcagttgatttgatctggcccatttggtaaggaatgtctgacgaaagtgcactgtctgatgcagttgtagtgattgctgtagaaattggctttagaatcttcagggacttctgcagttgaactgagaagacatcctcatcaagtacagtgctttgaacacttctggggactttaagattctccactaccactgtttcttgaagaccctctttgtttttcagaaaactctcacaggagattaatactccaccccatggagttttattatagacttttggcatcgggattttattctctgagtcctttttatccacagccatgacgatatgagactttgyttgtcagatgacttcttttycttttctttggctcttttggggagtatctggcttcgtgttattaaaaggcagtgtggtataaacatggcttcaaattttggctgtatcatttactagctgtgtagtcatgggaaaactgtgatgcatctttgtgccttcattgtctcacccttgaaacaaggaagttacctcatcatctggaaggctattcatctttaaaaactttgtaaccttggccaggcgcggtggcttatgcctgtaatcccagcacttttggaggccaaggcaggcagatcacttgaggtcaggagtttgagaccagcctggccaacatggtgaaaccctgtctctactaaaaatacaaaaattagacgggcatggtggcacacaactatagtcccagctacaggctaaggcatgagaatcacttgaacccaggaggcggaggttgcagtgagccgagatcgcaccactgcattccagcctgggcgatagagcgagacttcatctcaaaaaacgaaaaacaaaaaacaactttgtaaccttggaaagcaagtgtccaacatgaaatgcccatcttcttgtaataatatgtggggttttgtccatttgtaatttctgatgctgtttttatgttactggccattgtcattgagcaacaaaaatcctctactgctttctgttgggtggcacatattttataactgatgtattctgccacataactgttttctcctttttctgtgcttttgcttgtttgtataaaggaggtgctgtgctgttgtacagttttagagtctgtctgcactcatgtttttccatccatctatagtacagcaaggcccagtgctctgtcgattcttgcttgcacagattccattacccattcatattctttcactaaaagaggcttgctcaaagaatgctgctgggcaaatggtatgacagtcttagtaatttgaaaacttcctgcagtatgtgttttccattattgacaatggtgttccagaagaatatatggcaagagtttggtcaattttttctgctctttaagtgtcacctgtgtgctaatgaagcmattgagagtgctttgtatgcagtggccagcacctttgctggctcaggggtcctgaacagggtactcctttgtggagatactggtgttatagactccgcagcagcaggtgcacagctgtatgcagaacacgaggaagcttgcgtgctttttccttgtcttgggactcttctttcacgttttaaaaatttctacatggcactgcccaacttcagttttctaaatagaatttggcaatgtgcctttcaatcagctgttcagtgggtgactttcagcatgcaaaagttcctacctgagggaagttgccattttgcaagacagaaaggcagtagaaataaaactttccaataggactgcatccaggttagctggaaacatctttctagttatccagcctgtcttccttcctcctgaagtgaggtaggagattccgtgacaaaacyttagattataaggaattcatggtgacagattgtgggaatcataaaactgaaaaccagaattcagatgcatttaaattcctgtttattaagaaagaggcacaccccttttcctgctgctttgcagactttatgatgacagggaaggaggaattaggtttytatatctgttcagcttcaaaacttctgcgtcttccctaactcgatcctgtcctgggcctttctcttttttttgaccaataaatgccatattattaatctctctaggaattgattttgatattgctgtcattgtctacttcaggtccactccactgagagacagtcaggaggagtgtagctttcaatgacaacagaagtcaataaaagaaaacccacatcaaagcaaacacaaatcctttattctgtctctctaggagtcaaaagtgatctcttgtttggcagttctactctgcttgttctcgagttttaggaaatgaaagatattggctatattagacaggtatagaggaaagtcattctattgcataataaagtcacaatatatgagtccctcactgtaaacctcttatcagcctataaaaaatcataatctattgtttaaattgttttttaaagaaaaagcatattctaatatttacattttatccaagcctttacttctttaatgagaccaatatacatgaaacaataaaaaaaatgataacccatcaggaattggctgttaagtgcaatagattgatggacgattaatcaacaagtgtttattgagcatctaccacgttctcaactatgcaggataaagcagaagacagggtcctgccctcaggttgcttatgatctgtttgaagaagcaagctatgatatgaaacatcagggctcatatattatgaaatataatggcatggtaaaccatgcagcacagatgctgtagaagtttggaagagagaaacttccctgatgggtagaatggtagggattttaaggcttcagtggggaaggagaggaaaaccgtaaggaagaagaaaaggtcatggcaaaagcatagggggttcacatcacacaagccatgaaaacagtcaaactaaaccaggagaggtgataatcttaagttggatggagagagtaccttagcagctttaaaagccacagagtttcatttcaaactatagactacagggaatcagtaatagtttttacaagggaagtggtgtgatgaaagcaaagtttcatgaggactagccaagcagccacatttaggacagacaggaggggaagaatgtggagtcagggaatgcaagcaaaaatattctgtggcaaaaagaaggtgcttagaagctgagctaggaaggtagtggaagaaatggaaattgagcagatgtaacagacattgccaaggagaattgacaatacttggtgactgacttcatctagaatgggaggaagaaggctatgtcaagaaggactccaaagtttttggtcttatgatattcaagatcataagaaccgacagagggaagatgaatctgtttttattccagttaggtttgaggtaacagagggacagccaaggaaaatgttcagcagggtactagaaatgcaaaaacctgagctgtagctytgtatagctagggaaggatraatcactcagacgtgtcaaggtagggatgaggaaactcatacagctctggaatgcagggaggtgaggccatcttcaaagggagagtagcaaagagagagagagatgctttggaatagccattgggagaataatgactatggcccagctgatgaaaagaaagtgaacgggcccaggtatgcatagttctgttactttctccagccatgccttgccttcccaaggatagacagaggcattagagtaatagagtggcattggctagtgaggagaataaggggaatctggaggggttaagggggttccaggaggtccaggagaggataaagagattatggcagaggggagaaagcaaattattattagagatcasagcatgctaaattgcaaagggaggtggtggccccttcatagccatggaggatgcaggcaaggtagggagcccagtcatgtgcagctgtgtcccagaggacatgtcggtggaccaggggtagcaccctcatcttgactcgctttgtctcccaccctccaggctttagctgatagagccctccagggacagaagtccagcagctggtgggggagcagattttgctcattggaactttatctggtccacttgcacttttggctcaaagctcctgattcacttcagggtggttttctatcatgtaaatgccataaacactaacagcaaaatagcccactggctgcccccctgctctccacacctgccaggaccaggacctgcagctccacttggagaggacaaggaatagccatcagtccctgtaggggtgatggtggggtgtcctccaagcctgaaggaaagatggggtgttagggagaggaaagataagcaagatgatagaggtccatttggctgctggagagaccacagctgaatatcttgctgagaaggaggagtaaaaccaggtcatctccctcccatctccatctgggtttggaatgcacagagacacaggcaaaggcagatacacacacacacacacacacacacacacacacacacacacacacaaatacacagagacacaaagagctacacaaaacagagatgcgtacacacagctgatcatagacatttagcttagacacatgcaaaggcacactcagatggcgcattcaggtgcacagtggcacacatacccctgcacgtctgcacagagctctttcctctccaagagtttcctctccgtgcagtaccctggtgtgagtagaggcaggcccctttcttccaggcctcaccccttcccctttgtgtttttccaggtcgtgacatggcgagcaccactctgcctggttacccccctcacgtgccccccactggccagggaagctaccccacctccaccctggcaggaatggtgcctggtaggtgacaatgctgcagctgcctaatctaggtggggggaactaaattgtgggtgagctgctgaatggtctgtagtctgaggctggggtrgggggagacacaacgtcccctccctgcaaaccactgctattctgtccctctctctccttagaggctgcagttggtccctcatcctccctcatgagcaagccggggaggaagcttgcagaagtgcccccttgtgtgcaacccactgtatgtcatggcccctccacagcgcccacccacccaagtctgtgcccgaggagcactcagcctcagctccaccctcagtgcccagcccaccccagccagctgacactgcttggaagagcctgccctggtttccatggaaacttggagccaagaaccatttccaggggcatgtcagtcactcagacaaagccaccctggtccacaccaagacacaagggaagaccaatgttgagaaccaaccccaaccccaacccagagacagtagggagctagtccctaagaggaatggaggtcaggctgcggcgggaagcagggagagtcgctgcagtgagacaggctagaacacccctatacctcttcagaggcacccagccttccattgcttccctggggctctgacccatccctaatcagaggagttgggtttgggttgtttgaatcagagagacagaggctgtatttaaggtctggtgactgcagctggaggttgtactatacctaacccctaaccccagattgggagcagggtcttgaagccaaagagagttgaagttcctatgtgcacaaacaccaaaacactcttgtcttaaggagggttagactcactcagccagcaactcactccctctggccgccctctatgtggcctttccctgaagttcaactctcattggtatggggaatggggaggatagaagagagtggttggccccatccatccagggacatttaggtataaccctgggtaagcagagcttggggtaggggcagcggcaaagagggagattgctgctgggtcttatggactaggggctgaagggagttagaggtgtgggtaaagggattcctgcccagatttaggggaaggaaagtagaagccttgttgggaggcaaggagattttarggagaaactcccagcagtgagcaggtgggggctggaggaggttttaaagaggtggggtgagggaagagtggggaggtgggggcagggagtctgcagggaggtggggaagaggggagccgcagagagctcgtgrtgtcgaggggggagtcgttaaacagaatctagtgctgatgaggaaattacacttgtttcattagcgatggggaaggagatagctcagttcctcttggtcacagttgagctcagaagctcattatcctgctgcacgcatgctttccctcctcgtcaataaacaggctttccagtggctgcatcccccacccccaccccagctccctctcagagaggggccccttctcctctacttaacccgcggttagggatcactgtaaacagtctggggtcatcacacaggagaaagggcgagggggaaacctggaggcctggcctttctcccgcagagggagggaggtagcttccgacgacggctcccaacccacgggccctccgctcaccgctagcggaccagcgggcagtccacctgcgccgcctccatcccctgccgcgtagcccacgcatccaacctcttgagggaaaggcgggagggcggtgtctcccaaaagagctcccacctcttgtgttggcactgcacattgatgccattcttaggactttctgggagaaaaatgtcccgaaggcctttcttcgccaccgccccccactcccatttccacccattaggggccatgcctcctagaaccggagtggcatctataaaggccctggcccccagcgcgacagggtggacgcgccccaatacaaacccttcgtgggtggccgcgagcgcctccgctgggaagccctgggcgggcaccggcccacaggtcccgcccgtgggtgtgcgagcgcgtcggtgcctcccgcctccccgggctctctccacgcggacgcggtgatcgccccacctccgcccggcccgcccgccacggccattaccctgcccgcgacacctgcgcctgagacccggcgggaggagcgggcggagaagccaccggccggactcgtggggtccgcccyggcttgcaggcgtctgatccccactccccgaccctcccgcagggagcgagttctccggcaacccgtacagccacccccagtacacggcctacaacgaggcttggagattcagcaaccccgccttactaagtgagtacgccacctggctggccggcggctcagcgcggccgcgcggcttctgggcacggtcccactcscggcgacccgacctctggggacccggccgggccagggggacaggcttgttagtgcagcactgaggcccggggacccctcgaggacgcccgcacctcctgccctcccgtgccctccctggtcgctcgaaggctctgcgcckccctcgccctcggatcccctggagggtgcgcagccgggcgtcaccagatcgggtccctctcatgccccgtgaacgcaactattctccggggcaactggctccactgcccagccaaggtctcccagtccggatcccgctggaccccagccaggggaggtcttttctgtgcttttctttccttttttgttctcctgtttgtcctctcacccagcccattcttctcctgtgttaacttccaggttccccttattattatagtgccgccccccggggctccgcccctgccgctgctgccgctgcctatgaccgccactagttaccgcggggaccacatcaagcttcaggccgacagcttcggcctccacatcgtccccgtctgaccccaccccggagggagggaggaccgacgcgacgcgatgcctcccggccaccgccccagcctcaccccatcccacgacccccgcaacccttcacatcacccccctcgaaggtcggacaggacgggtggagccgygggcgggaccctcaggcccgggcccgccgcccccagccccgcctgccgcccctccccgcctgcctggactgcgcggcgccgtgagggggattcggcccagctcgtcccggcctccaccaagccagccccgaagcccgccagccaccctgccggactcgggcgcgacctgctggcgcgcgccggatgtttctgtgacacacaatcagcgcggaccgcagcgcggcccagccccgggcacccgcctcggacgctcgggcgccaggaggcttcgctggaggggctgggccaaggagattaagaagaaaacgactttctgcaggaggaagagcccgctgccgaatccctgggaaaaattcttttcccccagtgccagccggactgccctcgccttccgggtgtgccctgtcccagaagatggaatgggggtgtgggggtccggctctaggaacgggctttgggggcgtcaggtctttccaaggttgggacccaaggatcggggggcccagcagcccgcaccgatcgagccggactctcggctcttcactgctcctcctggcctgcctagttccccagggcccggcacctcctgctgcgagacccggctctcagccctgccttgcccctacctcagcgtctcttccacctgctggcctcccagtttcccctcctgccagtccttcgcctgtcccttgacgccctgcatcctcctccctgactcgcagccccatcggacgctctcccgggaccgccgcaggaccagtttccatagactgcggactggggtcttcctccagcagttacttgatgccccctcccccgacacagactctcaatctgccggtggtaagaaccggttctgagctggcgtctgagctgctgcggggtggaagtggggggctgcccactccactcctcccatcccctcccagcctcctcctccggcaggaactgaacagaaccacaaaaagtctacatttatttaatatgatggtctttgcaaaaaggaacaaaacaacacaaaagcccaccaggctgctgctttgtggaaagacggtgtgtgtcgtgtgaaggcgaaacccggtgtacataacccctccccctccgccccgccccgcccggccccgtagagtccctgtcgcccgccggccctgcctgtagatacgccccgctgtctgtgctgtgagagtcgccgctcgctgggggggaagggggggacacagctacacgcccattaaagcacagcacgtcctgggggaggggggcattttttatgttacaaaaaaaaattacgaaagaaaagaaatctctwtgcaaaatgacgaacatggtcctgtggactcctctggcctgttttgttggctctttctctgtaattccgtgttttcgctttttcctccctgcccctctctccctctgcccctctctcctctccgcttctctccccctctgtctctgtctctctccgtctctgtcgctcttgtctgtctgtctctgctctttcctcggcctctctccccagacctggcccggccgccctgtctccgcaggctagatccgaggtggcagctccagcccccgggctcgccccctcgcgggcgtgccccgcgcgccccgggcggccgaaggccgggccgccccgtcccgccccgtagttgctctttcggtagtggcgatgcgccctgcatgtctcctcacccgtggatcgtgacgactcgaaataacagaaacaaagtcaataaagtgaaaataaataaaaatccttgaacaaatccgaaaaggcttggagtcctcgcccagatctctctcccctgcgagccctttttatttgagaaggaaaaagagaaaagagaatcgtttaagggaacccggcgcccagccaggctccagtggcccgaacggggcggcgagggcggcgagggcgccgaggtccggcccatcccagtcctgtggggctggccgggcagagaccccggacccaggcccaggcctaacctgctaaatgtccccggacggttctggtctcctcggccactttcagtgcgtcggttcgttttgattctttttcttttgtgcacataagaaataaataataataataaataaagaataaaattttgtatgtcactccccatggctccaagtttgtctctccctgtctctgagatgggcctcccctccattggtcgatccccaaaagccccttcaatratcctcccaactacactcccgctgccacctccaactcctttgccgagacccccttggcggcagctgaaccacggcgaaggccgagactagcctgccctttagtagccaccctcccccacgcaccccggccctggggacaggaagttcttactctccgaaacttcagaataactcctagttaggcgcctatactaggccaactctgtggtcctaccagtacacccgcacccagatttagggtgctggctctcagaacccgaagtctgaggccttctccacgtgggtggaggggtggtcgtctgtcctatctcctccctccgttccctatccagtgcagttgcgcgtgggcgcagcagcaattttatccccgaagtctgcaatgaaacgcgaagaccgcagacgcttgccgcaagtttcctcgctctgcgtttacttctgggcccgaagaatgccccgcagaggccctaggagctggttcatgggacttcacgcgcctccagtgtcttgcggagccccagccccagcaagcagcggctgaaattggtgcgccttgtgctgtggtctgggtgtgtcccggagagggcgcgcaggcgcctatgtctgtcgcggggcggtcggcgggttcctgcataggtatggctttctgttcatctatgtgttcgtctgtatgtccctggatgggtctgggggtgtggtagtaggagaattgtttttttagccatccttgctgttcttgtgtccaggtgtccagtgaaagatctgtatgtctccacctctctgttctctgtttaggagaggttgcagggggaagggggatgtggtgactgtccaggattgttctgctgcatcagagatacttgggaggatcgcctttccatcccttcagcagcttcccagctctggtcctcccacactcttgtcaacacaaagggcccagcttccacctggaaactttccttctgtgcccctgkgacaccttcccagcccagcttctaccacagcttcctcccacttgaaaggctcttgaatctctgagctgccagggatgcaagcaggacattggggcagactaagaagtgaccttcccctttggcttgggacagtgtctcctagacacctccttcccatcagaatcccagagacctttctttcaagtcaatctgcccaggctcacccatatcacggcaccctctaggggatgtacaggaccccaacaaatcagcaaaccttcaataaagtccattcctttccccctccctctgcacctgtgtctcccgattcttcatctcagcaaatggcagttgcacccttcaccctgcctggtgttggctgtcttgaccgccagcctcctagaagagtggccttcaaacttctttgatcatacaccctctcagccaaaagaattctgaatgtgtactcccaatataagtatatttactgatttacaaattccataaatatactactgggctaacatattatgaatcgtgtaaaagataaaatattaaaagaacgagtttggaatatgtgaaaatagaagttctaatgttctcacacccaaatggattatcttgcactccctggaagacgtgcaccccactttggagatcctggtcataacccatgaaaacccagcatggcagaactcctgactattgcctggtgcccagcragtacgtttctggaagttgccagggcactggcttgggccagggcagcccagtgaacactgccctcatcatatatagtgggtaccagacccccagtgcctggctttgcctccaggtccaccccagacagggagccttgccctgcccactccatcaatttgggagccatggcctcttatgtgggtctcactggaacctcttctgttctatttctggtctctctcagactgaactggatggacagcaaacattccactgtttacagtaagcacctctgcccagaagcttcatatggtgtccctcctagaatactgatttcagcttggaatcagcctgagggcccgaaaacatgatctatcatccttggccagttgcaaccccactcacccaccccagaaacaaagaaggcctgttctcctgcttcagtttgttttctccagaagtcattttgactctgctggctctgtccccatcctacctctacagagttcccagctgaggcacaccaagtatgacagttagaaacagatgaacagaagtgtcctgggttgagggaagagcaggagcaaagacaggaagtcatgaaaatacaccagatacaatcaatgtggctggagtatcaggtgccaggggaggggggggggttgtggagggaggtggcaggagatgaagctacaaatgtaattagaacactgtcwtgggcattccaaattgtacctgtcacacacacagctcctttaaggaagctgccctacccacagctacttcctgcccatgtagacaatgtatttgtaccagtgactctgttactggtacagaattggactggaacacaagtccacgctgaaccaatcaatcctcctctttcggaaaacaaaactaggaagtatggaaagaaagaggccattaaccacgaaaagaaaagcccaaaggaggccctgagggcatcccctagtcctcctcacctcagtaaaggatagctccatttgtatcactcaagcccaaaaacccacatcttccctgactcctcctgtcttttgcatcccacgtttgattcatcagcaaaaccagacaattctacctttaaaatctatccagagcatgacctcttccaactacctgtactggactatccaggatcaagccactgtggtccttcacctgagcttgcaaacagaaagttctaattggccttcctgcttccatctttgcctccctccagcagccagaatggtcccccaaaatgtatggcaattcatgtccctcctctgcccagaaaccttcggtggctccccatctctctcagcgtcaaagtcaaaatccctccccatcgccaccaccatcttaacccacctcccatcacctccctaggctcaccgtgctctctgagcctgatggtaggagccctcaatcatgtgaagaggaggatgacccacagagagagtagctgagtcgctaatgaggaggactgagagggcacatgttcctgcctctcctgcagcacagaggattgagactcaaaytgcactgaacacctcaaataactcccaccattccttggggtgactctctgttccttacaactcaaagcacctctcacagtccccrtggggggcatcgagagtgcatccctccttccattgggaagctgcccctctaccatcctgtgtagttctcgtgggactgtcaatcacagtgccccatcagctcctaccacatatttggtcttgtgacgctcctctggccaatgaggaccycatgtccctggccacagcacagagataaaaagttagaaacaatgggagttctctcaggagcgttgttatggagtcctggaagagaggaggggtttttggcctgtgagctgcaatgatgagggcttgagactccacgtggagaatgtctgcccaagggtgaagtcatgctcagagtcaaacagagaccagcagagctgagaggtagaggaaaaaaacaaaaaacaaaacaaaacaaaaaaaaacaccaactctggtactatcattcaaacctctggagccagctaggcccgaagcaagccccatttttggatttccaggatcaaaattcaataccttcttctttcttggcttaaacaaatttgttgggtctgtcatttgcaaccaaaaaagttctgatttaagcagttctggragacacacatgctctgttaagagctttggattttttatttttttcccctagaggcaacgagagctatggaaagtttttgagcagagagaatagcttaataagtcacatttttggaagagtgctctatgcataatgaagaagtggaatacaaggagagacagtgggtgcagggagaactgtaagagaccactaccatggttgaggcaagagatgatgggaagctatgctaatgattagattagctcctgaaggaaactgacaaggaagcatgacacagttttatttttaggtaaaaaagaaagacaagtgcagatcagaagacctgctgcatgagaaagagaaaataagaatctttctcacatttgcttatatacacataaacagaaagataaaatggtgtctctgagctgggaactatgtggacggggacagggcaagtatagtcatttctgtgactataattttttaaaamctaattttgactttaatgaaaaataaaatttcaattaagaaatgtaaagagacaaccaggtccttgacacatataagcataatgaataagccaaatttggcttttcttgatgttctattatgactgagggaaaggccatttgatttggagaatagcagatacctggtgacctccaagctagtgttttctgcagatggaagtggggggtggctaaaatgtaaggatgtagaaaggggcagagtgtaactgattcttttcaaatatttggaaaggaggagaacaggagaggggcctggggattgtatggtctgtgagctcaagagaaggttctttttggccgagggctgtgtggacaagcctgtggttgaggcagagggtggaaggcagggatgtgaagagaagctgctcatgatggacatgargggcctgaaagaatggggtggaggcatgtggggaggggtggagaggaaccagaaaattctgcttgggagaggaaggtcttgaagggacagggtccactagatttgctcagaaagattgtaggagccacagctgctgtctgctgagagtgaggggagcaggactggatcctgccttgagcgggtagagaattttggaagaatctcttctggggattcagaaggaagttgtgagggcagcaggagcacatggccaacagcagcagggagagctcacactgtggggaggtcctgggctccatccttcaagacacagaagccaggcccccaagattacactgcccccactcccaaactccatccacatctcccttctccaaggggcctccctagctgactggaccccggcagaaccttgagcccatgctcacagtctgatctctgtgactgttcatcctcaagtgcccaggtgtagcctcagctgccttatgtgagaaagccaccacctgcaccccaaagaattcccaccatgcaacctagaggcagaagaaaaaccatgtgtgtac

SEQ ID NO: 9983 - DNA, 21359 bp, Homo sapiens
ctataagtcattcttatattgtttctaacattcctattttataattaaaatgtaaggaaccataaactctctataaaatgctatatcatcacagacagtccctcctttggaacttttcctgctaaacaaatagaatgagaacattgaaggatactgtaacatttattgtagtgaaaatcaaaaacatacatgaccaaaaaaatgtgactagtgaattaatatagtctctgcataagatggactatcatgcagccataaacaattatgttttcaaataaaactgaagacatgagaaaagactcatgataataatgttagttaaaaaatgatgatggggctggccatggtggctcacacctgcaatcccagcactttgggagcccaaggcagtaggatcgcttgaggccaggagtttgaaatcagcctgggcaacacagtgagaccccgtctctacaaaaaataaaaacaatagctgggtrtggtggtgcatgcctctagtcccagctatttgtggggctgaggcgggaggatcacttgagcccaggaggtcaaggctgcagtgagctatgatcacaccattgcactgcagcctggacaacaaagtgagaccctgcctcaaaaaaaataaaaaagatgataaaaaatgcatacatgatataacaccaaattagatgaaaaaattatatacggaagacttaaaaaatagggcaaaatataaactggttttcttaaggtggcggtattacaaatgattactttttattttatacttacctacatttctacaatgttatacaatgaacattcattacttctgtaatgtaattagaaaacaaccttagtaatgtcatttaaaaaaaaacaaaagaatgcatgcctgtagtcccaactactcaggaggccgagactagagggtctcttgagtccrggaatttgaggttacagtgagctatgatcaagccactgcactccagcctgggtgacagagcaagactctgtctctaaaataaatttaaaaagaaagaaagaaagaaggggataaagtttttttcaccatatggggttgagtctcaagatccttgaagtcggcctccttcactccagacatggtttggtaatagtctaggttctgctgcatttccatgtgctcaggattgcccacgaagaaggtgtgtgctgcagcaacagctttctccaacttgttgatctaagaatgaagcatgagaaggtggataatgctcacatccaawctctgaacgtttgtgtccacatgagcagtccacataaacaggaaatccctgcctccctgagccctccactcagcgtgcccagcccctgccagccccaggaagcacacctattgcaggaactacccacgacagattaggagcatagtgccctgggcagatttgtagctctttcccaagtcagatttaggggttccccagattacaggaagtagcaatgttccattttaaaacaaaggtcatattgtatggggagtgctgtgaaagactgactgcccacataatatgttttcatgctgggtgcggtggctcaggtctgtaatcccagcatttttagaggccgaggcaggtggatcacttgagctcaggagttcaagaccagtctgggcaacatgktgaaaccctgtctttacgaaaaatacaaaaattacatggtactatatgcctgtagtcccagctactctgcaggctgaggtgggaggacgcttgggcctgggargcagaggttgcagtgagccaagatggtgccacagcactccagcttgggtgacacagcaggaccctgactcaaaaaaaaaaaaatacatatatatatttcatgaatcaaatgtaatgcctgagctgaagaaattctgtggcttcaaggatttaggggtagagaaaaaagagcagctaacagactatgcctaagaattttcctagaaaaaaatttttttttgcayaaaataaaatgaagaatttttgagacatttagggaaaaggtggatggctaaaaattctaaggtcctttactaagtccagacatagtattttctgactcaaagctcagggctcatgaggttcaaacaaatagctytaagaaatctgaggggrtggtcgggggcggtagctcatgcctgtaatcccagcactttgggaggccgaagggggcagatctcttgaggtcaggagtttgagaccagcctggccaacatggtgaaaccccgtctctactaaaaatacaaaaattagctgggcgttgtggcgcacacccgtaatcccagcttcttgggaggctgaagcaggagaatcgcttgaacccgggaggcggaggttacagcgagccgagatcacagcaccatactccagcctgggtgacagagcgagactcttgtctcaaaaaaaaaaaaaawaaaaaaaaaaaaagaaatccaaggggggagaaataggctacagaccacaatgcccacagcaatggactccagcatgtcaaagtaacacaggtttcatatatagaatccaaccaaataaatcactgatgatctagtaattaactatgtggacactggtatcaaagagaccagccgtggccaggcacgggggttcacgcctataatcccagcactttgggaggctgaggcgggcggatcatgaggtcaggagtttgagaccagcggatcatgaggtcaggagtttgagaccaacaatagctgggcgtggtggcatgtgcctgtaatcccagctactcaggaggctgaggcaggagaatcgcttgaacccaggaggcggaggttgcagtgagccgagatcgcaccattgcactctagcttgggcaacaagagcgaaactccgtctcaaaagaaaagagggctgggtgcggtggctcacgcctgtaatcccgcactttgggaggccgaggcaggtggatcacaaggtcaggagatccagaccatcctggccaatatggagaaaccccatctctactaaaaatacaaaaattagccggatgtgatggcacgtgcctgtaatcccagctactcgggaggctgaggtaggggagtcacttgaaccagaaaaccagaagtcagaggttgcagtaagccaaggtcgccactgcactccagcctggcaacagcgagactccatctcaaaaaaaaaaaaaaaaaaaaagaaagaaagaaaagagacaggccagcatcacatctgggcttaatgactcactgactggctgggcagtagacaagatacttaaagtttactttctaawctcagtttccctaatctatcatctggagatagcattctctagctatctcctagcattgttgagagttcaacgagataatatgcagcctgtaatacatggtgctgggcacagattaagtgctcaataaattttaggtggtatgattaatatgctaagaaaacttattttcttatcattggtactagtaaaggcacactaaaggagtcagccctggttaggtgacccaaggtaaataactccccatctctgtacctcagtttctttaactgtaaaattagaaattttttcaggtctgtccctttcatggaattactctagctcttgtgtctttcagcgctgctcctgcytttctctgttctccctcatgtcctcactcctctctccacccccagccttctttactctctaagcactgaggtacttaacctcctctcttgtggacaaatgtctgcctcctaatcaagtgccaccactttctccttcttccaaggctcattcaccatggcttccagaataagcgttttaaaacccaaatctgaggatggctccctgcagtccgcagaattctcttccaaatctggcctcactgacttttctagccgcctctcctactactccccacacacatctcgacattgcaatcacaagagttcattttttttcctgaatacatcatgctttggttctacttttctctctatctggaggagccttytttcctctccccctggcaatacttagggcaggcttcaatattacctcttctttgaagtctaatttctctgagataaagctagagtctccctcctttgtgctcccgcagccctaagtatatgcccttgcagtagcccttactacagtaactcttaacagcaaagcaagacaaagcaaagacgttagtcgagcatttaattacttgtacaagaactggaatgcagtaggtatgcaatacatgtttgtcaaatagttttagaaagtgctatgatgaagcgacataaccaaagacataacgcaattattttgatttcaagtccagcgctcttccgagtaactaggaaaaatgaggggaactgtgtaggcagaatgctgtggaggggtggaaatctgaggtccccaagagtctctaagtgtctctttagatcgaatcgaaggtcttttaaacaacagatataccagatataatgcacaactctttctccccccacccccaatacagtgggactaataacagcatctacctgacaagatattatgaagattagggcaaatgcgttaataaatgcaaactgcttaaaatagtgcctggaagtatgtgctggctatcatcatcatcatcatcgtcaccatcaccaccaccaaacaagcctggaacgctccaagcccaagtgtacacttggacacatggcactctggcattccgaaaaatactcattttctttgtaaacctggcagactagccagagggtccccccccssscmccacacacacacagaaagggccaggcagcccctgctggcgacgtggcaacctcacatcctgaaagagagctgctgaatcaaacagcaggaaaagcaccactggaaaaccaaccggaagggagatattgtagaccgctactagcttctcactcggacacttacaatgacatcagaatgggagacccaaactgccgctttaattccttccaggagatttcccagggaacaaaatggccatgagttttgcttggcctgtgccctaaccccaggctggacctttggggttagcatctgcccatgcgaactgggcgaggaaggtctcctgccagggagcagctctccccggctccgaggagagctccccagccaggaggccactttcccctccctgcggacacttccccgatcccccaagctcctcaggtcccctgcaacactcctctccccagaaggaccccggccgcctggttccaggcaggtctgcaccttgaagtaggcgacctgcaggtagttgtaggggctccgcttgcggaactccagctccatctcttcgctgagcgagtgggcggccggcggcccgaggcagcggcgcaggcaggcagcgcgacgcagaaggcccccgaagaagctcaggtcgcgcagggcggcggcgcccgaggcctgggccgggctgggggaccagtcggggtccagctcccacgggaagtcggcggcacactgggtgcggcagcgcaggcgaagggcgcggagggctgcccgggagcgcagcgcccgttccatgctcaggaccaccccgggccagtccccgcgcgcgtaggctgcggtcccctcggcgaagagcagatcaggcgtcaccatgccccatcctgcctcggactcgacctcggcttgggaggcagcggccacgacagccagcagtgtggtcagcagcttcaacgcgcgyaccgccatcgctccctcagacctaacggaaccgccagccacccgccaccaagrccggagtcctacccccggcgaaggcccgcccccgggcgaagccccaccttccaagccgggcggcgcatgcccacgaggcttgcaccgcctcttttcctttcagtcagccckgatcccccsaccggccctcagcgaatcccggcgcgtcagccggagccccgcctccgagctcaggccttgctcagtcgawctgacgcccagtagacaagaaagacggaagctccgcccacgcgcctttatgcgcaggctcttcctactcgcacagcccagggagtggggaggataaggcgctgtcatggaggacgccgcmgcgccggggcggaccgagggggtccttgaaaggcaaggagcgccgccagctgcaggccagggaggtatgcggggcgggagtcagcagggggaagtcagctcccgcgaggcarccggtctcggggctccgcgggaggccgacggcgggagctcacggctygtgttcctgggtgtgtgtcgcaggagccctggtggagctcaccccgacccccggcggcctggccctggtgagcccctaccacacccaccgggccggggaccccttagacctcgtggcgctcgcagagcaggtgcagaaggtgaggaggcgcggccggggcagcgaataaccatcttcgttcacgttgtactctgcgtctttcggctcagacctcactaccacctatggtgggggtggcatttgctcttgtctccattttacagacgagtaaagccgactgtcattgtgagtcggtggcctgattcgaatgaccttctgggaccaaaggttcctctaactgcaacttgagtgcccataatcttccttcgtgggaaggtttacacaacactttagtgttcattatttcatttgcaccttaggacagccttgtgaggtaggcagtacagagttattcttcccatttgacacaaagaaaagttcttcgggaagtttcaaggtccgcttattttaagctgcttcccataagatctttgttacctgagagtttaaacatcttctagcagggcaaggactccaagtttagtcctcattaaacacagtattcccaagcccagtgtttatatatggatggccaaaataagtcaaataaggaggaaatgtgaaataatggaaaaaacactggaagtttggacacatgagtattaatcccacttttgatactaacttgcagtgcgacttaaggcagattacttctctctggacctcaactattttatctgtgaagtgaaaggtttgaagtagtagagctccaagatctaaagttttgtcattrttcaatgaaaaaccagattccttcttatctcttatcaagacttccagttgtacaccctcttcagtgtccacagatggagggtcctgctgttttaaagattatcatggccccttatccctgtatacactatcagatttggccttgattatgttccagggtctttgctttgcccaaaattatttaatgtgctcaaattccctcacatctctttttttttcaatgatcctagaaatccttcgaatccttttttttttwaaattaagaaaaattcagatacgcagaaagctcctttaattcaaaacttggctttcttctttttgaagagctggggagcaaagtgcaacttttatttattaagagaatatgcatctagttaatcagattactcttattgggagggaggttggcagggacagaatcttgtgcacacaacrtattcatgtgctattgaatgactatcgtgtttattacgatggcctgaacagatggaagaaagaacacagtttttgtctttcatcctataatcttatgaaatacagaggatgcattattatgctgcctctgtttccccaatacaatctgtatttgagaagctgaagaaaaaaaaaacttyagagacaaacaaattgaatcaaacatattaactatctaaaatgtactttttggccaggtgccgtggctcacacttgtaatcccagcactttgggaggccaaggtgggtggatcatttgaagtcaggagttcgagaccagtctggccaacatggtgaaaccccgtctctactaaaaggtgtggtgactcatgcctgtagtctcagctactcgggaggctgaggcatgagaatcgcttgagcccaggagacagaggttgcagtgagccgagatcgcaccactgtactccagaattggtgacagagtgagactcttaaaaaaaaacaaaaaaatgaggctgggtgtggtggctcacgcctgtaatcttagcactttgggaggctaaggcgggaggattgcctgagctcaggagttggagaccarcctgggcracatgtgaaaccctgtctctactaaaatacaaaaaattagccgggcatggtggtgtgtgcctgtagtccgaagctactctggaggctgaggcgggagaactgcttgaacctgggaggcagaggttgcagtgagctgagatcacaccactgcactccagcctgggtgacagagcaagtctaaaaagaaaaaaaaatggtggtgggctgggtgcagtggctcacgcttgtaatccgagcactttgggaggccaaggcgggtggatcacgagatcaggaattcaagaccagcctggccaacatagtgaaaccctgtctctactaaaaatacaaaaaattagccgggcatggtggcagacgcccgtaattccagctactcatgaggctgaggccggagaatcacttgaacctgggaggcagatgttgcagtgagtggagattgtgccacttcactccagcctgggtgacaaagtaagactccgtctcaaaaaaaaaagtacttttttagcaagactgacccaggtattggtgtgtgttcagaaagctcaggaggcctggtattaaggcatgaattttggaatctgacctgtgttcagatcctttgctgtttattatctgtgaaaccttggacaggttgcctcatgtctgtgagtcttaattgctaaaatgagaaagtgaggttatcatctccagcgtcataaaggtgttgtgagaagtaaatgagatgaatgtaaagggcctcagagtagttgaggccagggttagtgcttagtagttgtaggtactcttcccttcctttcttttttatgaggctcttttgtttttaagttgttcgtgaaatattttgcattttttttgtttgtttcttttttcctttttttggacctcagactaatccatattttgcattttatattaactcttcaaaatataaattcaaattttgtttatgagatttattgctaacaccttaagaaaagggagggttattataaggccacccctaatctggaactaccttagctctagaaatacctactctctccttggccatatatggctcctcctttctttctttcttttttttttttttgagatggagtttcgctcttgttgcccaggctggagtgcaatggcgccatcttggctcacagcaacctctgcctaccgagttcaagcaattctcctgcctcagcctcccaagtagctgggattatagacatgtgccgccatgcctggctaattttgtatttttagtagagacagggtttctccatgttggtcaggctggtctcaaacgcccgacctcaggtgatccatccgctacggcctcccaaagtgctgggattacaggtgtgagccaccacacctgggctttcattcttggaacaaaatgcaaattcttttaccatgggctacaagactgcacaatctggtctctgctctctttttaaaccctgttctacacattgcccatcactaactactcttcagctgcactggcctcaaatgcctgcaaacttttttttttccagcttttttcatggtcggtcctctcctttcatttagacccaagtcaaatgttatatccttggtgaggccttcttgtctgaagaagaccgtaccctaccccatccaaatgacagtattattaaattgaattcaaatacctctaggctacatatactttccaattccccaccactccctattattaaacttcataaaaatgaagtagcttttttacttaactcatttgttatctttaacctgcttctacgacataattgtggttatttccttcataacagtgcattgttatgagtacatataatattagctttaatcatctttactttttggtatctattactcactggagctgtgctttaggtagccactagcaacattatgtctgttaagcacttgtgttacgttgttagtgtggctgaggaaccgaattttgtattttatttgattttaattaatttgaatttaaaaaacctgataattacttcaattattggaactcaagtatattggaacaatttgagtatgtgaatcaactttttcacatataaattttattaagtttaaatacagatgaagtatttctgatgaaaatttagcatccaaattgagatgtgctgtgagtacaaaataaacactatattttgaaggcttaatatcaaatgcaaaatatggattagactgagaaggaccaaaaaaagaaacaaaaacaaacaaaaaatgcaaaatatttcattaacaacttacaaatagtgattacatgttaaaatgaaaatgtttttgatatattaggttaagtaaaatgtattagctgagcacggtggctcatgcctgtaatcccagtactttgggaggctgaggcaggcgtatcacttgaggccaggagttcgaggccagcctggcaaacatggcaaaaccccatctctactaaaaatacaaaaattagcggggcatggtgaygcatgcctgtggtcctagctactcaggaggctgaggtgcgagatttgcttgaacccgggaggcggaggttgcagtgagcctctgcaccactgcattccagcctcygtgacagagcgagactctgcctcaaaaaaaaaaaaaaaaagtattgttagaattaatttactattaacgtggctaccagaaaatttaaaattttatatgcaacttgcctcatatttctgttgaacggtattagacttgacttgcgatcttgacaaaggcagggacttctctttcctgtttgccagtacacccagtgcctagtgtggtgtctgacacatagtagctgcctaatatacatctgtgggacagataaatgactcagtttacttgtgtggtttctgttcactcataacactggtttatacctgaactttgccttaagactcctcaactaaccagcaaattctctttaatatttcttagttcaggttctagtttaatctcctcatttctttaccttaattgtgtataatcagcttttcttaaaagtaaggtggaagtttttgacagaattctattgcctgagtggtaatccttcccagcacatgaatttgtcacattagtctctcctagctttgagaatttgatctattttaagaaatgtcctggctgggctcagtggctcacacctgtcatcttagacctttgggaggccgaggtgggcggatcacctgaggtcagaagttcgagaccagcctggacaacatggtgaaaccctgcctctactaaaaatacaaaaattagctgggcatggtggcgggcacctgtaatcccagctactcaggaggctgacattagagaattacttgactccaggaggcagaagttgcagtgagccaagattgcgccattgcactgcagcctggacaataagaacgaaaactgtctgaaaaaaaaaaaatgtccattgccttcagttgcactttgtggcacgtgacaggtagtcttgtgtgtacattataactctgtttcaggtccacatcataatgcagtcttttaaaatacattttaagtaataattagaaatgcacatataagttaacatttaagtagttgtgatgtaaataactgaggaaatggtcagattaacgcatactttctcagttcagggggtgtgggggtcacacagaaaaacccgaatactttctatgtgtatctagatttctaccttagcagatgataagggccagatcacaagtgtcttttaattatttaaaatccatccctgatttcacaagtgtttaaacatgagaaaatggagacctgagaaatgtgtggtgtttgttaggtaaagagcaggaggaaaaatggattggttggaggagaggatatattcagtatatttggtagcaggagagagaaagagagaaggcatgctggagaaccaaagaagttcagtgtaactgcagttcatagcgaaggggtggaaagctatgggaaatagaagagagcacttaactctgtggcgtggagtcatgtcagggtggccttctcatgacagtgctatctgagtggggcctcggatgagtgggaggctatggggcagtggcaagaatgggaaaaatattttaggcagaagcaaaatattaacataaccctgggatcaagataagaacatcatagaagtcttttcctctttcaacccacagtttagttttttctcacctgtaggctgatgaattcatccgagcaaatgccaccaacaagctgacagtcatagctgagcaaatccaacatttgcaagaacaagccaggaaggtaaggaatgactgttagacaggctttcattttctttatttagttctcaggattggctgaacttgtttataatcrttgtgactttttatgtctttaatacctcctagaaatgtagaggtgttgagtaaaatagaaggaataagcttaagaggttaagtataagtttttgtttgtctgtttgtttgtttttgagacagaggtttgctcttgttgcccaggctggagtgcagtggcatggtctcagctcactgcagcctctgcctcccgggttcaagcgattctcctgtctcagcctcccaagtagctgggattacaggtgcccgccaccacaccctgctaacttttgtatttttagtagagatggggttttgccatgttggccaggcctgtcttgaactcctgacctcaggtgatctgcctgcctcagcctcccttgttttgttttttccaggagaaggtttcatgaggtaaagcatttaacaggggattatgttttcatttataaaagaaatgtacttagcacagaaaaataggaaagaagcttaaaaattacccagggtcattaatgctcaacattttgaaatatctttttttttgagatagggtatcactgtatcacacaggctggactgcagtggtgtagtctcagctcactgcaacctctgccccctgggctcaagtgatcctctagcctcagcctcccaagtagttgggagtacaggcatatgccaccacacctggctaattttttgtatttttagtagagacagggttttgccatgttgcccaagctggtctcctgaactcaagtgatccacctgccatggccttccaaagtgctaggattacaggcatgaatcactgtgcctggcttgaaatataatttttctaaaggcatttttacagcatagcagcatagtctaatttttgtttcttcagaataatctggatctcagaagtgattcattgctatgggggagcaagatcctaagcactgaatggtttccaaattttaattgggatgatcaccaaatgtgggtgcctgttatctccaatacctaatttgttacatatctgtgattcataggtactggaagatgctcacagagatgccaacctgcaccatgtagcttgtaatatagtgaaaaaacctggcaacatttactatctctataaacgggagagtggtcagcagtatttttccatcatttctccaaaggtaagaacatacattgtttgcccaaaaatctactccagcctctgagaaattcttggtatatgtgtgaaaatgtagacatgtggattggtatatggtttcttagaaaattgggggtgatgtgagcccagacatgactctaaaaaatatacctgtgcttaaattatttcactcattttcttcattaagggagggatctgatgtgtaaggtaactgcgttccaaaggttgttctgactagtatgaagtgaaaagccaaaaaagagattgtggcatgattaggaaatgagctcagtttgtttacaacccaygctgatgggaactgcctcctttgccttctctaggaatgggggacaagttgtccayatgacttccttggtgcctrcaaactacagcatgacttgtcctggactccgtatgaggacattgagaagcaagatgctaaaatcagcatgatggacaygttgctaagccagtcagtggccctgcctccgtgcactgaacccaacttccagggactgactcactgagagtgggctttgacaaacagctctcacaggacctggctgtcaacctccttgttgcccccactgttgccttgagaattgaagacatgtaggtgactcacaaacttcttggaaagagaccctgtgtgaatgtaaatgctgtcattatgacttttaattgggatgggaataatcattgagacagagtcactgtctttcgggatcctctttggaccacagatacccaagtcagtcagtttcagagtattggccagtgtactttccttcttcctctccatcacttcttcccttaagttaaagtgttagagaagaccttcttcccataaaaaggttggtggatcgttttccagagagaactgttttcagtcttttatatatatatatatatatatawaactggtagtatttaacattggggttgaggctgtctcacagttggtgcaactccagtttaaaattcatctgggaacgagaatgttgagtaatggagggtgatttaaaaaacaacarcaacaacaaaaaaaaaaacacttggcttggctggaccagagagtgtgtgattctgggatttctgtgctgttgatgaggtttgtcttgccccttttgctctctctgccttgctagagtgacagaatctgaggcagcaaaggccaggtttggggagagtcaactttgaaactcacaaattttagacttggaagagacattggatgctgccactaatcattatagagtccactgtgtagtctcccaagttggaaatcccaggctcagccacctgcagcagaacaaacccatttaaatggctacttaacactgtggaagagagtaaggcagtagagtgagaagcaagaaaaacagccaaattgttgactgtgagttaactcagattgaaatccattttgaccagaattattcaagaacttaacagggttttggcaaaattactgtagttcttattctgactaggctcttgtaggactctaccttctttcctatctgtttggtggaattagctaagtttatggattatttcgcatggctataatctattgcaatatgctgtaaaaggagggagagatgtgtacttgaactgacarttggccaaatttctctctgggaatgatgttcctgatgctgatctgtttggtaataccctccccgggccgccccccgattcatggtctttcctcataaactgcatttcttgtgagctgtaagaggtctacctaaggcctagcacaggatggggctagaatctaacaaactcactccgatgatacttggttgctcggttcacatgggaatgctctttggactcagctgcagaggtcttttgctcaggtgctgcagagccggatggaagagacattagtggtagagtagtggattctgactacagaaagtttcccaggttttcagaaggttctgacctgcatgatgatgacacattttgaataggtgctttattagttacagataaacaaattactgcaaacttaatggtttaaagcaacacctatttatttcagagcttacaggttaggagttcaggcaccatttcattgagtcctctgcttcacagtttctctgaaaccctggaaggctgaaatcaagttattggtcagggctgttcttatctgaaggcctgagtggggaaggatctgcttccaagctcacttaaattgttagcagaatttcttttctttcctttctttttttttgagacagagtctcgctgtattgccaggcctgagtacagtggctcaatctcagcttaccgcaacctccgcctcctggttcaagtgattctcctgcctcagcctcctcagtagctgagattacaggcgcacgccaccatgcccagctaatttttttatttttagtagagacagggtttcaccatgttggccaggagggtctctatctcttgacctcatgatccacctgcctcagcctcccacagtgctggcgtttgagccaccatacctggcctgttggcagaatttcaattccacaagggttgctggcttccggggttccactagctgactgttggctggaggttgccctcacttccttgccacacgagcctctataacatggcagctttcttaagcaaagtaaacaaggattagagtctgctagccagatggaagttacagtctcatgtagtctgatcacagaagtgacatttcatcacctttgccgtaatcttttggttggaagcaagtcactaggctagcccatattcaagggagggagttatacaaaggcatgtataccagaaggcagacatcattgaatcattgaacagatcctagaatctatctgccacagtgctcagttgagaagaagaaaggaaaattctaggtaaaaaaggcaatattactaagtggttaagtgtgatgatgtcaaagtcacagatctgcacttgactgtcaactctgacaagacagcctcccagctggcatccctgcttccccctctgtcccctctccaatccattctgcatgcagtcatcagcttgatcatttgaaaatgccaaatctccctcactcttgacatttcctaacctaaagagtgggagagtagtgattgaaaagagagaaactgccttctgttcagtaagatgtactccctgcactgaccaccaaggggtgtcattgctctttcctggttaagccagttaccacacttgggaagggctagtggcaatgtgaggtgatttggggcacctcagaatgggaaactaggacccagtgattatatacagtaatcacttttcatttacccatccatctgttcacctgataatttcattagtgttaagtgccttctaggttccaggttctggtgaataatggagctgaataagaaatcacaatttccagggagctcacagtatagtagggaaggaaacaagttaacaattacaagatgctctaagaaggggtgtgatagaggtacgcatggaatactatggagctccggggaggggttccttactgagcttggagaatttgggaagacacttggaggagctgatgcctgcttggtgttgaaaaccatacaagttagaactttctggaggctccaattgccctttcataggaagtttgtcttttgggggttggggtagggttcatttttggatggagtttatttgtgaatgaagaaagtgacaaccatttaagccatatcaaccaaagcagtcctggcaatgaggaggggtggagtgagatatgtcctggctagaaaatccttgtgtttaaaagctaggagatagttgaagacagggaggaaaaaacattccagacaaaaaataacatggaagggacattgaccagaattgacacgacatttggggaatcgcagccagttaaacaggagaatatggactggggaatatgagagaagaactaatggaaggatttggggaggctggtaatattggcagcagagtttgggtagagggaagacaggagattccatccctaatcaaggcaagggatgatgggagtctgaattaagcagtagtagaatgagagggcctgtatttcaccaattacaaggtgtacttcccccccccccccccccacattttggtgtctgtcaaacttggacacttctaaaagtcaatggcatgtcacagtttaagtggcattttttctttcttagagctacataaaagaatcataacaagctgggcgcagtggctcacgcctgtaatcccagcactttgggcggctgaggcgggcggatcacgaggtcaggagattgagaccattctggctaacatagtgaaatcctgtctctactaaaaatacaaaaaattagccgggcgtggtggcgggcgcctgtaatcccagctactcgggaggctgaggcaggagaatgtcgtgaacctgggaggcgaagcttgcagtgagccgagattgcaccactgcactccaacttgggcaacagagcaagactccatctcaaaaaaaaaaaaaaaagaatcataacatagcatcttacatttgatgaagcatggcacattgaaagtacaatcgattgccatcttgttaataaaatgtcagagggattagaggaaagactcttagatgatgcttgaatttctggcttgagtgtctgcattgaatagtggggatcccctcaacaaaattttcaggaggaggaggatatccctgttattttccagaataatcagtgatactctgtgatattgataatctaccttgttggcccttaccaarttactgggtgtgagtaacagctgactgtagctccctttctctaccctagtgctctggaaggaggaaaggagagctggcttgtatcttactttctcaagttatsagtccacaaacatgaagagtattagtgttacagatacaaagatgataactactgtcttatgagcctttattctgctaagtgtatccattatctcttttaatcttcacayaacccaccatcaatgaggtatatrgtattcttatgttacacagcaggaacatctcagagattctgaaactggcccgtggttatacagatgggaagtggtagaggtcagattcagacacagtcctgtttgagtctgaccataaccttaatcctgtttgggccaattaagacagtcgtaaaagatctmagtatagagctataaagaagttaaatcacaaaagtgataaagtaagtttttttttgtttgtttgtttttttgagacagtctcactgtgttactcaggctggagagcagtagctcagtcatagcccactgcagccttgaactcctgggctcaagcgatcctcctgccttagcctcccaagtagccaggactacagatatacaccaacatgtccagctaattaaacatttttttttttgtagagatgaagactcaccatgttgcccaggctagtcccaaattcctggcctcaagcagaataagatgtttatatgagatactattggagtagttcacttgagcatttagtgataggtatgtagaggatgtatatcaaggtatagagaagtaacttatttaaggtcatacaacctataaacaattgagctcatatctctggcattaaagcctggatatagaacccccatcagaagatagggttcatttgttcctttaaggagctggagcttgggaggaaggagctacaatgtgcctggaaaaatttcatttctgtagtcttaaacagcatttgattcagtggagcagtctgtacttgaaagcttttttcttcattttgatttgtaatattatcatctactgcttttctctacttcactgactgtaccttttctgtgtcctgctcctcctcttcctgacatctacattctgaggccaagtctatggccccctcctctttatctctgctaagtggtctaatccattccccaggctttaaatgctgtccacgcgctgctgactcgcatacatatctccagccctcatcagtccccaagtttcatgcacacttgtttgtccaacagccttatttgatatctctacttgacttgtagtcattacaaatttaacgtgtccaaatctaaactcytgagttcatccccaaaacctgtttcaccaccaggcctctctctttccatcagcacctgtctcacactgttgtggcagccacaacaagaatgacctaagtcattcttgatttctcttgttctccccataccagtcagcaagtcccagctctgccttcaaaatgtatcccaaatgtgactgcttctcttcacctcacccctttcccccttagtccaagccaccaacatgttcagcctggacaatgcagtgatctcctaacttgcctccctgcttccacagaggctgtcagcagcatcttttaaaactacaaggccaggcacggtggctcatgcctgtaatcccagcactttgggagggtgaagcgggcggatcacgaggtcaggagatcgagaccatcctggctaacacggtgaaaccccgtctctactaaaaatacagaaaattagctgggcgtggtggcgggtgcctgtagtcccagctactcgggaggctgagggaggagaatggcgtgaacccgggaggcggagcttacagtgagcagagatcgygccactgcactccagcctgggccacagagcgagactccgtctcaaaacaaacaaacaaactacaagccagatcacaacacttctgttaaaaaaaaaaatcccagaatttctcatttcttccctagattctatgtgatctgccactctcaggactcagcatgttcctgctttgctgaccttgctgttcttcccacacaccaagctcattgccgctcatttacatttgctgtctcatctgcttggagcattgcctccagggtctttgcaggtttgtgtcttctcatcctttasgtccctgctgaaataccacttccctgattaccctatcagaaataccaacccttctcacattaaagtggttctgattctgctttgttttccacagcatttagcacaaccagaaatgatttatgttttgcttctgtttataagttctctgattataagttctgtgaggacagagactgtctttgtcttgtttactgctgtctcgagcatctaaaatagtgcctggcgcatgataaacactcttaataatgaataagtgggccaggcatggtagcttatgcctgtaatcccagcactttgggaggccaaggcaggcagatcacttgaggtcaggagttcaagaccagcctggccaccagggtgaaacccccatctctactaaaaatataaaaatcagttgagtgtggtggcgggcacctgtaatcccagctactcagggggctgaggcctgagaattgcttgaacctgggaggcggaggttgcagtgagccgagattgtgccactgcactgcagcctgggcgacagagtgagactccacttcaaaaaaaaaaaaaaaaaaaagaaagaaaaaaagaataaatcaatggatggacatctgcagctctgcacctatatcctgtgaaggatccaagtcaatgcagttaatagaaatataatgtgagccacatgtgtgatctaaatttttccagtagctacatcaaaaagtaaaaagtgaaattaactttaagaatacattttatcaccaggtgcagtggctcatgcctataatctcagcactttgggactctgaggcaggaggatcgcttgagcctaagag

SEQ ID NO: 9984 - DNA, 32729 bp, Homo sapiens
aaggtagaaatctagatacacatagaaagtattcgggtttttctgtgtgacccccacaccccctgaactgagaaagtatgcgttaatctgaccatttcctcagttatttacatcacaactacttaaatgttaacttatatgtgcatttctaattattacttaaaatgtattttaaaagactgcattatgatgtggacctgaaacagagttataatgtacacacaagactacctgtcacgtgccacaaagtgcaactgaaggcaatggacattttttttttttcagacagttttcgttcttattgtccaggctgcagtgcaatggcgcaatcttggctcactgcaacttctgcctcctggagtcaagtaattctctaatgtcagcctcctgagtagctgggattacaggtgcccgccaccatgcccagctaatttttgtatttttagtagaggcagggtttcaccatgttgtccaggctggtctcgaacttctgacctcaggtgatccgcccacctcggcctcccaaaggtctaagatgacaggtgtgagccactgagcccagccaggacatttcttaaaatagatcaaattctcaaagctaggagagactaatgtgacaaattcatgtgctgggaaggattaccactcaggcaatagaattctgtcaaaaacttccaccttacttttaagaaaagctgattatacacaattaaggtaaagaaatgaggagattaaactagaacctgaactaagaaatattaaagagaatttgctggttagttgaggagtcttaaggcaaagttcaggtataaaccagtgttatgagtgaacagaaaccacacaagtaaactgagtcatttatctgtcccacagatgtatattaggcagctactatgtgtcagacaccacactaggcactgggtgtactggcaaacaggaaagagaagtccctgcctttgtcaagatcgcaagtcaagtctaataccgttcaacagaaatatgaggcaagttgcatataaaattttaaattttctggtagccacgttaatagtaaattaattctaacaatactttttttttttttttttgaggcagagtctcgctctgtcacrgaggctggaatgcagtggtgcagaggctcactgcaacctccgcctcccgggttcaagcaaatctcgcacctcagcctcctgagtagctaggaccacaggcatgcrtcaccatgccccgctaatttttgtatttttagtagagatggggttttgccatgtttgccaggctggcctcgaactcctggcctcaagtgatacgcctgcctcagcctcccaaagtactgggattacaggcatgagccaccgtgctcagctaatacattttacttaacctaatatatcaaaaacattttcattttaacatgtaatcactatttgtaagttgttaatgaaatattttgcattttttgtttgtttttgtttctttttttggtccttctcagtctaatccatattttgcatttgatattaagccttcaaaatatagtgtttattttgtactcacagcacatctcaatttggatgctaaattttcatcagaaatacttcatctgtatttaaacttaataaaatttatatgtgaaaaagttgattcacatactcaaattgttccaatatacttgagttccaataattgaagtaattatcaggttttttaaattcaaattaattaaaatcaaataaaatacaaaattcggttcctcagccacactaacaacgtaacacaagtgcttaacagacataatgttgctagtggctacctaaagcacagctccagtgagtaatagataccaaaaagtaaagatgattaaagctaatattatatgtactcataacaatgcactgttatgaaggaaataaccacaattatgtcgtagaagcaggttaaagataacaaatgagttaagtaaaaaagctacttcatttttatgaagtttaataatagggagtggtggggaattggaaagtatatgtagcctagaggtatttgaattcaatttaataatactgtcatttggatggggtagggtacggtcttcttcagacaagaaggcctcaccaaggatataacatttgacttgggtctaaatgaaaggagaggaccgaccatgaaaaaagctggaaaaaaaaaagtttgcaggcatttgaggccagtgcagctgaagagtagttagtgatgggcaatgtgtagaacagggtttaaaaagagagcagagaccagattgtgcagtcttgtagcccatggtaaaagaatttgcattttgttccaagaatgaaagcccaggtgtggtggctcacacctgtaatcccagcactttgggaggccgtagcggatggatcacctgaggtcgggcgtttgagaccagcctgaccaacatggagaaaccctgtctctactaaaaatacaaaattagccaggcatggcggcacatgtctataatcccagctacttgggaggctgaggcaggagaattgcttgaactcggtaggcagaggttgctgtgagccaagatggcgccattgcactccagcctgggcaacaagagcgaaactccatctcaaaaaaaaaaaaaagaaagaaagaaaggaggagccatatatggccaaggagagagtaggtatttctagagctaaggtagttccagattaggggtggccttataataaccctcccttttcttaaggtgttagcaataaatctcataaacaaaatttgaatttatattttgaagagttaatataaaatgcaaaatatggattagtctgaggtccaaaaaaaggaaaaaagaaacaaacaaaaaaaatgcaaaatatttcacgaacaacttaaaaacaaaagagcctcataaaaaagaaaggaagggaagagtacctacaactactaagcactaaccctggcctcaactactctgaggccctttacattcatctcatttacttctcacaacacctttatgacgctggagatgataacctcactttctcattttagcaattaagactcacagacatgaggcaacctgtccaaggtttcacagataataaacagcaaaggatctgaacacaggtcagattccaaaattcatgccttaataccaggcctcctgagctttctgaacacacaccaatacctgggtcagtcttgctaaaaaagtacttttttttttgagacggagtcttactttgtcacccaggctggagtgaagtggcacaatctccactcactgcaacatctgcctcccaggttcaagtgattctccggcctcagcctcatgagtagctggaattacgggcgtctgccaccatgcccggctaattttttgtatttttagtagagacagggtttcactatgttggccaggctggtcttgaattcctgatctcgtgatccacccgccttggcctcccaaagtgctcggattacaagcgtgagccactgcacccagcccaccaccatttttttttctttttagacttgctctgtcacccaggctggagtgcagtggtgtgatctcagctcactgcaacctctgcctcccaggttcaagcagttctcccgcctcagcctccagagtagcttcggactacaggcacacaccaccatgcccggctaattttttgtattttagtagagacagggtttcacatgtygcccaggytggtctccaactcctgagctcaggcaatcctcccgccttagcctcccaaagtgctaagattacaggcgtgagccaccacacccagcctcatttttttgtttttttttaagagtctcactctgtcaccaattctggagtacagtggtgcgatctcggctcactgcaacctctgtctcctgggctcaagcgattctcatgcctcagcctcccgagtagctgagactacaggcatgagtcaccacaccttttagtagagacggggtttcaccatgttggccagactggtctcgaactcctgacttcaaatgatccacccaccttggcctcccaaagtgctgggattacaagtgtgagccacggcacctggccaaaaagtacattttagatagttaatatgtttgattcaatttgtttgtctctraagttttttttttcttcagcttctcaaatacagattgtattggggaaacagaggcagcataataatgcatcctctgtatttcataagattataggatgaaagacaaaaactgtgttctttcttccatctgttcaggccatcgtaataaacacgatagtcattcaatagcacatgaataygttgtgtgcacaagattctgtccctgccaacctccctcccaataagagtaatctgattaactagatgcatattctcttaataaataaaagttgcactttgctccccagctcttcaaaaagaagaaagccaagttttgaattaaaggagctttctgcgtatctgaatttttcttaatttwaaaaaaaaaaggattcgaaggatttctaggatcattgaaaaaaaaagagatgtgagggaatttgagcacattaaataattttgggcaaagcaaagaccctggaacataatcaaggccaaatctgatagtgtatacagggataaggggccatgataatctttaaaacagcaggaccctccatctgtggacactgaagagggtgtacaactggaagtcttgataagagataagaaggaatctggtttttcattgaayaatgacaaaactttagatcttggagctctactacttcaaacctttcacttcacagataaaatagttgaggtccagagagaagtaatctgccttaagtcgcactgcaagttagtatcaaaagtgggattaatactcatgtgtccaaacttccagtgttttttccattatttcacatttcctccttatttgacttattttggccatccatatataaacactgggcttgggaatactgtgtttaatgaggactaaacttggagtccttgccctgctagaagatgtttaaactctcaggtaacaaagatcttatgggaagcagcttaaaataagcggaccttgaaacttcccgaagaacttttctttgtgtcaaatgggaagaataactctgtactgcctacctcacaaggctgtcctaaggtgcaaatgaaataatgaacactaaagtgttgtgtaaaccttcccacgaaggaagattatgggcactcaagttgcagttagaggaacctttggtcccagaaggtcattcgaatcaggccaccgactcacaatgacagtcggctttactcgtctgtaaaatggagacaagagcaaatgccacccccaccataggtggtagtgaggtctgagccgaaagacgcagagtacaacgtgaacgaagatggttattcgctgccccggccgcgcctcctcaccttctgcacctgctctgcgagcgccacgaggtctaaggggtccccggcccggtgggtgtggtaggggctcaccagggccaggccgccgggggtcggggtgagctccaccagggctcctgcgacacacacccaggaacacragccgtgagctcccgccgtcggcctcccgcggagccccgagaccggytgcctcgcgggagctgacttccccctgctgactcccgccccgcatacctccctggcctgcagctggcggcgctccttgcctttcaaggaccccctcggtccgccccggcgckgcggcgtcctccatgacagcgccttatcctccccactccctgggctgtgcgagtaggaagagcctgcgcataaaggcgcgtgggcggagcttccgtctttcttgtctactgggcgtcagwtcgactgagcaaggcctgagctcggaggcggggctccggctgacgcgccgggattcgctgagggccggtsgggggatcmgggctgactgaaaggaaaagaggcggtgcaagcctcgtgggcatgcgccgcccggcttggaaggtggggcttcgcccgggggcgggccttcgccgggggtaggactccggycttggtggcgggtggctggcggttccgttaggtctgagggagcgatggcggtrcgcgcgttgaagctgctgaccacactgctggctgtcgtggccgctgcctcccaagccgaggtcgagtccgaggcaggatggggcatggtgacgcctgatctgctcttcgccgaggggaccgcagcctacgcgcgcggggactggcccggggtggtcctgagcatggaacgggcgctgcgctcccgggcagccctccgcgcccttcgcctgcgctgccgcacccagtgtgccgccgacttcccgtgggagctggaccccgactggtcccccagcccggcccaggcctcgggcgccgccgccctgcgcgacctgagcttcttcgggggccttctgcgtcgcgctgcctgcctgcgccgctgcctcgggccgccggccgcccactcgctcagcgaagagatggagctggagttccgcaagcggagcccctacaactacctgcaggtcgcctacttcaaggtgcagacctgcctggaaccaggcggccggggtccttctggggagaggagtgttgcaggggacctgaggagcttgggggatcggggaagtgtccgcagggaggggaaagtggcctcctggctggggagctctcctcggagccggggagagctgctccctggcaggagaccttcctcgcccagttcgcatgggcagatgctaaccccaaaggtccagcctggggttagggcacaggccaagcaaaactcatggccattttgttccctgggaaatctcctggaaggaattaaagcggcagtttgggtctcccattctgatgtcattgtaagtgtccgagtgagaagctagtagcggtctacaatatctcccttccggttggttttccagtggtgcttttcctgctgtttgattcagcagctctctttcaggatgtgaggttgccacgtcgccagcaggggctgcctggccctttctgtgtgtgtgtggkgsssggggggggaccctctggctagtctgccaggtttacaaagaaaatgagtatttttcggaatgccagagtgccatgtgtccaagtgtacacttgggcttggagcgttccaggcttgtttggtggtggtgatggtgacgatgatgatgatgatgatagccagcacatacttccaggcactattttaagcagtttgcatttattaacgcatttgccctaatcttcataatatcttgtcaggtagatgctgttattagtcccactgtattgggggtggggggagaaagagttgtgcattatatctggtatatctgttgtttaaaagaccttcgattcgatctaaagagacacttagagactcttggggacctcagatttccacccctccacagcattctgcctacacagttcccctcatttttcctagttactcggaagagcgctggacttgaaatcaaaataattgcgttatgtctttggttatgtcgcttcatcatagcactttctaaaactatttgacaaacatgtattgcatacctactgcattccagttcttgtacaagtaattaaatgctcgactaacgtctttgctttgtcttgctttgctgttaagagttactgtagtaagggctactgcaagggcatatacttagggctgcgggagcacaaaggagggagactctagctttatctcagagaaattagacttcaaagaagaggtaatattgaagcctgccctaagtattgccagggggagaggaaaraaggctcctccagatagagagaaaagtagaaccaaagcatgatgtattcaggaaaaaaaatgaactcttgtgattgcaatgtcgagatgtgtgtggggagtagtaggagaggcggctagaaaagtcagtgaggccagatttggaagagaattctgcggactgcagggagccatcctcagatttgggttttaaaacgcttattctggaagccatggtgaatgagccttggaagaaggagaaagtggtggcacttgattaggaggcagacatttgtccacaagagaggaggttaagtacctcagtgcttagagagtaaagaaggctgggggtggagagaggagtgaggacatgagggagaacagagaaargcaggagcagcgctgaaagacacaagagctagagtaattccatgaaagggacagacctgaaaaaatttctaattttacagttaaagaaactgaggtacagagatggggagttatttaccttgggtcacctaaccagggctgactcctttagtgtgcctttactagtaccaatgataagaaaataagttttcttagcatattaatcataccacctaaaatttattgagcacttaatctgtgcccagcaccatgtattacaggctgcatattatctcgttgaactctcaacaatgctaggagatagctagagaatgctatctccagatgatagattagggaaactgagwttagaaagtaaactttaagtatcttgtctactgcccagccagtcagtgagtcattaagcccagatgtgatgctggcctgtctcttttctttctttctttttttttttttttttttttgagatggagtctcgctgttgccaggctggagtgcagtggcgaccttggcttactgcaacctctgacttctggttttctggttcaagtgactcccctacctcagcctcccgagtagctgggattacaggcacgtgccatcacatccggctaatttttgtatttttagtagagatggggtttctccatattggccaggatggtctggatctcctgaccttgtgatccacctgcctcggcctcccaaagtgcgggattacaggcgtgagccaccgcacccagccctcttttcttttgagacggagtttcgctcttgttgcccaagctagagtgcaatggtgcgatctcggctcactgcaacctccgcctcctgggttcaagcgattctcctgcctcagcctcctgagtagctgggattacaggcacatgccaccacgcccagctattgttggtctcaaactcctgacctcatgatccgctggtctcaaactcctgacctcatgatccgcccgcctcagcctcccaaagtgctgggattataggcgtgaacccccgtgcctggccacggctggtctctttgataccagtgtccacatagttaattactagatcatcagtgatttatttggttggattctatatatgaaacctgtgttactttgacatgctggagtccattgctgtgggcattgtggtctgtagcctatttctccccccttggatttctttttttttttttwttttttttttttttgagacaagagtctcgctctgtcacccaggctggagtatggtgctgtgatctcggctcgctgtaacctccgcctcccgggttcaagcgattctcctgcttcagcctcccaagaagctgggattacgggtgtgcgccacaacgcccagctaatttttgtatttttagtagagacggggtttcaccatgttggccaggctggtctcaaactcctgacctcaagagatctgcccccttcggcctcccaaagtgctgggattacaggcatgagctaccgcccccgaccaycccctcagatttcttaragctatttgtttgaacctcatgagccctgagctttgagtcagaaaatactatgtctggacttagtaaaggaccttagaatttttagccatccaccttttccctaaatgtctcaaaaattcttcattttattttrtgcaaaaaaaaatttttttctaggaaaattcttaggcatagtctgttagctgctcttttttctctacccctaaatccttgaagccacagaatttcttcagctcaggcattacatttgattcatgaaatatatatatgtatttttttttttttgagtcagggtcctgctgtgtcacccaagctggagtgctgtggcaccatcttggctcactgcaacctctgcytcccaggcccaagcgtcctcccacctcagcctgcagagtagctgggactacaggcatatagtaccatgtaatttttgtatttttcgtaaagacagggtttcamcatgttgcccagactggtcttgaactcctgagctcaagtgatccacctgcctcggcctctaaaaatgctgggattacagacctgagccaccgcacccagcatgaaaacatattatgtgggcagtcagtctttcacagcactccccatacaatatgacctttgttttaaaatggaacattgctacttcctgtaatctggggaacccctaaatctgacttgggaaagagctacaaatctgcccagggcactatgctcctaatctgtcgtgggtagttcctgcaataggtgtgcttcctggggctggcaggggctgggcacgctgagtggagggctcagggaggcagggatttcctgtttatgtggactgctcatgtggacacaaacgttcagagwttggatgtgagcattatccaccttctcatgcttcattcttagatcaacaagttggagaaagctgttgctgcagcacacaccttcttcgtgggcaatcctgagcacatggaaatgcagcagaacctagactattaccaaaccatgtctggagtgaaggaggccgacttcaaggatcttgagactcaaccccatatggtgaaaaaaactttatccccttctttctttctttctttttaaatttattttagagacagagtcttgctctgtcacccaggctggagtgcagtggcttgatcatagctcactgtaacctcaaattccyggactcaagagaccctctagtctcggcctcctgagtagttgggactacaggcatgcattcttttgtttttttttaaatgacattactaaggttgttttctaattacattacagaagtaatgaatgttcattgtataacattgtagaaatgtaggtaagtataaaataaaaagtaatcatttgtaataccgccaccttaagaaaaccagtttatattttgccctattttttaagtcttccgtatataattttttcatctaatttggtgttatatcatgtatgcattttttatcatcttttttattttttttgaggcagggtctcactttgttgtccaggctgcagtgcaatggtgtgatcatagctcactgcagccttgacctcctgggctcaagtgatcctcccgcctcagccccacaaatagctgggactagaggcatgcaccaccayacccagctattgtttttattttttgtagagacggggtctcactgtgttgcccaggctgatttcaaactcctggcctcaagcgatcctactgccttgggctcccaaagtgctgggattgcaggtgtgagccaccatggccagccccatcatcattttttaactaacattattatcatgagtcttttctcatgtcttcagttttatttgaaaacataattgtttatggctgcatgatagtccatcttatgcagagactatattaattcactagtcacatttttttggtcatgtatgtttttgattttcactacaataaatgttacagtatccttcaatgttctcattctatttgtttagcaggaaaagttccaaaggagggactgtctgtgatgatatagcattttatagagagtttatggttccttacattttaattataaaataggaatgttagaaacaatataagaatgacttataggccaggcgcagtggctaacacctgtaatcccagcactttgggaggccgaggtgggtggatcacttraggtcaggagtttgagaccagcctggccaatatggtgaaaccccatctctactaaaaatacaaaaattagccaggcatggtggcaygcacccgtaatcccagctactcgacatggaggcaggagaatagcttgaacctggaaggtggaggttgcagtgagccaagattgtgccactgcactccagcctgggtgacagagcaacagtcaaaaaaaaaaaaaaaaaaaagaatgacttttaaaagtaagttgtggccaggtgcagtgggtcacacctgtcatcccagcactttggaaggccaaggcgggcggatcacaaggtcaggagattgagaccgtcctgcctaacatggtgaatccctgtctctactaaaaatacaaaaattagctgagcgtggtggtgtgtgcctgtattcccagctactcaggagcctgaggcagaagaatcgcttgaacccaggaggcggaggttgcagtgagccgagattgtgccactgcactccagcctgggtgacagagcgagactccatcacacacacamaaaaaagtaagttgtgttggccgggcgtggtggctcatgcctgtaatcccagaattttgggaggccgaggtgagtggatcacttgaggccagaagttcaagaccagcctggccaacatggtgaaatcctgtctctactaaaaatacaaaaattaaccaggtgtggtggtgtatgtctgtaatcccagcttctcaggaggctgaggcgctagaatcacttgaacccaggaggtggaggttacagtgagctgagatcatgccactgccctccagcctgggctgtctgtctcaaaaaaaaactctgtctcaaaacaaaacaaaacaaaaagtaagttgtgtttatttgaaaactgttagccctacaaaaaagtgcaagaacctaggccaggcacggtggctcatgcctgtaatcccagcacttcgggaggccgaggcgggcagatcacctgaggtcagcagttcaagaccagccagaccaacatgacaaaaccccatctctactaaaaacacaaaattagccaggcgtggtggcgcatacctgtaatcccagctactctggaggctgaggcaggagaattgcttgaaccctggaggcggatgttgcagtgagccaagatcgcactattgcactctagcctgggcaacaagagtgaaactccgactcaaaaaaaaaaaaaaaaaaaagtgcaagaatctgtcactaatggggggggaagaaaagtacaagaaaatcataatgaactcctagatatctttcatctagattaagagttaaatgttttttggccaggcacagtggctcacacctgtaatcccagcactttaggaggccgagttgggaggattgcttgaggttaggagttggagaccagcctggccaacatggtgaaaccccgtctttactaaaatacaaaaattagctgggcacaatgtaatcccagctactagggaggctgaggcaagagaatcacttgaacccaggaggtggaggttgcagtgagctgagattgtgccactgcagtccagcctgggcaacagagtgagactctgtctcaaaaaaagaaaaaaagagctaaatgtttttaaatttccagagctaaatattttgtaaagaccatttacaaaaggccttcattttatagtggtacccaggtcacccctttccatccataacctgaggaacaggaaattaggacccctgtgaaggtggctgagggcaaggagagagggttcctcctctgtggcctgcatttgagtgctccttcttcccagtagcaagaatttcgactgggagtgcgactctactcagaggaacagccacaggaagctgtgccccacctagaggcggcgctgcaagaatactttgtggcctatgaggagtgccgtgccctctgcgaagggccctatgactacgatggctacaactaccttgagtacaacgctgacctcttccaggccatcacaggtgcgtgcagttcagagccagaccttcagccaggcctcctgggactctarggtcaccatctgataatataaatggggactcttcaccctcattcctcaatttattaaatctgagaagctgatgaaaaattgcttccatttgaatttgttcatcttaaccagaatttgagttctaaagagtgacctcatagttattccttctgtttgattcctttcagatcattacatccaggtcctcaactgtaagcagaactgtgtcacggagcttgcttcccacccaagtcgagagaagccctttgaagacttcctcccatcgcattataattatctgcagtttgcctactataacagtaaggcctactttccttcctctttctctgctggctaactaagaagctaaaggcaaggtgggcagggattacagccacttacttcctcaaggtgtttggcttatttcagtagctatgggaggcaccatgccaagtgatccctgggtagtttgttataaacaactggcctaggaagccaataccagcaacccaaaaagctgggggagggagacttaggacctcatctcttgtcccttctataacttgtaatctatttttgcttttgaattaaagttaatagcaaaataagggtatgccacagtttaaactagctcagaggacatttgctagccctctccctggtatagcactgatgcttttgtggggctgccaattaatacccagaaaaccaactctttgcagagtccctactgtgtgctaagcattacaaacatattgatgagtgtacaatatttacagttgagttgagatgactaacaaatatcaacaagaactattttgccaaagagacaatctgctattgtaatcttccytgtcttctgaaaatctatagaaaaaagaaggtaggaagacagggaaattgatctaatgattgagtgtattgaggcaaaatattaaggagtattggaattatttgtgaatcttaaaagatgtgggcatgcagagaattctgattcttttctgtttcattgttaggcagccctgaggacattgaccacctcaccttaaaattaatcacacattctatgtgtattacttaactcctgcccctgaaatcaggccatcatgttaagtagcaggcaccagcttgtcatgctgccattgcctcaagctttgtggagactgaacactaagtggtccctggtgstaggattttmtcctttccttttgactctttcctctcagccattcttctttccactttgcagttgggaattatacacaggctgttgaatgtgccaagacctatcttctcttcttccccaatgacgaggtgatgaaccaaaatttggcytattatgcagctatgcttrgagaagaacacaccagatccatcggcccccgtgaggtgagagacttccttctgttatgacagctgccagctgaactyagacctgagggcggaagagtggggtagcagaggggagtaggcgctgtgcgtgcagggcaggggccagatgtcrgtgttggggccagatgtgagttcagtcactcrgcttgttattcagaggagaagggagcacagggagggagtgtggggagtacacaggagcctcaattagcgttatctgggcccagaagtctattctctgagtcccgcagaactgcgcggtgagcatattctttcccctcttggcacccctaacttggacactcgatattatttggccaagagctatcatttttcacttaatactggttgttttttttctgctcacctgttttctgtctccattttctttcccatctcttcttcttcctgccattgtttgttctctcccatctttcagcattttccctgtctctctccaaaaccaggagaaatatctgtataacacaaagactgctgcgctgaaaggagacacccaggctcttcttccgagctctggagtctgagagcctccagtagaaacagcctcttgctgcccctcctgtgtgggttgtcattgtagttgtcctctttagccactagatggtgaccatctggctttaagatggcacttccggtctcttttgtcttgtttggttaataccttttccctgccttccttatggccattaaggggagtctgaggggagtgaggggaaataaacccacgtggccaatctagcatttttaactagaagtccccttttggaaagaaggcaactaacatttgttgagccgctgtccaggcgaagctctgtgcggggtgggctgtatccatcatctcatttaatcatcacagccaccctgcaaggttggcactcttcttcccactttagggatgaggactgttagcatctgagagatgaagtaacttgtgcagtggcttgtggccagtcagtggtgaccggaatctgttccctgcttggacccagtrcaggcacagctccagacacatggctgacactcagtaaatcagcatcgaatgaataaagatggaagtggggtttgcttcatagcagccttatagggtcattggagagggttaaatgagataacatagcatttggtgacagaagccagtaatgtaaactcctgaagagaaaacgtctctcttcctcttaggtaaatatagtagatgacataggattcattgactcctttaattcctccttgaactgcctcatgttttatttcaactgatgtctcctttttctcttccttcctcctcctgctgcttggagattagcagggcacctagggaaagatgtgaccccggaaagtactcagtttccctgccctgggtaagccttgcctgggagtccatgtgggaagcccagagtgccaggccctcccctttagctgcttatcctcagggaggggtgtggtctggttagggtctgagaggaggcaggtggcagagcagaaagcacatgggctttaggactgtaaagacccggctttatctgtccaaatgcacattctgctatgaaaaaaaagaaaaagataacagaagacctgggtttgactgtaggtcgctgctctcccatgtcctgtagtgtcaccttagacagtggtacatctcctctgtgcctcagatgcttcctctgtagaatgagcatactagtatcaacctcagatgtggctataaaagatcaaatgaataacatgtcagttgcctaatgcctgattccttttcctgctttgtggactcctgtagaagtcaagaaggaattctccttctttgaagaatatttccacttttgagaatcatcagattatctgtcctagagactaatgggggttgggatgggggaggagcagggctttttcccttaaggaaagcctggttattccagtacctcagaggtactgttgcttgtgccaggcagaggacacagaaattagacttttgtctcaaactggggaacagacagagagcattggtagggagaggaggcctcaggtcacatgggagcatcagtgtggggtgccagggaggggaactcccagaggttaaaagacagggctgagttctgggggatttgtttgcttttttaccctcagagtgccaaggagtaccgacagcgaagcctactggaaaaagaactgcttttcttcgcttatgatgtttttggaattccctttgtggatccggtgagctagggtacaggagccggaagggagcrgggaaagagtgagcaggagagatgaatggggaggaggggaacactgtgcgattctgagagaaaacttgctggaggctgagcctagcctgggatctgtgcaaggcagggatgagagacagatgaaaggggaacactgggcagctagaagggacttagatgtggaaacctcccattttgtctcctgaaaggaagagggtgataagctggattactcctgtgggccttattttatgcattgagacacctggaagattaagtagatcatcttacctttttcatttcttcctgacctacttaggattcatggactccagaagaagtgattcccaagagattgcaagagaaacagaagtgaggaccttgaagaaactgcatggttggatcagtctgatgaagcacttgaggcttcctgagcccaggcagatgtgaactcctggcaaggggtgggcaggtccagtttgggaagtcggggtggagcccagggctggccctggaatgcagtcctcagagcggctgtgctcataggtcagaacgrgaaacagccgtacgcatctcccaggagattgggaaccttatgaaggaaatygagacccttgtggaagagaagaccaaggagtcactggatgtgagcagactgacccgggaaggtgagaggacagaaataggggcatgtctggctgttgtcagggagccaggcaggtcaccccacatttgccaggcagcgctccaccccagcattgcagagctcaccatgagccagccacccttagggtgcaagttcagtggacatccttcctaactcaccagcgggactttcagctggaaagagcactgagaatcagcctttggctcagaaatcagactccaggatgtagtggtgcacacccgtaatcccagctacttggcaggctgaggcaggaggatcgcttgagcccaggagtttgaatccagcctgggcaatatagcaagacctcatctttaaaaaaaaagaaagaaatgagacttctgtgtcacagaaacatgagtgactagtgttgtccacttccataggtattaactcatcctgtctccccactcccaaactgttttctcccggttttcaccattcgtccctttactgagactcaacgccttcaggcctcctttggctcctcttcctcctgtgcccgttttctgcaagctgctgggaaggcctactgattgtggctctgctctgcagtgcttctcagctctctccccagccttttccgtttttcattgcctcaggcttccttcaggccctggcacctcctatctgcacccaccctttccccgtctggcctgtccttgcccctgcccacacaaggtagctaggccagtcttccagacactggcctctgacccatcctccgtgcctgccccttaaccgaatgttctactcttgtcctgtttacaccgtctcttcacacaggactgcactttgttccgtgagcccgcccactgcccaccagtctgtgtttatgcctggctctcctagtacgcttcccaccatccctgcccatgagggcatctgagatataccctgcaaagcctttcttttttttttttttggagatggagtcttgctctgttgcccaggctggagtgcagtggtgcaatcttggctcactgcaacctccacatcccgggatcatcaaggaattctyctgcctcagcctcccaagtagctgggattacaggcatgtggcaccatgcctggctaatttttttgtatttttagtagagatagggtttcaccatgttggccaggctggtctcaaactcctgaccttgtgatccacccgccctggcctcccaaagtgctgagattataggcataagccactgtgccctgccgtaaagcctttcttaacctcccagatgattggagtcccctcctttcttttgaacttcttagggcatttatggtctgtcttatgctagttatttgcataattgttagagaacaggtactgtcttctaggattcatctctcaccctatctggcacagttcctggtacacactgaggcctcagttatcaagtggagttgaactgagtctctagtattagtatgtccctagcacagagaaacaccatgagaactgtaagagagaaatgttgacctttgccctatagttgcttaaattaacagtggttaattaaacaagattagcgtatgaaaagaatttgtccagcattcctttgttttcagaccactttcactttgttatttctcttgattcttataactgagaggtgagtcatgcagattgcaagatccttattttaaatgaataatgatgatgataccatggtagccaaacttttgaggacttaccatatgccaaatattgtactaagcttttaacttgccttccttgttcttaacattatactggcatcaaacatataaggtagatgctgtttgacagatgagaacattttaattaattaaaattaacctcagggaggttaagtaacttgccaaggtcacacagctaatcaatggaggatctaggagtcaaagtcagttcttcctcgttcccgagctcatgttttaggattgtgtttctgatgtttcctcaagagtgtgtcatggcccaaaagccagcagctatttggtcatggagctgggactgggaatctcatctttcagctctatgttctgtcctctggactattctacctttgaaaatgacctagcgggagattttgctggtgaaaaggaaacagctggaatttctatttgtgacgaggaggcaatatccaatggagagtctttggtctagctgctgctagatttagctagagttttgtcattgctttgcaggtggccccctgctgtatgaaggcatcagtctcaccatgaactccaaactcctgaatggttcccagcgggtggtgatggacggcgtaatctctgaccacgagtgtcaggagctgcagagactgaccaatgtaakggaagcccagtgactgcaccttcccccaagggtccagcatccccccaccaagtgccccttgggtggtagccttcgccttcctcttcctggccacagttgaccacctcttctcaagccctcagctgccctggctaacatcaccttgtgttttgggccttgtaggtggcagcaacctcaggagatggctaccggggtcagacctcccsacatactcccaatgaaaagttctatggtgtcactgtcttcaaagccctcaaggtragatcaacactgggcattctagagtgtggagaaaggggtggggaagggggaagctcaggctttgaggaagagttggggctggtggcaggaaaggtgaagagggtccacctgccaacattcttgttgccaggaagcgaggatgagttatgttgcgtgaggttcacttttgaatcctgttagaccgagtgtaatcaaaacaaagtgagcaggataagactgttcgccaaagctatgagaatgctttctttagaaaggctgattctagagggctgtgcttctgtgcaggatgcacagtgtgctcataaagagagataagaaggacaggaggaagaggaatatagtaggggtattgggcgtgggcagcagaggctgcagcttcagtgggggtgtggggacgtgggatgggcctggtactcattgtctctggcccctaaagaggggcgttgtgttagtccgttttcacactgctgataaagacgtacccgagactgggcaatttacaaaagaaagaggtttacttggacttacagttccatgtggctggggaagcctcacaatcatggtggaaggcaaagaggagcaagtcacatcttacatggatggcagcaggcaaagagagaacttctgcaggcaaactcccatttttttattttttattttttattattttatttatttatttatttatttatttattttwtttttattgatcattcttgggtgtttctcgcagagggggatttggcagggtcacaggacaatagtggagggaaggtcagcagataaacaagtgaacaaaggtctctggttttcctaggcagaggaccctgcggccttccgcagtgtttgtgtccctgggtacttaagattagggagtggtgatgactcttaacgagcatgctgccttcaagcatctgtttaacaaagcacatcttgcaccgcccttaatccatttaaccctgagtggacacagcacatgtttcagagagcacagggttggggataaggtcacagatcaacaggatcccaaggcagaagaatttttcttagtacagaacaaaatgaaaagtctcccatgtctacttctatccacacagaccccgcaaccatccgatttctcaattttttccccacccttcccgcctttctattccacaaaaccgccatcgtcatcatggcccatccccaatgagccgctgggcacacctcccagacggggtcgtggctgggcagaggggctcctcacttcccagtaggggcggccgggcagaagcgcccctcacctcccggatggggcggctggccgggcggggggctgacccccccaccaccctcccggacggggcggctggccaggcagaggggctcctcacttcccagtaggggcagccgggcagaggcgcccctcacctcctggatagggcggctggccgggcagggggctgacccccccacctccctcccggacggggcggctggccgggcagaggggtcctcacttcccagtaggggcggccgggcagaggcgcccctcacctcccggacagggcggccggccgggcggggggctgacccccccacctccctcccggacggggcggctggccgaccaccccccccggcctccctcccggacggggtggctggccgggctgaggggctcctcacttcccagtaggggcggccgggcagaggcgcccctcacctcccggacgcaaactcccatttttttaaagccaccagatctcgtgagacttaytcagtattatgagaacagcacgggaaagatccacccccawtattcagtcatctcccaccaggtcccttccacaacacatgggaattatgggaactacaagataagatttgggtagggacacagagccaaaccatatcagtcgttgagggcagctgaccatctgtctccttggcagstggggcaagaaggcaaagttcctctgcagagtgcccacctgtactacaacgtgacggagaaggtgcggcgcatcatrgagtcctacttccgcctggatacgcccctctacttttcctactctcatctggtgtgccgcactgccatygaaggtgggcctcattacccctgcagcacccgcccccgcatgctgtacctcagctytgtgctggatgctgaagacacagagagaacaggatgcggtcccttttcttcagttggggaaccaatgtaaatacatgggtggcatcccagtgtgatgcatgccacagtagcatggaggaagttatagtcaacctacctggggatcaagaaggcttcccagagggaaatggggtgcagccagaaagggggccacccgtcacttgtcacayaacgcactttaatggggaagctrgygctaaaccattcatagaggacctgcctccgggttagggtttcatacatagctgagcagctccctcgctgccatctgttgaaagacagccctcaacagaagggcttgttaaaagcaaaaataataacaacaacaacaacaacaaaaagaaggcttcccagaggaagcaatggcagttttgcaggatgaatacgattacggagtactccgggtggtgggatggtgtttgcacaggagtggaggcattgtgcagcctggtagtcaggggaactaagaaaggtgccaaatcctggagagctacattcaagggaatttttatcctttagctcaaccatagctatgtggcagattctcttttactaattgttaaawaccaaatttgtgagagagcttcgtgatttacaagtgagagtggcctggaggttattcctcattccctcgcccacccacattcccttttgcatgtccaagaaggggagaggttcagctagtgctgcaaggatcctatgtggcccagagccggctctgtcatactggagcctccagcaggcccctggcagtgatggccattggtacgtggcacagatcagagggctttcctctacctcagaatgtttggaattctgtcacaatctgggcacacccaaagggaccagtcagacacacaactgggtgtgtcacaagcccccggtgggagagcacaagcacaggtgccaggaggccagggaggccycatcaagcagtgaaggacgtggtgaggccttgacttttaaaggattcattttgctgctgtgtgtgtggagagatttcaaaccaaaaagggaagctggtcagcaatgacctctgtggacaagggcaaagccctaaactcaggaagtggcagtgggagragggagaagtgaggccccgggaaggtgcaggaggtggatggacaggacctggtgactggctggacaagtgggaatggagaaggaggcacccaccacgacgtgacggtgcctacatagagcatgccaaaggtttgcgttggggaaagacgtggtctgcctggcatttgacagtgagcccggtctgttccctttcgtgaccttctccctgcatggtttctccacccaccccaccccagagccccactgaagttcatgctttccctttgctagccagctcttctctgccccacttcctgccactcagccccatctcctgcagtcctgatggaggactgacccactctgccctgcgtccgtcccacctcctgatccctcattctcacttccctgggcctttgtattttgtaaagtccagctacaaaccagggttgtgccattctgcccaggatctgcccttggttggagcccttcattcctgcttgccacaccctgctcacttctgccaagaactgtcctaggaagcctgcagacttgtcctgacccctaggcttgtggcttagccaaagacacccccctagttcattgggcattccgtagactcaaacacattttgggaagcacctcccctgccaagaagagagctatgccgtctcccraggtgctcccttgctaacatgtgtgacattggccccagaggtccaggcagagaggaaggatgatagtcatccagtccacgtggacaactgcatcctgaatgccgagaccctcgtgtgtgtcaaagagccyccagcctacaccttccgcgactacaggtgagtgcggggcaggtgcagggtgaggaggtctgtgccctcctcagaggccccacagtgccctgmactctacyaccccaccctagcacacacacactggttggggctagctgttcccagagtccaatcctttatccccaaacccgctggataagaagataggcaaagagggaatcatatcrtggtgtgacaagaacggtagtgtgagtgggcacaggggactctaaggcgagggtggagagtggaaaggtggagtttgtrcggcatcagtataggttcttaaaggtttccctcccacacaaagccaccctcctgctgctggttgagagcacctggaggtgaaggctcaggggaaagggaggcagggaaggrccatgatgagatgtctctgcctttcccagcgccatcctttacctaaatggggacttcgatggcggaaacttttatttcactgaactggatgccaagaccgtgacggtgagtgctcccttgtccttgtccctgggagataaaaagtctgttttctacagctgatgttcccaaagtgcagtggacaaaaataaccaactgggcttcccagtgggcrgtacccttcccccatccagaggggctttgagacgtgtccatcactcctctaaccagtcaccctttctctttagttctggtcttagggaagccatactgaagagctgccctcggtcgtgagccctaatgagcccatgtctcttctgagagtggattacagtctttgtcctgtgcaacccccckccctttctgtcccccttaggcagaggtgcagcctmagtgtggaagagccgtgggattctcttcaggcactgaaaacccacatggagtgaaggctgtcaccagggggcagcgctgtgccatcgccctgtggttcaccctggaccctcgacacagcgagcgggtgagagcagctcgagcgggtgagagcagctggtgctgtggtgacccgttcccagagcgcccttggtttgcctwtctcttccccaaatcccattgccagtggctgagacacgaaaggagcacttgggacaccagctccaacgccctgtcattatggtcacattgccttgtcctccctgggcctgctgtgaacgggatccaggtggggaaagaggtcaagacagggagcgatgctgagttcttggttccctccttgggccccacttcagctgtccttttccagagagtaggacctgctgggaaggagatgagcctggggccattaaggaaccttccttgtcccctgggaagtagcagctgagagatagcgagtgtctggagcggaggcctctctgaatgggcaggggtttgtccttgcaggacagggtgcaggcagatgacctggtgaagatgctcttcagcccagaagagatggacctctcccaggagcagcccctggatgcccagcagggyccccccgaacctgcacaagagtctctctcaggcagtgaatcgaagcccaaggatgagctatgacagcgtccaggtcagacggatgggtgactagacccatggagaggaactcttctgcactctgagctggccagcccctyggggctgcagagcagtgagcctacatctgccactcagccgaggggaccctgctcacagccttctacatggtgctactgmtcttggagtggacatgaccagacaccgcaccccctggatctggctgagggctcaggacacaggcccagccacccccaggggcctccacaggccgctgcatracagcgatacagtacttaagtgtctgtgtakacaaccaaagaataaatgattcatggttttttttacttggtttgttcagacaatggaaatttgcccattctgtcccagaggtctcacttgataaaaattgctctaggcaggacccagtggcaggtgtgggacgagaagtcctggcttggcacctggctcaaccacttgctgtgcagccacaggccagacacttaaccttcagcacctcggggttgtcatctgtataatggggatcatagtcctccctctgctcaccttctggggcagctgtatggcccagatgcaatatcggatgtgacaacacttttgtaaacggtaaagctctgggtgaatggttgggattattgttaatcctcttctggcagggagcggcggtcagcagtgctctggcacgtcacccctatgtcagccacatgcttcctgctctgccgtctggcctcagtgtcctgtatctcggcctccctgtgcaggaagacacactctaggaaacactggaaatggagattcagctcctctggctacatccctggtactaggtccagagcttttactgtgcttgagatgccacagggcgttgagtgtaggaacctgcacatgagtgttcacttcttccatcaatcaatatgtatttactgagcaccagctaagtgcctggtgctgggaacgtggcagtgaacaagtccccaccttcatacagcttgtattttgtaggagaaacagataacacatgtaaattgtgtgtgtgtgtgtgtgtgtgtgtgtgtgtgtgtaaaacccttagaggtagaaaataaaacaagtcagggtccaaggtggaggaaaaacaaggaagccaatgtggcggtgtagattggtcaagaaagagtatggtgacattagccaggagacgtgtcacgtgcctgtagtcccagctggacgctgaggcaggaagatcgcttgagcctggaagttcraggctgcagtgagctatgatcgcccgactgcactccagccttcacaagaaagcaagatcccaactctaaaaacaaataaaaaggaaagtggtggattgtcaggggtgtctgggggcctatttttaaagtagagccaacaggcattgctgatggattggatgtgaggtgtgagaaaaggcatcaagaagaagctaggccaggctcagtagctcacgcttgtaatcccagcagtttgggaggcgaaggccagtggatcacttgarttcagaagtttaagaccagcctggtcaacatagggtgaccctatctctaaaaaaaacttgaaaagccaggcatggtgatgcacacctgtggtcccaatactaaggaggctgaggtaggaggatcatgagcccaggacgtcaagcctgctccattgcactccagcctgagtgacagagcaagaccatgtctcaaagaaagaacaaggctggtctttgtggctcacgcctgtaatcccagcactttgggagactgaggtgggtggctcacccaaggtcaggaggtcgagaccagcctggccaacatggtgaaacccgtctctactaaaaatacaaaaattagctgggtgtggtggcaggcgcctgtaatcccagctactcgggagactgaggcgagataatcatttgaacccaggaggcggaggttgcagtgagccaagatcacgccattgcactccagcctgggcaacaagagtgacactccatctcaaataaataaataagaacaaaaacaaaaatttcaattaaaaagtttattgggctgagcacagtggcacacacttgtaatcccaacactttgggaggccaagtcaggagatcacttaagcccaggagttcaagaccagccttggcaacattggaagaccgtattgctattaaaaaagaaaaattgttttttaggaaacgattattttttgagctgggagatagcactgcgtgttagttggctggtgggaatgatccagtcaagacagtcactcctccttttatcatggttgatccccgccatcctatttgggtggctcactcggcgtacagagaggaccacgttagtgcaaaaagcatgaactttacccacacactgagctgggtgacactcccacttccaccaygtggagttgtgtgacctccagcaagttagggaamctgtatgtgtttcctcaccagcggaatggaatcacagtccttcccgcgatggttgagcggatgaacaagggaatgctcacaaagcaaccagcacgacacttagcccatggtagacatcaacattacagaagactacatcagcctaattctggttttccagaagtttccacatcaaggcagatgactttacagtttcaacttatgctaaacagatacaggcagcagcctcttaactgagctcacaaaaggccagatgttttcaaggcagcaggcccaagataagtgtatatagagtggggcgagtcctcctggaagcatggggtgatggcagcccggctgagatgcgactgtgatttcggtctgcgtttggtaackcacatgcaagggcrcgcgagcaatgaraggatgactgcttgagaagaaaggagagagcccatgsgagggttggaggggatgaaaggcaactcctcaaacacagtgaagatttggatgtggaagacgccgctggtctctggygccccaggcatctagcagagctctcagcaggggcatcaagagacagatgctgtactcagtgtggttagcacaggtaaatgggacagccacatgtgtcacagaggcgcagggcccgggcgagagggtggaacacaaaaatgtgtctgctaacacagtctcaaggtgctcagggaccttaggaaggaggtaaacgacgcaataagtgcagtgaatggaaatatgccaagagtatgatgggattgcagatcaggatgcttagccrtgcctgggcaggcagaatcgttgggggtggccacacagctggctgtattgctttctagctgtgcgccctgaggcaagtagtctccattccaagcttatagttccgggaatctcagactctgagttgggagggtgataagaactccaaaatttcaaatgatgattgcagagaaggtgctagattgctaaagactgaatcggaccctcctaactgacaatgagagagggcggtggaaaggtctccgatttttcacagggagggaggcaaaagcattgaatcctcataccaatcagtcaatgatcaacacatacctagcaaggctggctctcggtcaggcactgttgcagaggaagtggcagtgggtcttcagccacaggcagtctgcccactcccagmgtgcgaaggctggaggggcagactgtgcggggagtctttttggaacagagctttcattagtcacagttctgcaggcgttttatgctttcaaacagcctttctcacctatcatctgatccttgtaaactccctcatgcatcagacagggcaagtgttattatccctacttttcaatggagaaaccaggcccagggaagctgaggatytggctaatgtcccatagcttttcagtggcaggggtaaagctagaactgtaggcttctcatagcctgagtgaaagcacagggtgctgtgctaccccagggcagtttcagtgagctcttaatggaggctgggctgtgaccctgagccttcctgttctccccgcatgtctgggagtcattggactgcaagggggggcaccaggagtggtaggtgtcctgggtggagaagctgtgccaggttaaggaatgccgctccagaagcagaatctgaattccaaaaggctttggaacaagaatgagggaaggccgtcagggtaggagagaatattttggtagaacagactcaaagcctcaaataacaaagagaagggataaacagaagcacttcagaggaagaggagagcactgttccggatcacgaagaggctctgggaacacccaggatggaggagcatgcaggcctcctgctggctctgtggccctgtggacccgtggctccctttctctctttggccctcaaattgtcaatggagggggccgcagcccatggtctctgaggcatgcttctgactggcctctgggctcctgacccaggtccccctgaaaccagaatgacccctggatcttccctacagagagagcgcctgcagatggcggggaaaaggggccaaggcccagcgtggagagaaggaggactttgcctttggaggagcatatgcggagcagctacccagcaccaggcccctgccctccccagacatcgcttactttaacggaccaccacaactccatgaagcaaacctcccatttagagtgaggaccctgaggcaccacagtcattcaggtcacccctggggagcatcttgtcactgcccgcagcccccttcaatctggacctggtgcctccctcaaaaagggaggagtgtgggagagagaccacaggggccagcaccacacagtttcaagcggaaagcccttcctgctgtttcctggctgggggtctattacctccctctgccgtggtctccttactgttaggaggcctgctgcctgcaacagtggcccacatgcttaaattaatgcactggtcacagggtgcccattgcggccccagtaggatggaggaggctcccctcaatcctactgtcttgtcattgtggtagaagaatctgagctcaggacttacttctctgccactgtcctagaccccatttggtcttgggacccacaggtcgtccaggaagcaggtctgtgtgtgctcggatccacgtggctctgaccctcccagcacagagagcctgagggtcccagtgtgcaccaccacaggtcaagcagtgcccacccttgaccctcagatggcagaccactcccccatctctggccagagctgcaggccataccagaggcctacgccctgggcgggcacacagggctgccattgtctgctcagcgcctggcaccctctcgtttgcatagccacgtgaagaatgcaagagcgggctggggacttgtcccttcagaggggggttggggctgtgggggaggaagccagcaggggtctgcagcaggaccctgccttcccccagtgcagtccaggaagggtgggtgggctgttggggacggagggggcggcggggggctggcaggagtggaagcagggttgtgacattccttctgcacccacgctgcagtggggcccacttgaacgtgaggggattgctaatgaggtggaagagagttaaacattcccctactcctgaagaccaagagagactgggagagagaagagggaggtgggggtgctcggagcgggcagcctgaaccccgggaatgtgcagaggccactgctccgcgccaggctgctctagagttgggggccagggcccagtgttccagwcycagcaggagctactaagccagccagcaaggggattaaggggctgagcaatccgccttccttcaggctgatgccagaaggttggggctgtctccccagctccccaccaggccccttgctggccggcagccagcgctggcccagcctcgatagggccccttttctgtccccctcagatctcaaaaagaccccacagtacatatttcctggtctggcctccctgatttttggcacacacagctcccargtacccaygacccctcttcccaacaccccaccgctagctcagcctccccacatccagcttcagagcccctgccaaaaagttatccttgacatctaactctagttttacccgctgcaaactggcattcctttcccttctgtcctaaagtcaaagggcagaaaaccccaagggttagatcagccttgcaagagcaaagtccatcctcccagggctggtgtttgggttagggattatccgaattttaggacacccgaatcaggttcctaaaggggtttccctgtggggaaaggcccagagggcagctgggtcattcctctcagcccctcccttccctatccctgcggaacggggcggggcagggacaccacctgggccatgggccggccctccgcccccagggggctgggcatgag

SEQ ID NO: 9985 - DNA, 19479 bp, Homo sapiens
  misc_feature (2198)..(2278): n is a, c, g, or t
  misc_feature (3293)..(3440): n is a, c, g, or t
ggcaggagaatcacttgaacccggaaggcagaggttgcagtgagtggagactgtaccactgcactccagcctgggtgacagagcgagactccatctcaataataataataataatrataataataataataataatagtcttgggccaggtgcagtggctcatgacgatcatcccaacactgggaggccgaggcaggaagactgcttgagactaggaatttgagaccagcctgggcaatayagtgagacttcatctctacaaaaaatacaaaaaataataaaaagaggccgggtacggtggctcatgcctgtaatcccagcactttgggaggccgaagcaggcggatcacgacgtcaggagtttgtgaccagcctggccaacatagtgacaccctgtctctactaaaaatacaaaaaattatctgggcataatctcctaattatcctagctacttgggaggctgaggcagaagaatcgcttgamcccgggaggcagaggttgtggtgggccaagatcacaccattgcactccarcctgggtgacagtgagagactccgtctcaaaaataataataataataaaaagaaagaaaaataatagtctcctagatcccctgagcttagggcctgagcaccagcattttaaggctctctgggtaattgcatggcacacccaggatgcagaaccgtggtgtcacargaaacactctaacaaaacaacagagaaaatcaagaaagagaaagcacaagatsaggaaacaggttccaacacaaaaaccaggtgaagagagcctccagaatgacaatgggctgtggtatgagggcagcagttcacattggaacacacctggaggctctgggagccacatctccaagaagaygcagctgatctgacacctggcatgaatgagtgtagagagcagatgtggacaactggctgagggtgtggagttgagttagtgataaagacacagartaagcagaagaaaaaagcaagacatgaaattttagaactctgtgagttctaaatttttactacagggaaaaccaaaagtgtgcaagggggcaaaaaagtttcacagtttatttcaaggcttaatgctgagcagtacacatggccctatggatgcgtgcacatgcatttgctttggggtaggaatgagatctagctcatagataatgctacttccatcccagctactcgggaggctgaggcaggataattgcttgaatctgggaggtggaggttgcagtgagccaagatcacgccattgcactccagcctgggcaacaagagtgaaactccatctcaaagaaaaaaaaagataatgctacctcctaagaagtagcaatgcaagcatgttctttagtgatacagaggtaaatgcaaaagaatcacctgcaaagttgaaagtcattgcccttgggaccagagggagctggggcttctgactgtctcaacaagccttatagaaccagttgactcctaatcaggagatcagcaaactttttttctaagggtacaggtagtaaatatttgacacaaggccagctacataatcttcagggcccagtgcaaaatgaatatgtggggcctctccttcaaaaagtatgaagaatttcaagatggtgacacccagggtggggccctccagagtgcagggccttgtgtgtgactgcacaggtcacatgcccctgatgctggccatggtttcaggctttccaggccacatgaactctgtcccatctactcaactctgccattgtaccacaaaagaagtcaatgacaacatataaatgaaccagcctgtctgtgctccaataaaactttgttagcaaaaacaggtgatgggctggatttggcccactggccatagttttctgacccctgcctatgagtatatataactaataaaaatgaaacttaaaaaaaaaatcattttcatcaggaagagaaaatgcagatgaataatcaagaacagtttggaacctggacacagtgactcatgcctgtaatcccagcactttgggaggcccaggcaggaggatcacttgaatgcaggagtttcagacaagactgggcaacatggcacaaccctgtctctacaaaaaatacaaaaattagctgggtgtggtggtgcacacctctagtcccagctacttgggaggctgaggtggaaggattgcttgagctgagnnnnnnnnnnnnnnnnnnnnnnnnnnnnnnnnnnnnnnnnnnnnnnnnnnnnnnnnnnnnnnnnnnnnnnnnnnnnnnnnnaaaacaatgagtagggagtttctctcacaactatcaagaccgactccaaagccaaggaatgaaaatgatggggcgttggctcaggattcgatatgccagccagtgggaacagagaccaggaaggggccagtgcatctccasgggatcagtcaacgtaaaaaggggacacctcacgataaggatggaaggaaggaaggaatgctcactcaacactgaaacagagagctgggaaggcgctggccccagagctcaggagccacaggtgtcatgcttgcctgcacaracatccacctggggccccatggaaactcctggaacatgggctcagtattgggggaacccactcccaatatttcaacatacattctttctattttccctaagtgtcractggtctgagaaataaagagaaagagttcaaagagaggaattttacagctgggcctccaggtgtgacatcacctatcggtaggaytgtgatgcccacctgagccgcaaaaccagcaggtttttattaaggacttcaaaaggggagggggtgtatgaacagggagtaggtcacatgctttaaggggcaaaaagcagagcaaagatcatatgcttctgaggaaacggggcaaggacaaaatcaaaaactccgataagggtctacgttcagtggttccatgtattgtcttgataaacatcttaacagaaaacagggtttgagagcagagaaccagtttgatctcaaatttaccagggctggggtttctcaatcctggtaagcctgagggtactgcaggagaccagggcatatctcagtccttatcacaaccgcataggacagacactcccagagcggccgtttatagacctccccgcaggaatgtaattcttttcctagggtcttaatattatattccttgctaggaaaagaatttagcgatatctctcctacttgcatatccgtttataggctctctgcaagaagaaaaatatggctcctttgcccgaccccgcaggcagttagacnnnnnnnnnnnnnnnnnnnnnnnnnnnnnnnnnnnnnnnnnnnnnnnnnnnnnnnnnnnnnnnnnnnnnnnnnnnnnnnnnnnnnnnnnnnnnnnnnnnnnnnnnnnnnnnnnnnnnnnnnnnnnnnnnnnnnnnnnnnnnnnnnnnntacatcctcagcttatgaagataacaggattaagagattaaagcaagacaggcataagaaattatgagtattattagggaagtgataaatgtccatattaaaatgaaatcttcacaatttatgttcagagattgcagtaaagacaggtgtaagaaattataagagtattaattttgggaactgatatatgcccatattaaaatgaaatcttcacaatttatgttcctctgccgcggctccagcctgtccctccgttcagggtccctgacttcccgcaacagctcagccctagggaaaaatctctcttagaccagtggttctcaatgggaggagagggtactttccccaggtgcattgtcacgactgggtggtgggtgctactcatgactaggtatctcatgggtggggcccaaagatgctgccaaataccctacaatgcataggacatmtccacaccccaccacaaggaattatctagtccaaaatgtcagtatgccagggctgagaaactctctctaaacaaacttccattccttgcaaacctctgacctactgcagagggcctggaaggcgtgtgccccaggcacgcctggcctggtccagcctgccaggagtgactgggamtttccacctcaagctcctggaagtggaaactatgccgcccacccttcctgcccaggaactttctccgctgacctgcccagaccctgggcttcagcactgctattctctctgyccatgctccccaccctgggcaggccctcccttggcacagtacaggctgctggcccagaaccctgggaacattcctgacctttgctttggcttcctccagctcttggcagcttctggctggcccttgatgcccatgcccccggcccaacttgctgaagtgcccatttttccctctgcccctccgtctcaggctggcttcatctttgtgccctcccttggggagtcctgctgggtgccctcatctcccagtggccaacccagagtggatgtggggctcctctggcctggtttggagctgcccttggtctgctgtggccccaacctgctgctccacccagataggagggtacgtggactcctttggagctttaaatggaagctgggcggcctgcgttctcctctcctcctcctccctgaacccacagtgaccttgggcaaggcccttcccccatcatcgaaatgcgaagaagctgtgcctctgcggcacacagatcagagctggtgtggggggaagggagagggagcctgtgggagggggagggcgcatccattatgcagattgtgtggagtgccttcccttccccagccaggaaacgccctcccaggggccctcaagtcttccttgggaaggaaggcgtgttctcagcagccttgttttctgaggccctgaagccagccattaacttgaccattccaggggagaaactcacaggattttgtccttgagtcagaaaagggccttggcagagaagcctgaggctctcagggatcagcccagagctaagaacccctgagcgtggttctggaagcttcagctctggccagtgggggttcttccctgttcataccaagggctctgtgcccggcaggggtcgggggtgggggtgaggatgggggaggaaacaagtgcaaaaggtgcatcgtggcccagagaaggcggcctgtgctctgccctgctcctgtgtgacctccagtcatatgctggactcctctgggccacaagctcccagctgggaaaatctcagtgctctttgtgtaagggtcaggagaagcctgaggctggtgactggggccaaccagcctgctggcagcagcatcccctacacggccaccctyttggggggacaggacagcctgggtgggcctgggctctcactgtcacttaggagctctgtggccctgggaggcgtccccacccctccaagctatcatagcaatgtgatagatgggacaccttgcctggggctcagcacggtccctaccgcagactgagttccactgggacagcaaatcctgggtctgaggcacccacattctagacatccccaagccagggcacagaaacagcctcttcctcccggagtcctaatgctcaggctgctggctccctgggctgggcccctcggggtccctggcaacctaagaagcagttaaccccttcgcttctccacctcagggaagtctgaggacgtagtggttctattcaagcttctccttgcaaagggtcttattggggcctgcatcctgggcccagcctagccctggggctctggaaacagatgtaagtggcaaaggcagggcagaatgcctggccctggcagccgagcctccttgtgatggtgttggtgtcaccacccctgctagcagaacccagtctgcctccccttcccatgctgcagggacagggtctggagcacgcttccacctccctggtcacaggagcaagggaagtaatcagcccaggaagccgcgcgtttccttcctttctcaccagcccatccgggtttggtgagagagcatggacttgccctgtggagactgcagcttctggatgtgggaaggagagccctgcaggcagggggcttccaggcttgggacacctgggcattcctgggccaggtacatgcaccctcccactcagaaccccagagaaggactgcggggcccctgcagggctgcccatcagcagttcccaaaccctcactccttggggctaagggagcaatgtctctcccacaaccaagggggtggggaggaagaggagcagctccctcctccctcccgtccaccgggtcytctcatcctccctttcatcaaaaggcggaaggtggcctgagactaaggcgtggagcttccttggtcctgaaatcagagcggagtggctggatccagcccgcccctcccccgccccctgctccccttgccgccccaccaccgagaatcacctgcacctcccagccctgagcagagttgggggcaggcgggaatgaggtttctccatggccaactgctcagccactgttccccacgccactgccaccagaccctcactaaggggcctcttgcccctccctggtcaaatctgttttcaggaaagcacccaacaaacctgcaactcagaagccaaatgagacctatcccaggcaggtccrctctgcgatggtggctctcatacaccgcacagaagtgtaagttggcccccccctcactccctaaatccatgtagatgcccttagccaaacaggtctggtrtgtgggggcaggagggtggaggtaggagcatctgggggctggggctggctccaagtgctgcagagagttcactatgagctctgaagtcaaactcagatcctgctccttagctgtgtggccttgggcaagcccctcagcctctctgagcctcaggctcctcctctgtaagtggggctgttggagggatgaactgagatacacgtggcaaggtgcctggccctgagactgggggccccgtaaacagcacctgctgctctgactgaggggcagttggagatgaggggggacttacaggcccaacacctcatcagcaggatgggccctggctctrtacacatagaatgttggaaagctatgttctgggtccagttgcaagaccatcctgcccacttgctgggtcgctgaggcagagcgccctggactgtgctctggagagcagggggccgtctctgctcactgctgggcagtcagagtcaggtccccagggaactcagatcaaaatctcagggcagccttgctgggtctcagctttcagaattgatttctttggaagaacaggaggcatagccaggccagctggcaatggcttcagccacagtcccccagtgccccatgctgggtgattgatggtaggagctgtgcctccctgccagccccccaagccccattccctgccatggctccgacagggaactccctgcaattcttaggtggatcctgaaacacccagtccagactactttttcagcctcacagatggcccagagatagatactattagcccatttcacagatgggaccccagtgaggtctagagaggctctgctctagctgagctgggactcagatcctactccatgacctctkccaaggtccaggccctcttaccgtccwacggggtccttgcyggtgtcctcagcctctgccttccagaccccaggtgtcctggagctctgcagatcagagaggctagtactggaagcctgggcccatgcccccagcagcccccagcccagggggcccccaaggctgaacagcaagctcaggatcatcttggtggtggggcaggctcagctcacactcagccttggcaagtagctccagaaactgctagtgacgttgtcttcaagttaaatctcaggaggaaaagaaaatacgaggacaacaaagagaggaagtggcctgggccggcctacccggtgggtcttgtcctgccccccaactaccctggctggccccacaggggccgccaaccacacaagccagttcctgtccctgaggacttggctcagggactctgggaatgtggtagacatggggtggccccaccaaatgcatccttatgggaacctgctccctgggagccatgaaaagagcgtggacttcgaggtggggccacaggaagtggtcaggtccatstcaggggacctgctgcccatccacactgctggccaggaaatggggggcaattcatgcctcctcagcaccttcagcactgggcggctcaaagaaggsaagggactattctggggtcacacagcatgcagccagaggccaaggcatgaggaagtccttcatttccccacccccacccacctcagatcctccaaccggtttcatggcagcccagggtccagcggcatccaggatgctggtgggtagctgcacagcccaggccgcgggaggttggctgctctcacctaacaggcctatgtggccctgacccctacctaggaagctggggacaatggccaaggcgcctcccctctctgtgcctgtctgtccaggtgcagcatagacacagcacccctggggccaagagcacccagccagggctgcccccatgggtgggcagggcagtaaatgaatgagggacaggttgggaggtggccagccccctccagcccatggagggcacggggcaggagagctgggctgagccagcaggagcccagggagcctggtctctgccttcctatcctggaggaaggtgaggctgaacctccttccctccctccctccctccccgcccccactgcacgcagggctggctgggctccagctggcctccgcatcaatatttcatcggcgtcaataggaggcatcggggacagccgctgcggcagcactcgagccagctcaagcccgcagctcgcaggragatccagctccgtcctgcctgcagcagcmcaaccctgcacacccaccatggatgtcttcaagaagggcttctccatcgccaaggagggcgtggtgggtgcggtggaaaagaccaagcagggggtgacggaagcagctgagaagaccaaggagggggtcatgtatgtgggtaagtggggcatggcagggtgggacagtgtggtggccaaagggtgagtgcccagttaccttcgccagaccttactccccagccccagggaggcattttgggagggggcgaggccctggctatcaaggtggggtctccagaccctggagcacccacaakgccctgtgcacacctatgtgtgtttgkctttggcctcctcggggcctctgggtgtcagagaccgcagacagrgctggctacctgtctgtgcacgcacamacacattcccaagcataccagcctcccctgagcctggagcccctgaagccatgagcagcctgtgctcaggtggcccccaccctctccacacgggagcggctacagccaggtcacggatcccctccctccscagagagaaggggcaggctgggggatgaaacctaggctcagtgttccctcccccgcatcctctcctggcactctccagaggaggaaggggaggtcaagccaatgactcagctctggcccatcctgtcctgttgctgcttctgaggcccggccacacccgggcaggggctggaccctgggtctagccagtgtccctacctcaggcctgctctctcttgtcccccacattctgtcctgtccccttcccatccatccacttcttccagacacagcaggaagaggccctctgaaggggccgccggcccccagacaccatccttacccccccaccgaccccacagtttgtccagctgttctgttgtgtttgtcctgaccgcccccaacacctcgagggaggtctgggctgacagctccatttcctccccaggagccaagaccaaggagaatgttgtacagagcgtgacctcaggtgagaagccccagggccaggggacacatgggggataggacccctggggctcctgcatcctagtgctggggctcaaacctagagtcctgccttacccccaactggggtcccaagccctacagacccctgcagaccatraggctaaactagggtgggcgtctccttacccccaccagcatcagaggtgccctggagtcagagggagcaggggagggtcccagcagggccagggctctgagctcctgggaaggggctgcgagcctgactccagcaggcctgccttggggctggggctggggtggaggccagccagtgtcctcccatagtggccgagaagaccaaggagcaggccaacgcsgtgagcgaggctgtggtgagcagcgtcaacactgtggccaccaagaccgtggaggaggcggagaacatcgcggtcacctccggggtggtgcgcaaggtgagccccggccctcagacctgcccagtcctctcctgggcccagaaaggctgctgggcggaggcggcatcactccactccacaccccaggaaacaacacggggggctgcggctggcttcagtttcagtacccactgagcgccggcatggggtggggtccatgcttgctgttcgacctgcattcgggtctggaatcaccacaaccaccccttcgggggacttgggagcccatctcatagacaaggaaagtgaggctcaaaaccacatcttccggacggctctcagcacttaggagacaccccattttataagtgaaaacaggatcccacacggtgacaggcagcctcccgggcagtggtcaccaggccgggggctgagtagcaccagccccgcccccagggcctagcctccctccctgggctgggcggggcagctgcctcctgctgggagcctcagggaagtagcgtcccctagtggtaagaaagcagtgctgcktctgaccctaccctctgcagctgcctttgtgtgtgtgtgcacgtgtgttgagtgagcatgtgggtgcatttgtgagaatgtgtgggtgtacatgcgtgtgaatgtacacatgcgtgtgcggcccaatagcagacagcacaggagcagtggggcgcaccccagggacgggtgttggctgggtgagctgtcccagcacctgtgacacagcaagctctgctttacgcattgtacgcttattagttcatttaatagacacaaaatccatgagacggtgtggaaactaaggcccagagagattaatgtgcccaaggtcccatggctagttcatgtgagcttggaattcccctgagcagcctgtactctgagagaccctgtggcagtgtaagtggtggcctgggctaggattcctacctgggggtggggcgggggagcagtgtccagctctcctacctgctccaggcctcctaggtggtggagtctgaggctctgagcactgagaatccctgcgttaggagtgggtgggtggaagggtgggggctgccctactcctcttggctctggggcgatgcccaggtgtctgcttccagggccagcacagggtctccatgtccttggarctggcagccgctccctctcctagttcycctttctcgtygtatgaccttgagaagcaaaggaacctctctgggcctccgtgttctcatctgcaagatgggggtgagagtgtcggcctccctgggctgtgtgatgaggcagggccatgacctccatgaagcaattctcctggtctatgtgagcacccagcagaggaaggtgaccatcatcatcatcatcatcmtgtgtcccaggcagaacacatagagccccagggggctcctccctcctcacccccagcaaaagaggccctggggtgagggtgcccgggcattccttgtgaatcccggagcagggctagtgagcccttggagccacctcgagggagactcatttcctggtgacaccccaaaaccagtcacgactcatctcccagtgaactgtgaaaggcctcagcagggacyatctgaccactcatacccctggcctcatcatcagccttagggcagcaggactcagcaggtggccacctgccctgcccctggatagcctggccgactcccgccagcacagcactgcccttttatgccccactccgccaaggggcaggatggccctggggcaacacagaggtgacagtatccccgcctcccccccgtcccccgccagaggcaggtgctgaggccagagtgcagggcaatcaccagtgtggtcctacacacccagctgtcatgatatctcacgcaagtgtctggccggcatggagtgcaggagatagaagatgggaagtgagagaggactgtgtaacctctgctggccctgaccagcctgagcccagagcctgtccaggaggcaaagagagggagccatgctcctgtggactgaagtgggcctgaagcaagcctgatctgatgccaacacaccccaccactttgagctcgaaggccctgagctgcatgccaagcctccctggcctcagagtccctatgtgaaccccaatcagtcttccttgtagggctactgagggtggggtcagacctggggcttcaggggcctctgcccactctaacccccactccaccctaccccacccaggttcctcatcagtgaagcccaactaggggcttcccagagactggggaccagcttgaggggtgaagctgggctccagggtacttggtgcccctggaaggcctcggcatcatcagagccccgggtattgtctgaattgcacgcccccaatacctccagcccctccaagtacaacaaggccacgaggggcctctgctcctccttgaggccagggtagacaaggccctggttgcagggcagctaggggtctctgcattctccacatggtctcatgcccccttttgtcccctacaggaggacttgaggccatctgccccccaacaggagggtgwggcatccaaagagaaagaggaagtggcagaggaggtaggagctgggctcctggggtgcaccatkgggggttcctkggtagggaccccatcccccacagacgcactgcttccctcctgggctcccagggcccagaggggcctcctgaccttccacagcccctacagggactgtgtrcagggctaaccctgaacctgagtgggaggtccccccacggatgacccctcaggcatggggcacagaagacaacttttctcagccmactcagggtggcccattaaggctggggcctggagctgggtgtgcaggtcattctctctcccaggcccagagtgggggagactagagggctacaggccagcgtggatgacctgaagagygctcctctgccttggacaccatcccctcctagcacaaggagtgcccgccttgagtgacatgcggctgcccacgctcctgccctygtctycctggccacccttggcctgtccacctgtgctgctgcaccaacctcactgccctccctcggccccacccaccctctggtccttctgaccccacwtatgctgctgtgaattttttttttaaatgatkccaaataaaacttgagcccactcctgccatgcttcctctgggtgctgtgtagcttsaggaggggtccccaggtcctcccaggaacaggaacgggttcagcctgttgataggaccaggtatcctatagggacacacacagggcattcatgggacctgcgtgagccttcaggaacacccccaacccacccattgcctttaacatggaggaggcagcactgccttcggctccccaagacattcgacaggactcacagtcccatccacggggatagcttakctcagcctcaaggtagcccccgcctgcctgctctgagtccctgaggaacccactgtcagcaggaggtgaagataggctcctgggtcttccctccatgtgagttctgggctccagtgtcgcaagaggaacagggccacctaacatcctccctggggcagatggtgactttcaaagatggagaagtctaaacctagtgaggatgaagggcatcccacaggagagacagraggtggaccctgcggcgcctcccacctggccccagccagtctcatgctccccgctggacctggagctgggtaccccttgcacccctcctgcacccagaagcctgccagttgccaccaaaaacacaacagcagagacgcacgaagccgcaccttgacagaaaaatagtaaaaagcaacagctgctgaggtcctcacaggcgttgactgggcactgttctgagcacttcaccttatttaatcctcagaataaacctctcaggttggagctgtagatccaggttttgctgagacgcacaggactgggcagaagcccaggtggctccccagccctgctatggctgcatggaccccaaggtgcttacagtggattgcccccaacccaaagtttcaaaacaacccagggcttgctggccagtggcctacatgaaaggctgtttgcccagcccactctgaacaagcctgccgggcacgacgcaaaccacccatcatgtaggccactggccagcgtgtcctgggttgttttaaagccttgcatgccgggcrggcttgttcagaccagggttccctggggatcctggcttcccctttgatactcagatggtttgggctcaaagcatctcagtgccttgccccaggccttcaggcctgggtgttggagccagagcttgagtccgtccacatgtgacttcagacactgccctgtccacaccgcctccccatccagcctctgcagtggattcaagggcagcccaggaggctgggagcccagtcagacacagcggagccaggctgtatctgttgtctggccatgggcatccactgaggaggcagaacggagcagggggctgctggtctccacatccccaagcactgccatgggcaggcatgaagggtctggaagcagctcaggccagtcagggctgttcctgctccccagcccagacatgtacacattaagcaggcctrtatgaacccaggaggaggccacctggggcctgggtgtgcccgagagtcccctgggctgtgagagaaagcaaggaggagcaaggctrgtcaggtgatgggggtgagggagagggcacctatgcccggctcccagcgacaacctgccccaggtttcagggycctctgcctctgctggaggagcccagaggggtccctgctgcccctaccacagcccccctacaaccccctctcacatacactcagggcttgttcctggactcaaatgacaaacatcaccagaaagccccttcccagccatgggcactggcagtgctctttgcctttgaaacctcatgtgctctgcaccctgtgaggctgcttctgacctccctgcaggagcacggttgactccccttatccaccaggatacactcaagatgtttccagctgcctgcaaccccagatagtaccaaagcctacatatgtatcttcctacacgtacacatgtgcctccctatgatgaagtttatacattaggcacmgtaatagactaacaataaccagtaagaaaacggaacaattataacaatatactgtaatgaaagttatttaaaacatgaattgtttatttctagaattttcttttttttttttttttgagacggagtcttactctgtcatccaggctggagtggtggtgcgatctctgctcactgcaacctctgcctcccaggttcaagtgattctcctgcctcagcctcccaagtagcagggactacaggcgtgcgccaccacgcccagctaattttggtacttttagtacagacagggtttcaccatgttggccaggctggtctcgaactcctgacytcaagctatccacctacctcggcctcccaaagtgctgggattacaggcaggagccatcacgaccagctatttctggaattttccatttaacattttggaccttaccaattgcggtgcaggggccaagggaaaacttcccctttaccctctgaaggttcactgaaaagtcagctcatgaaagcagaatagaaatggaatacacattcattagcatgcaaggggaaatcagagtgactgccccaccacgaaatggggtacagatgagcaatggggaagtgtgggtaatttcagggggctagtaaatgattttcaggggaattcagtgggcttgaagaacatacagtggcctgggacaaagtctgttgggctcacagagcagacaacggtttgcaaaatctgtccaggtatgtgagcaggcttcagtctttcttcctgtgacagcagttcagtcagagaaaactccgggaagggaccagyggtcattgttttcttctttggtgggtccakacttaaggcasatgaggaacttcagagaacaacttcactgtatgctttggaagagacaaagggttggggggcctgtgggagtctggtcggagagaccttaaggcttcttcagttcagaatgtcacaccactatatttcggggtattggtttctgagccccaacaatgrgtaactgaaactgcagaaagcgaaatcacaaattagctgggggtggtggctcatgcctgtaatctcagctactcaggaagctgaggcagaactgcttgaacctggaaggcagaggttgcagtgagccaagatcccgccattgcactccagcctgggcaacaagagcaaaactctgtctccaaaaacaaaaaaaggraaaaaaaaaagtgacaccacagcaaactggggcgggggtgggggaaacggtaatgcggtaatgcgctccctccttctgcctctccttgtctgagaagccctggtgccctgcacgctctcacaaggtccactgctgagtcctgggcacccttcagccaatttaatcttcacacacacactttggggagacgctgtgatgtgatggggatgttgaggctcagagaagtgaggggcttgctctaagaatatctgaacccaagaggtttgactgtagtgcctgccgctagggccacgtggagctctctctaccaccatctgctgggggctggctgtctcttcccacagaggctgctcccttcctgtccagctcacagctcattgcccatggggcctggagcccagtggcaccaccagcctgtgataaactggaacactcgaaggcctgcctggctattgggcactaccggtgggatttcaggagggctggcagggctgtrgccagccaggcagggcatggctgagatgggctccccagagtccccaaggsatccatatggccrctcccagggcaaggcctcgctctgggagaggaggggcggggggctgggaggactgttgctrccgctttgttttgcctgagacctgctccctcccccttcctccrcctaatctcatcacctgcctcttccctttgcccagggttgacctcatctccattaatccataccgtgtgtgtgtgtgtgtgtgtgtgtgtgtgtgtgtgtgtgtgtgtgtgtgtacaggtgcacttccaaacaactccctctaggggctgaccccgcagcactagaagcagggtatgtgccagcagaccaagcctgtgtggcaggggcttcccagcgctccagaataggggagacmccagcagaggtgcaagaaacagccccggacaggaagcggtagagagacccagaaaggcagggtgggtgtgcactggcctccaggtcctgaaggcctactctggagtgggagtatacccagctgggtggggcctgacytacaccccttgtgtgccaggggaatgtatcttgcaagctgttttgctgcacccaaggatgaycttctccactcaggcccaggtccctaagtcccctcctaacagccacaagtcrtactctctagcgccttgcctgccccatctcaggaaaggtgacctgagaggcccaagcttattcctgccctccctgagccatgcttcctgcccaacttcctaaggcttcggtgacagacggcaatctccytgcctgggctgcacaggcacactgccctctcccccttggggttgcatggtctgcaagtgcacacacctgtatctcgccctctcaggggaaagatttaccaggccctctccggstgcatccactgggtctctggctacaggcagagagccagtcagcagtgcccctgcagctgtttggggctgggggctccgatgatgccagagccctagggtttacaggcacctaggcagattcgaggatccaagtcsctgccacatgcgtttgggtgagaccgacctcactgcctcagtttcctcctatacactgatgctatcaacaaaaatacccacttcaggaggtggttgtaaagattatacaagagactgcagagcgttaggcagcacctggcacaagacaaatgctcagtaaaagaccactgctgtcattaaggtcaacaccagccctgagctcctgccctggagctgacccagcgctcacrcccaggatcagaaagggagggctggggctgatgagctgggaggtggtgtgcgcccttctcctgcctccagctcctctctggacccctgtcctggcacctcttcggtccctggttcggtctgcccctttcccaccgcggcccgtcttaggccaggatgtgctccctgccctgcggactctggagcagggcccggccactccccggagcctgtatgacgggaaccgccccgmgccctctcccctacgcggggcaggccagccctggggcgccttaaaaaccggagctggcgcttggcatcgccactctgggcaggatccaacgtcgctccagctgctcttgacgactccacagataccccgaagccmtggcaagcaagggcttgcaggacctgaagcaacaggtggaggggaccgcccaggaagccggtgaggatagcgcgcgacctagggctcaggcaggggcacctgcgtggatgcgcaggcagaagcagcgggtcggcgcggtccgcaagttcctggaccggcagcttggctcggaaggctcggtcctccactgagacgcagggggcaggcagaacgcccaccccggcgagcagacagatggtgcccgcagggaggcagcggaacagaggctccggaggagccggagctgcgctgcgggcactgcgggagcccctccaaggaggccatgctggcgctgggcggcccgcccaggccctcaggagagggtgaaggtccaggacagggatcgggcgcggcccgccaccacttaaacccgcgcgcgccaccagaggctgccccagacctcaaagggctttgtttccatcccacccccatcgccgaaaagtaatcgtcgccttacctttaagtccccacctggcaaagaaggtccttagttcctccacctccagctctctcctccgtattctggaggtgacccagctgcggtgggggcgtgggagatgtcaggagaccactgggttggttcttcctgcacctagcccaggcttcgttaggactccagctccctgtcagtcctgcccatatcccagtcaggagacaatatccaaaccaacccctta

SEQ ID NO: 9986 - DNA, 33991 bp, Homo sapiens
  misc_feature (10404)..(10551): n is a, c, g, or t
  misc_feature (11566)..(11646): n is a, c, g, or t
actggagcccagaactcacatggagggaagacccaggagcctatcttcacctcctgctgacagtgggttcctcagggactcagagcaggcaggcgggggctaccttgaggctgagmtaagctatccccgtggatgggactgtgagtcctgtcgaatgtcttggggagccgaaggcagtgctgcctcctccatgttaaaggcaatgggtgggttgggggtgttcctgaaggctcacgcaggtcccatgaatgccctgtgtgtgtccctataggatacctggtcctatcaacaggctgaacccgttcctgttcctgggaggacctggggacccctcctsaagctacacagcacccagaggaagcatggcaggagtgggctcaagttttatttggmatcatttaaaaaaaaaattcacagcagcatawgtggggtcagaaggaccagagggtgggtggggccgagggagggcagtgaggttggtgcagcagcacaggtggacaggccaagggtggccaggragacragggcaggagcgtgggcagccgcatgtcactcaaggcgggcactccttgtgctaggaggggatggtgtccaaggcagaggagcrctcttcaggtcatccacgctggcctgtagccctctagtctcccccactctgggcctgggagagagaatgacctgcacacccagctccaggccccagccttaatgggccaccctgagtkggctgagaaaagttgtcttctgtgccccatgcctgaggggtcatccgtggggggacctcccactcaggttcagggttagccctgyacacagtccctgtaggggctgtggaaggtcaggaggcccctctgggccctgggagcccaggagggaagcagtgcgtctgtgggggatggggtccctaccmaggaacccccmatggtgcaccccaggagcccagctcctacctcctctgccacttcctctttctctttggatgccwcaccctcctgttggggggcagatggcctcaagtcctcctgtaggggacaaaagggggcatgagaccatgtggagaatgcagagacccctagctgccctgcaaccagggccttgtctaccctggcctcaaggaggagcagaggcccctcgtggccttgttgtacttggaggggctggaggtattgggggcgtgcaattcagacaatacccggggctctgatgatgccgaggccttccaggggcaccaagtaccctggagcccagcttcacccctcaagctggtccccagtctctgggaagcccctagttgggcttcactgatgaggaacctgggtggggtagggtggagtgggggttagagtgggcagaggcccctgaagccccaggtctgaccccaccctcagtagccctacaaggaagactgattggggttcacatagggactctgaggccagggaggcttggcatgcagctcagggccttcgagctcaaagtggtggggtgtgttggcatcagatcaggcttgcttcaggcccacttcagtccacaggagcatggctccctctctttgcctcctggacaggctctgggctcaggctggtcagggccagcagaggttacacagtcctctctcacttcccatcttctatctcctgcactccatgccggccagacacttgcgtgagatatcatgacagctgggtgtgtaggaccacactggtgattgccctgcactctggcctcagcacctgcctctggcgggggacgggggggaggcggggatactgtcacctctgtgttgccccagggccatcctgccccttggcggagtggggcataaaagggcagtgctgtgctggcgggagtcggccaggctatccaggggcagggcaggtggccacctgctgagtcctgctgccctaaggctgatgatgaggccaggggtatgagtggtcagatrgtccctgctgaggcctttcacagttcactgggagatgagtcgtgactggttttggggtgtcaccaggaaatgagtctccctcgaggtggctccaagggctcactagccctgctccgggattcacaaggaatgcccgggcaccctcaccccagggcctcttttgctgggggtgaggagggaggagccccctggggctctatgtgttctgcctgggacacakgatgatgatgatgatgatggtcaccttcctctgctgggtgctcacatagaccaggagaattgcttcatggaggtcatggccctgcctcatcacacagcccagggaggccgacactctcacccccatcttgcagatgagaacacggaggcccagagaggttcctttgcttctcaaggtcatacracgagaaaggrgaactaggagagggagcggctgccagytccaaggacatggagaccctgtgctggccctggaagcagacacctgggcatcgccccagagccaagaggagtagggcagcccccacccttccacccacccactcctaacgcagggattctcagtgctcagagcctcagactccaccacctaggaggcctggagcaggtaggagagctggacactgctcccccgccccacccccaggtaggaatcctagcccaggccaccacttacactgccacagggtctctcagagtacaggctgctcaggggaattccaagctcacatgaactagccatgggaccttgggcacattaatctctctgggccttagtttccacaccgtctcatggattttgtgtctattaaatgaactaataagcgtacaatgcgtaaagcagagcttgctgtgtcacaggtgctgggacagctcacccagccaacacccgtccctggggtgcgccccactgctcctgtgctgtctgctattgggccgcacacgcatgtgtacattcacacgcatgtacacccacacattctcacaaatgcacccacatgctcactcaacacacgtgcacacacacacaaaggcagctgcagagggtagggtcagamgcagcactgctttcttaccactaggggacgctacttccctgaggctcccagcaggaggcagctgccccgcccagcccagggagggaggctaggccctgggggcggggctggtgctactcagcccccggcctggtgaccactgcccgggaggctgcctgtcaccgtgtgggatcctgttttcacttataaaatggggtgtctcctaagtgctgagagccgtccggaagatgtggttttgagcctcactttccttgtctatgagatgggctcccaagtcccccgaaggggtggttgtggtgattccagacccgaatgcaggtcgaacagcaagcatggaccccaccccatgccggcgctcagtgggtactgaaactgaagccagccgcagccccccgtgttgtttcctggggtgtggagtggagtgatgccgcctccgcccagcagcctttctgggcccaggagaggactgggcaggtctgagggccggggctcaccttgcgcaccaccccggaggtgaccgcgatgttctccgcctcctccacggtcttggtggccacagtgttgacgctgctcaccacagcctcgctcacsgcgttggcctgctccttggtcttctcggccactatgggaggacactggctggcctccaccccagccccagccccaaggcaggcctgctggagtcaggctcgcagccccttcccaggagctcagagccctggccctgctgggaccctcccctgctccctctgactccagggcacctctgatgctggtgggggtaaggagacgcccaccctagtttagcctyatggtctgcaggggtctgtagggcttgggaccccagttgggggtaaggcaggactctaggtttgagccccagcactaggatgcaggagccccaggggtcctatcccccatgtgtcccctggccctggggcttctcacctgaggtcacgctctgtacaacattctccttggtcttggctcctggggaggaaatggagctgtcagcccagacctccctcgaggtgttgggggcggtcaggacaaacacaacagaacagctggacaaactgtggggtcggtgggggggtaaggatggtgtctgggggccggcggccccttcagagggcctcttcctgctgtgtctggaagaagtggatggatgggaaggggacaggacagaatgtgggggacaagagagagcaggcctgaggtagggacactggctagacccagggtccagcccctgcccgggtgtggccgggcctcagaagcagcaacaggacaggatgggccagagctgagtcattggcttgacctccccttcctcctctggagagtgccaggagaggatgcgggggagggaacactgagcctaggtttcatcccccagcctgccccttctctctgsggagggaggggatccgtgacctggctgtagccgctcccgtgtggagagggtgggggccacctgagcacaggctgctcatggcttcaggggctccaggctcaggggaggctggtatgcttgggaatgtgtktgtgcgtgcacagacaggtagccagcyctgtctgcggtctctgacacccagaggccccgaggaggccaaagmcaaacacacataggtgtgcacagggcmttgtgggtgctccagggtctggagaccccaccttgatagccagggcctcgccccctcccaaaatgcctccctggggctggggagtaaggtctggcgaaggtaactgggcactcaccctttggccaccacactgtcccaccctgccatgccccacttacccacatacatgaccccctccttggtcttctcagctgcttccgtcaccccctgcttggtcttttccaccgcacccaccacgccctccttggcgatggagaagcccttcttgaagacatccatggtgggtgtgcagggttgkgctgctgcaggcaggacggagctggatctycctgcgagctgcgggcttgagctggctcgagtgctgccgcagcggctgtccccgatgcctcctattgacgccgatgaaatattgatgcggaggccagctggagcccagccagccctgcgtgcagtgggggcggggagggagggagggagggaaggaggttcagcctcaccttcctccaggataggaaggcagagaccaggctccctgggctcctgctggctcagcccagctctcctgccccgtgccctccatgggctggagggggctggccacctcccaacctgtccctcattcatttactgccctgcccacccatgggggcagccctggctgggtgctcttggccccaggggtgctgtgtctatgctgcacctggacagacaggcacagagaggggaggcgccttggccattgtccccagcttcctaggtaggggtcagggccacataggcctgttaggtgagagcagccaacctcccgcggcctgggctgtgcagctacccaccagcatcctggatgccgctggaccctgggctgccatgaaaccggttggaggatctgaggtgggtgggggtggggaaatgaaggacttcctcatgccttggcctctggctgcatgctgtgtgaccccagaatagtcccttsccttctttgagccgcccagtgctgaaggtgctgaggaggcatgaattgccccccatttcctggccagcagtgtggatgggcagcaggtcccctgasatggacctgaccacttcctgtggccccacctcgaagtccacgctcttttcatggctcccagggagcaggttcccataaggatgcatttggtggggccaccccatgtctaccacattcccagagtccctgagccaagtcctcagggacaggaactggcttgtgtggttggcggcccctgtggggccagccagggtagttggggggcaggacaagacccaccgggtaggccggcccaggccacttcctctctttgttgtcctcgtattttcttttcctcctgagatttaacttgaagacaacgtcactagcagtttctggagctacttgccaaggctgagtgtgagctgagcctgccccaccaccaagatgatcctgagcttgctgttcagccttgggggccccctgggctgggggctgctgggggcatgggcccaggcttccagtactagcctctctgatctgcagagctccaggacacctggggtctggaaggcagaggctgaggacaccrgcaaggaccccgtwggacggtaagagggcctggaccttggmagaggtcatggagtaggatctgagtcccagctcagctagagcagagcctctctagacctcactggggtcccatctgtgaaatgggctaatagtatctatctctgggccatctgtgaggctgaaaaagtagtctggactgggtgtttcaggatccacctaagaattgcagggagttccctgtcggagccatggcagggaatggggcttggggggctggcagggaggcacagctcctaccatcaatcacccagcatggggcactgggggactgtggctgaagccattgccagctggcctggctatgcctcctgttcttccaaagaaatcaattctgaaagctgagacccagcaaggctgccctgagattttgatctgagttccctggggacctgactctgactgcccagcagtgagcagagacggccccctgctctccagagcacagtccagggcgctctgcctcagcgacccagcaagtgggcaggatggtcttgcaactggacccagaacatagctttccaacattctatgtgtayagagccagggcccatcctgctgatgaggtgttgggcctgtaagtcccccctcatctccaactgcccctcagtcagagcagcaggtgctgtttacggggcccccagtctcagggccaggcaccttgccacgtgtatctcagttcatccctccaacagccccacttacagaggaggagcctgaggctcagagaggctgaggggcttgcccaaggccacacagctaaggagcaggatctgagtttgacttcagagctcatagtgaactctctgcagcacttggagccagccccagcccccagatgctcctacctccaccctcctgcccccacayaccagacctgtttggctaagggcatctacatggatttagggagtgaggggggggccaacttacacttctgtgcggtgtatgagagccaccatcgcagagyggacctgcctgggataggtctcatttggcttctgagttgcaggtttgttgggtgctttcctgaaaacagatttgaccagggaggggcaagaggccccttagtgagggtctggtggcagtggcgtggggaacagtggctgagcagttggccatggagaaacctcattcccgcctgcccccaactctgctcagggctgggaggtgcaggtgattctcggtggtggggcggcaaggggagcagggggcgggggaggggcgggctggatccagccactccgctctgatttcaggaccaaggaagctccacgccttagtctcaggccaccttccgccttttgatgaaagggaggatgagargacccggtggacgggagggaggagggagctgctcctcttcctccccacccccttggttgtgggagagacattgctcccttagccccaaggagtgagggtttgggaactgctgatgggcagccctgcaggggccccgcagtccttctctggggttctgagtgggagggtgcatgtacctggcccaggaatgcccaggtgtcccaagcctggaagccccctgcctgcagggctctccttcccacatccagaagctgcagtctccacagggcaagtccatgctctctcaccaaacccggatgggctggtgagaaaggaaggaaacgcgcggcttcctgggctgattacttcccttgctcctgtgaccagggaggtggaagcgtgctccagaccctgtccctgcagcatgggaaggggaggcagactgggttctgctagcaggggtggtgacaccaacaccatcacaaggaggctcggctgccagggccaggcattctgccctgcctttgccacttacatctgtttccagagccccagggctaggctgggcccaggatgcaggccccaataagaccctttgcaaggagaagcttgaatagaaccactacgtcctcagacttccctgaggtggagaagcgaaggggttaactgcttcttaggttgccagggaccccgaggggcccagcccagggagccagcagcctgagcattaggactccgggaggaagaggctgtttctgtgccctggcttggggatgtctagaatgtgggtgcctcagacccaggatttgctgtcccagtggaactcagtctgcggtagggaccgtgctgagccccaggcaaggtgtcccatctatcacattgctatgatagcttggaggggtggggacgcctcccagggccacagagctcctaagtgacagtgagagcccaggcccacccaggctgtcctgtccccccaaragggtggccgtgtaggggatgctgctgccagcaggctggttggccccagtcaccagcctcaggcttctcctgacccttacacaaagagcactgagattttcccagctgggagcttgtggcccagaggagtccagcatatgactggaggtcacacaggagcagggcagagcacaggccgccttctctgggccacgatgcaccttttgcacttgtttcctcccccatcctcacccccacccccgacccctgccgggcacagagcccttggtatgaacagggaagaacccccactggccagagctgaagcttccagaaccacgctcaggggttcttagctctgggctgatccctgagagcctcaggcttctctgccaaggcccttttctgactcaaggacaaaatcctgtgagtttctcccctggaatggtcaagttaatggctggcttcagggcctcagaaaacaaggctgctgagaacacgccttccttcccaaggaagacttgagggcccctgggagggcgtttcctggctggggaagggaaggcactccacacaatctgcataatggatgcgccctccccctcccacaggctccctctcccttccccccacaccagctctgatctgtgtgccgcagaggcacagcttcttcgcatttcgatgatgggggaagggccttgcccaaggtcactgtgggttcagggaggaggaggagaggagaacgcaggccgcccagcttccatttaaagctccaaaggagtccacgtaccctcctatctgggtggagcagcaggttggggccacagcagaccaagggcagctccaaaccaggccagaggagccccacatccactctgggttggccactgggagatgagggcacccagcaggactccccaagggagggcacaaagatgaagccagcctgagacggaggggcagagggaaaaatgggcacttcagcaagttgggccgggggcatgggcatcaagggccagccagaagctgccaagagctggaggaagccaaagcaaaggtcaggaatgttcccagggttctgggccagcagcctgtactgtgccaagggagggcctgcccagggtggggagcatggrcagagagaatagcagtgctgaagcccagggtctgggcaggtcagcggagaaagttcctgggcaggaagggtgggcggcatagtttccacttccaggagcttgaggtggaaaktcccagtcactcctggcaggctggaccaggccaggcgtgcctggggcacacgccttccaggccctctgcagtaggtcagaggtttgcaaggaatggaagtttgtttagagagagtttctcagccctggcatactgacattttggactagataattccttgtggtggggtgtggakatgtcctatgcattgtagggtatttggcagcatctttgggccccacccatgagatacctagtcatgagtagcacccaccacccagtcgtgacaatgcacctggggaaagtaccctctcctcccattgagaaccactggtctaagagagatttttccctagggctgagctgttgcgggaagtcagggaccctgaacggagggacaggctggagccgcggcagaggaacataaattgtgaagatttcattttaatatgggcatatatcagttcccaaaattaatactcttataatttcttacacctgtctttactgcaatctctgaacataaattgtgaagatttcattttaatatggacatttatcacttccctaataatactcataatttcttatgcctgtcttgctttaatctcttaatcctgttatcttcataagctgaggatgtannnnnnnnnnnnnnnnnnnnnnnnnnnnnnnnnnnnnnnnnnnnnnnnnnnnnnnnnnnnnnnnnnnnnnnnnnnnnnnnnnnnnnnnnnnnnnnnnnnnnnnnnnnnnnnnnnnnnnnnnnnnnnnnnnnnnnnnnnnnnnnnnnnngtctaactgcctgcggggtcgggcaaaggagccatatttttcttcttgcagagagcctataaacggatatgcaagtaggagagatatcgctaaattcttttcctagcaaggaatataatattaagaccctaggaaaagaattacattcctgcggggaggtctataaacggccgctctgggagtgtctgtcctatgcggttgtgataaggactgagatatgccctggtctcctgcagtaccctcaggcttaccaggattgagaaaccccagccctggtaaatttgagatcaaactggttctctgctctcaaaccctgttttctgttaagatgtttatcaagacaatacatggaaccactgaacgtagacccttatcggagtttttgattttgtccttgccccgtttcctcagaagcatatgatctttgctctgctttttgccccttaaagcatgtgacctactccctgttcatacaccccctccccttttgaagtccttaataaaaacctgctggttttgcggctcaggtgggcatcacartcctaccgataggtgatgtcacacctggaggcccagctgtaaaattcctctctttgaactctttctctttatttctcagaccagtygacacttagggaaaatagaaagaatgtatgttgaaatattgggagtgggttcccccaatactgagcccatgttccaggagtttccatggggccccaggtggatgtytgtgcaggcaagcatgacacctgtggctcctgagctctggggccagcgccttcccagctctctgtttcagtgttgagtgagcattccttccttccttccatccttatcgtgaggtgtcccctttttacgttgactgatcccttggagatgcactggccccttcctggtctctgttcccactggctggcatatcgaatcctgagccaacgccscatcattttcattccttggctttggagtcggtcttgatagttgtgagagaaactccctactcattgttttnnnnnnnnnnnnnnnnnnnnnnnnnnnnnnnnnnnnnnnnnnnnnnnnnnnnnnnnnnnnnnnnnnnnnnnnnnnnnnnnnctcagctcaagcaatccttccacctcagcctcccaagtagctgggactagaggtgtgcaccaccacacccagctaatttttgtattttttgtagagacagggttgtgccatgttgcccagtcttgtctgaaactcctgcattcaagtgatcctcctgcctgggcctcccaaagtgctgggattacaggcatgagtcactgtgtccaggttccaaactgttcttgattattcatctgcattttctcttcctgatgaaaatgattttttttttaagtttcatttttattagttatatatactcataggcaggggtcagaaaactatggccagtgggccaaatccagcccatcacctgtttttgctaacaaagttttattggagcacagacaggctggttcatttatatgttgtcattgacttcttttgtggtacaatggcagagttgagtagatgggacagagttcatgtggcctggaaagcctgaaaccatggccagcatcaggggcatgtgacctgtgcagtcacacacaaggccctgcactctggagggccccaccctgggtgtcaccatcttgaaattcttcatactttttgaaggagaggccccacatattcattttgcactgggccctgaagattatgtagctggccttgtgtcaaatatttactacctgtacccttagaaaaaaagtttgctgatctcctgattaggagtcaactggttctataaggcttgttgagacagtcagaagccccagctccctctggtcccaagggcaatgactttcaactttgcaggtgattcttttgcatttacctctgtatcactaaagaacatgcttgcattgctacttcttaggaggtagcattatctttttttttctttgagatggagtttcactcttgttgcccaggctggagtgcaatggcgtgatcttggctcactgcaacctccacctcccagattcaagcaattatcctgcctcagcctcccgagtagctgggatggaagtagcattatctatgagctagatctcattcctaccccaaagcaaatgcatgtgcacgcatccatagggccatgtgtactgctcagcattaagccttgaaataaactgtgaaacttttttgcccccttgcacacttttggttttccctgtagtaaaaatttagaactcacagagttctaaaatttcatgtcttgcttttttcttctgcttaytctgtgtctttatcactaactcaactccacaccctcagccagttgtccacatctgctctctacactcattcatgccaggtgtcagatcagctgcrtcttcttggagatgtggctcccagagcctccaggtgtgttccaatgtgaactgctgccctcataccacagcccattgtcattctggaggctctcttcacctggtttttgtgttggaacctgtttcctsatcttgtgctttctctttcttgattttctctgttgttttgttagagtgtttcytgtgacaccacggttctgcatcctgggtgtgccatgcaattacccagagagccttaaaatgctggtgctcaggccctaagctcaggggatctaggagactattatttttctttctttttattattattattatttttgagacggagtctctcactgtcacccaggytggagtgcaatggtgtgatcttggcccaccacaacctctgcctcccgggktcaagcgattcttctgcctcagcctcccaagtagctaggataattaggagattatgcccagataattttttgtatttttagtagagacagggtgtcactatgttggccaggctggtcacaaactcctgacgtcgtgatccgcctgcttcggcctcccaaagtgctgggattacaggcatgagccaccgtacccggcctctttttattattttttgtattttttgtagagatgaagtctcactrtattgcccaggctggtctcaaattcctagtctcaagcagtcttcctgcctcggcctcccagtgttgggatgatcgtcatgagccactgcacctggcccaagactattattattattattattatyattattattattattattgagayggagtctcgctctgtcacccaggctggagtgcagtggtacagtctccactcactgcaacctctgccttccgggttcaagtrattctcctgcctcagtctcccgagtagctgggattacaggcgtgcaccaccatgcccggctaatatttgtatttttagtggagacaaggttttgccatgtttgccaggctggtctggaacccctgacctcaagtgatccacctgccttggcctcccaaagtgctggaattacaggcatgagccaccacacccagccccaagactattatttttaaagtgtcacacaatggttttgtttttgggtgtctttttttttttttgagatggggtctcactatgtctccaggctgatctcaaactccaggcctcaagcagttctcccacctcagtcacttgagtatctgggattacaggtgcaagccaccacacctggcttgcatgatggtgttgatgtgcaggcaatatttcaaaccactgctcatcaggtagtctcctactgggatacatgggaggtaaatgttctgaaacctgggttgtttgaaaatgtctttattctcactccccacactggttcatagttaggctggatatragattctgggttgtaaattatttttcttcagtattttgaatgcaattttcactgtgttccagtttccaatattgctgttgagaggttcaaagccattccaattactgattttgtatgagtgtgtttgtcttggttttcctctctggaagcacgtagaaaccatctttgttcccagagttctaaaatttcatatgacatgttttgatgtaagtgtattttcatcatattgcaggtaactggtggtgcttttaatctggaaattgaagtccttaacttctggaatatgttttttgtttgttgttgagacaaggtctcgctcttttgctcaggctggagtccagtggcgcaatcatagctcactgaagcctcaacctcctgggctcacgggacccttccacctcagccatctgaggagctgggactacaggtgtacatcaccacacctggctaattttttaatttttttgtggagattgagatcttgccatgttgctcaggctggtctcraactcctgagctcaagtgatcctcctgcctcaacctcccaaaatactgggaktacaggcatgagccaccatgcccggcctgattttttttcattgatgatttyctccatctgttctctctttctgaaatttgtactayttggatgttacatttgcaagactggtcgtctatttttcttttctctttccaattttcatctctctgtttgctcttttagggaaatttctttaactttaccctctaacgtttccattaaatttattttcatttytactgttacgtttttaatttccaagagttcctttttgttttctgaatgctcacscttcctctcccatctccccctcatttgtttttttcatagcttcctggtcttgtktcttgggtgcagtaatttcttttatcaacctggaaatcttagtacaaatgtttgagtggttctcttctccttacacagtcttagtttttgtccaggttgacatttttttgtttgcccacttcaacctctttttttttttttttttttgagatagggttttgctgtgcacccaggctgaagtgtagtggcataatcatggctcrctgcagcctcaaacttctgggctcaagcaatcctcctacctcagcctcctgaatagctgggactacaggcatgcgccaccacayctggctaattttttgtagggatgaggtctcactacgttgcacaggctggactcaaactcctgggctccaaggatcctcccacctcagcctcccaaagtgctggggttacaggcgtgcgccactgtacctggccctcttttggaatacagtgtttcttgggtaaatcttggatgtctgctcacttaagaggagaaagactgaraaactgactggaagctggggtgtatgaatactcctttcttacccattttgtcataggatcttctggttggctatttttatgggagaacccctgctgtcagcagctttgggtcttttcctctcgggctggcttattttcctgagaaacttttccagtctgctgctgagagggtaaagcaggctggggactcagcactcaaaatatggtcactcggctgggtacagtggctcacgcctgtaatcccagcactttgggagkctgaggcaggtggatcacgaggtcaggagtttaagaccagcctggccaacatagtgaaaccccgtctctactaaaaatacaaaaaaaattagccaggcttggtggtgggcacctgtaatcccagcccacttgggaggctgaggcaaggagaatcgcttgaacctgggaggtggaggttgcagcaagccgagattgcaccactgcactccagcccaagcgacagtgcgagactccgtctcaaaaaaaaaaaagtcactcgaatcccccgcccctgcctttcccaacactatcccctgtgtgacagtgcttgatggccccaggacaaagaccrgctccagagaataaaatcccggcactgacagccacttcatcaccaaggcctctgaatgctgctttctaagagcccacaaatgtggccacttctcccatgtccaccatcactcagtccaagttgccatcatctctccccagaccgtggacacagctgccaacgtcttgccctcccatcatctctgcacccagggaccagggtggctctttcatgccacttccctgctgaaacccctccatgatttcccatgccctcaggacatgggccagctcctccgctgaggtctggcttctcccttcatcccagcctccttctgcagccccttcctcaccctcttgcacccctgtcacatctggtgcctcatccgactttctggccttaagacacagccccattagctccttctcctgaaagtctctgcagatcctagcacttctcacccattctaagagtgcccgctctccctggggatcctgaagggaaagtctgcacctccacatccacaccctgagcttgagtgcagcacccggcacccaagaggtgctgagctgtactgtgccacagagatcattgccactttcaactctgacgagctctgttctgggagctggctgcctggggaagggctctctgaccactgccactgaccccatggagtcagccactgggtctgtgaactggggctctgtcagcatgagtgtccccccgctcctgggaccaccacagtacatgctggtgaagggccaggatggaagggctacctatcaggtgtgcgggatgctgagtgtgacccccaaccaccttgcatgaccttgatgcggtggccatcccagagaggacactgctccacccagctgcttacctttccttaggacaactgtttgaaagtccctttctagaatggtcctaatgggcatggccagggagctggtccctcatgtaagtagcaactgggcaggctgccagggcagctggaatggggcagtggagctgtgttcacagaacgcttgtcaggagccaggcacctggtgcttctctgcccacttaaaggagggcattacgatcgccattgtatagatggggaaagagaagctccctaagtgcctcactcagggtcacacagccagaaagtgtgagggattcgaacccaggattctccagccccagctgcacgttggtagcaggagaaacagcgagagctttctggctctgtggctaacctcaccaaagggaatccatgcagacagctgcagtgcacacggtgttttccccacactctggctgttagttttgttggctaaaacaatcatcaccctggagctgcttttcacagttctagattgtggtgggtttctcagcctctctgctggctcggggaggcttcgggaaggtggtggagcaggtgccctctttgcaggtagggaktgtgaaacatttgctstggagcccagggatgaataatgcggaaggctctcttctcaggataatggattccagaatcccagcactgctcckgcaggaggcgaggaccggtggctctgcactggcaccccctgttgacctgggtgtggctcagcagccttctcctctggcttgttttccagtaactggtgcccctacccaatgtccaagctggtcaccttactagctctttgcaaaacagagaaattcctcatccactcgcagcagccrtgtccgcagggagctccagactgccagaaagtcaaagtcatgtgagtaggggmgggtgggccatttgcccaggcctggagcgggccctccctggaatcactgagccagcccttctcctcttccaggtaccgcatggcccacaagccagtgtaccaggtcaagcagaaggtgmtgacctctttggcctggaggtgctgccctggctacacgggccccaactgcgagcaccacggtagggctccctgcggcccccttccccccttgacctctgatccccaaggtcaagcagctcctctgaccactggggtcaataactaatgctttcttctgcagattccatggcaatccctgagcctgcagatcctggtgacagccaccaggaacctcaggatggaccagtcagcttcaaacctggtgtgttgctttccggaaggggaaggcaggcaggctggtggggcccatgtagccagctggccctttttcctgtgatacagcagtgccatttcagggaaaccttgcctccagaatcagcaaggcctgctctgtggcctgtaccacctcccaccttgaaggccaggctcacagggcccccagcggcctactggccaagcacacacacccttttccttcaccccatcttctgggaaggactggttcatctggcactttccttgccccgctgaaccacacaagcccttgtgcctggaaaaagcattctcaccctttcccacagccctaaccagagccaggaagtcatgctgtccttggtcttggagtcagcacaggaaacccaccaagagacaccatttgcagcaggrccctttaaggctgggcccaagattgagaaagtaaatgagtttcattatgtggtgaagtatttattgacaagggctgccaagaatgaagttgtgaggccatgtgcatgtgctgaggaggggagtgtaccatgattgattagtcatgtctgctgtaggtgtaggaggcagggtgagggctcacttgctatgcatttgccctccaggggtttaaggcttctaagctcctgctcagaggacatcagcagctaacttccctgctctcagccttcaactctccttctctgaaccttgtgatcttcccaggcctggtgagttrgcccttgacatttatgtctgctgtgtatttaggccaccttgctgcagtgatcaatgaggttgaggtgcaacaggaacagcaggaacatctgctggsagatctccagaatgatgtgcaccgggtggcagacagcctgccaggcctgtggaaagccctgcctggtaacctcacagstgcagtgatggaagcaaatcaaacagggcacggtgagtggcaggctctaggggctgaggaagagcctggtcacattgaggggaggaggggaggaccccgctggtcccagcctgggaggagtgtctgctcctgcagggcttgtgtcacaccacatgtctgttgcagagttccctgatagatccttggagcaggtgctgctaccccacgtggacaccttcctacaagtgcatttcagccccatctggaggagctttaaccaaagcctgcacagccttacccaggccataagaaacctgtctcttgacgtggaggccaaccgccaggccatctccagagtccaggacagtgccgtggccagggctgacttccaggagcttggtgccaaatttgaggccaaggtccaggagaacactcagagagtgggtcagctgcgacaggacgtggaggaccgcctgcacgcccagcactttaccctgcaccgctcgatctcagagctccaagccgatgtggacaccaaattgaagaggctgcacaaggctcaggaggccccagggaccaatggcagtctggtgttggcaacgcctggggctggggcaaggcctgagccggacagcctgcaggccaggctgggccagctgcagaggaacctctcagagctgcacatgaccacggcccgcagggaggaggagttgcagtacaccctggaggacatgagggccaccctgacccggcacgtggatgagatcaaggaactgtactccgaatcggacgagactttcgatcagattagcaaggtggagcggcaggtggaggagctgcaggtgaaccacacggcgctccgtgagctgcgcgtgatcctgatggagaagtctctgatcatggaggagaacaaggaggaggtggagcggcagctcctggagctcaacctcacgctgcagcacctgcagggtggccatgccgacctcatcaagtacgtgaaggactgcaattgccagaagctctatttagacctggacgtcatccgggagggccagagggacgccacgcgtgccctggaggagacccaggtgagcctggacgagcggcggcagctggacggctcctccctgcaggccctgcagaacgccgtggacgccgtgtcgctggccgtggacgcgcacaaagcggagggcgagcgggcgcgggcggccacgtcgcggctccggagccaagtgcaggcgctggatgacgaggtgggcgcgctgaaggcggccgcggccgaggcccgccacgaggtgcgccagctgcacagcgccttcgccgccctgctggaggacgcgctgcggcacgaggcggtgctggccgcgctcttcggggaggaggtgctggaggagatgtctgagcagacgccgggaccgctgcccctgagctacgagcagatccgcgtggccctgcaggacgccgctagcgggctgcaggagcaggcgctcggctgggacgagctggccgcccgagtgacggccctggagcaggcctcggagcccccgcggccggcagagcacctggagcccagccacgacgcgggccgcgaggaggccgccaccaccgccctggccgggctggcgcgggagctccagagcctgagcaacgacgtcaagaatgtcgggcggtgctgcgaggcygaggccggggccggggccgcctccctcaacgcctcccttsacggcctccacaacgcactcttcgccactcagcgcagcttggagcagcaccagcggctcttccacagcctctttgggaacttccaagggctcatggaagccaacgtcagcctggacctggggaagctgcagaccatgctgagcaggaaagggaagaagcagcagaaagacctggaagctccccggaagagggacaagaaggaagcggagcctttggtggacatacgggtcacagggcctgtgccaggtgccttgggcgcggcgctctgggaggcaggtgagttcytgggctggggagactggacgagcctaggaggccagggccggctgccggcagctcttctgcctccaagagggccaggaagaaagagaacaggatggccatccgtcacccctactaggtccaccttccccttggcccacctgcttctcaggggtgtgggtctctcaagctacctggcttatggggagacagaagtcacaagaaccacctgctagtgccagagcccgtgagcggsatagcctggaggccacaggcacaatagtgccgcctactgctcctgctacagagagggcatcgcctcctgccctgccagggcagccttcaagtccccccatctcatctcttcacctcacccccttcattcccatgtgcgtttaagccactgtatctaggaagaatgtggatagggactgtggccacttgcagccccacttagttctgtttcattttccatgattttagttttttttttctttttcttttcttyttttttttttttaagatgggtctcactttgtcgtccaggcttgagtacagtggtgggatcatggctcactgcagcctaracctctccaggctcagctgatcctcccacttcagcctccagagtagctaggacttayaggcatgtgtcaccatgcctagctaatttttgtactttttgtagagacagggtcttgctatggtgcccaggctggtctcaaattcctgggatcaagtaatctgcccacctcagcctcctaaagtgttaggattacaggtgtgagccatgtgcccagccttgatttcagtttcttgcatcaaccacgatcagaaaataggtgagtacagtacaataagattttgagagagggagacaccacattcatataacttttattacagtatactgttataattgctttatattttattattattgtcaatctcttactgtgcctaatttacaagttaaactttggcataggtatgtacatagaggaaaataaatagtatatatagggtttggtactgtctgagatttcaggcacctgctaaggtcttggaacacacctcagtggactgtacagggaaagccgtgggccctgaaaggagctcattccctctgcaaatacagttaacctgtctcatcgctctgtgctagtccccttcctgggctttaccacaatggcccatcccaacaggtcaatgacacactcatcagcacttccatcttacctgaaactgaggcgcaaacacaagtttcctgcttgcacagctagtgagcagcagaggagcgctgtctttagggtgccggttcttcacctccagaaggccctccatggctggtccctgcagggccctgggcctgggagctggctttgaggctgaaggcatgtgcaaccaagcttcccatcccctccctgagtgtggtccygggagggggacaactaggctctgtgtctcaagtgactctctctgccagaggctggccttggagctgtggcctctccccacccagacacagggctaagtacaaggccaccatcttggccatgtgcagcctggcgtgtggcaagtccaaggccttgttgaaggtcccgtcccaggcagcccctgccccagctgaccctccctatggcccaagaggcaatgtrgagcagtgggaagcacccaggctctggcatcacttgtctgtttcttcctcagtaaaatggcagaatccctacccatgtcaaagttttgttatgaagactgctgcgtttaccaaatacctagcacgaggcttacctcatgtaggaacgcagtcaacgttttcccatttccccagcattttcagggttcaggttgtgtccaccgacactgacacttctctcttgtttcctctcgtgcgtggtgcaaggcttcaatatgctgatgactttcagaatttgccccacrgtttggaaatgtgtttaccacgacgatatttatttcaaaaaaatgttgttcttaaaaacaaatttccaggccgggcgcagtggctcatgcctataatcccarcagtttgggaggccgaggcgggtggatcacttgaggtcaggagttcaagaccagcctggccaacatggtgaaaccccatctctactaaaaatacaaaattagccgggtgtggtggcgggcgcctaatcccagctactcgggaggctgagacaggagaatcacttgaacccgggaggcagaggctgcagtgagccgagattgcgccactgcactccagcctgggcaagaagagcgaaactgtcaaaaaaaaaaaaaaaattagcccggtgtggtggcaggcacctgtaatcccaactacctggaaggctgaggcaggagaatcgcttgaacctgggaggcagaggttgctgtgagccaagatagctccattgcactccagcctgggcggcagagtaggactctgtctcaaacacacacacacacacacacacacacamamacacacaccccaaatttccctttatttgtttgtaggaaggctgtagggcttgaatgtgtgccctgcagggaagcacactctgagtttgcacagcccttcccgcatcttagggcctgtcaggcgcaaggctgggttggggtgggggtctctctctgcggcggaactccctgcgcaggcgcccggacggaacggccggaacgagggcctagcaccggtagagggcgctgcgggccggccttccttcggctaggcaagagaaccacctgcagggtgttaggggaattgcagaggcagccgccggcctctgacttgggcacaatcttttttttttttttttttttttttttttttttgagacggagtctcgccctttcgctcaggggggagtgcaatggcacgatctcggctcactgcaacctccgccttccgggttcaaacgattctcctgcctcagcctcccgagtagctaggattacaggcgcctgccaccatgcccagctaatttttgtagttttagtagagacgggatttcaccatgttggccaggctggtctctatctcctgacctcgtgatccgcccacctcggccttccaaagtgctgggattacaggcgtgagccattgcgcccggcatttttttttttttttttttttgacggagtttcactctcgttgcccaggctggagtgcaacggcgtgatctcggctcacggcaacctccgcctcccgggtgcaagcgattctcatgcctcagcctcccaagtagctgggattacaggtatgccccaccacgcctggctaattttgtatttttagtagagatgggatttctccatgttggtcacgctggtctcgaattsccgacttcaggtgatccgcccgccttggcctcccaaagtgctgggattacaggcgtgagccactgcgcccggctgatttgacacaatctgaacacaaatgagaaagctattctcagctgtctaattctcagaaaatcttccagaactagagaaaagcaacatttttttattcacaaaggcttgctggattgggagtcaaagagctgaggcttgagttccgggacccaagtcagtaattgctcagcaaactgctcctctgaaggctttggttttatcacctaagaaatggggaccttgttttaaacccctacagagggagcaagttgaggaaccccatggtggacatgacctcgttggtgccaaggccagtgtcacagccaggacccaagtaggacttacctttcctgtgccatctcatgaccctgtccccagctgcccaaccatgctgtccaggcagcaggactggcttcttcctggctgtttgtacaccctccacacatggcagcttcctctgcttctgtgcccgtgcatgggcctggcmccagtgttctgtcagtgttcctgtcctaaggctggccaaagtggtccctgcagagaaccagaagtctagagattcaaggtctgttcccaggaggcttggtaatttactagttgtgtggtctggagcaataagctttttctttctgggcctcaatttacccatatgtaagatgaccagcttggccagtaacagtggctcacacctgtaatcccagcactttgcggggttgaggtgggaggaccgcttgagctcaggagtttgagaccagcctgggcaacagagcaagactctgtctctacaaaaaataaaaaattagccaggcatgatggcgtatgcctgtagacccagctactcaggtggctgaggtgggaggattgcttgagcccaggaagttgaggctgcagtgagccatgatcgccaatgcactccagtctgggcaacaagagaccctttatcaactaaaaaaaagaagaccagcttgaaggggcttctcttccctggctccacctgctctttccttctttctccaaggttctgtcttcaacatccaggaggatccagccttcatggctctgcagataccttcccagtgttagcattattattaccttgaggatggataytttctccctctcccctgagtatctcaagattcctagcaagtggtggtcgtctgggagtcagagacccgtgttcctgtcccagcctgccatttacaaaccatgtagccttgggcagccggtgaaggattcaayctgttttgtcaatcagggatactgtctctcaaggaagttggaaggaaaagggatcaaacgagaaagtgctttgtggctgggcatggtggctcacctgcaagcccaacattttgggaagctgaggctggaggatcacttgagcccaggagctccagatcagcctgggcaacatagtaagactccatctctacgttaaaaaaaaaaaaagggctgcagtgagtcatgaccactgctgcactccagcctgggagacagagtgagtccctgtctaaaaaaaaaatgaaagtattttgttaaaatgtacaccagctcagacaacagacttgcattttccttcctctctattagtgaaaaacagaattggccatctagcttttctcctgcaataacactgctgttgggaatatctaggttatctagaaatagtgacctatttccattgctaataaggtgaggacggtaggtctcagggtttaatttcccacccaatggtgtaagggatgaatcactaagcactgtcctgttatgtttcaggatcccctgtggccttctatgccagsttttcagaagggacggctgccctgcagacagtgaagttcaacaccacatacatcaacattggcagcagctacttccctgaacatggctacttccgagcccctgagcgtggtgtctacctgtttgcagtgagcgttgaatttggcccagggccaggcacygggcagctggtgtttggaggtcaccatcggactccagtctgtaccactgggcaggggagtggaagcacagcaacgstctttgccatggctgagctgcagaagggtgagcgagtatggtttgagttaacccagggatcaataacaaagagaagcctgtcgggcactgcatttgggggcttcctgatgtttaagacctgaaccccagccccaatctgatcagacatcatggactcgcccagctctcctcggcctggggctcyggccaaggatgggctggaggtcattcagttggtctgtctcttccctggaaaccttcygcaaagatggtgtggtgtacgtggcttccctgtaaccacatggggcttggccatttctccatgatgagaaggactggaatgcttctccgggcaggacatggtcctaggaagcctgaaccttggcttggcatgccttctcagacagcacggcctgggctccaactcttcaccacaccctgtattctacaacttctttggtgttttgctcctcctgtggttggaaacttctgtacaacactttaaacttttctcttgcttcctcttctcttctcccttatcgtatgatagaaagacattcttccccaggaggaatgtttaaaatggaggcaacattttggccaacattggaaagcactagagggcaatgggattaaaccaacctgcttggtctctattagtcagtaatgaagacgacagcctggccaaccaagggaaaggaaattagtatctttagtttcagtcattccttgtaggatatggtttagctgtgcccccacctaaaatatcatcttgaattgtaatccctataatccccacatcaagggagagatcaggtggaggtaattggatcttgggggcggttcccccatgctgttcttgtgatagttctcacgagatctgatgattttataagtttgatagttcctcctgtgttcattctccttcctgccaccttgtgaagatgccttggttcctcttcactgtctgccatgattgtaagtttcctgaggcctccccagccatgtggaacagtgagtcaattaaacctctttcctttataaattatccagtcttgggcaattcttgatagcagtgtgaaaatggactaatacacttgtgtttatctgtaatttaaatttcatgtctttttctccttgccttacatagggtaaagaccaagaaatgccaaacgtgaactaaaatatgtagggccttcaacttttttacttcctccagtatcttaggaccatcgtaattcttgttagcatctctaaccaggaggcagctgagggaggagggaaagaagactgtaaaaatccccctcactaatgatcaactttggaataaagtgatgcccttcaaatctctgcctcatttacttctggagggcaaaaataattggtagagtaggtaaaaaaaacatgggacaacgtgaaactatgtgggtaaatgtgactgattattccaggccctgttatgtagaatgatttccgtttattctatataaaacacttggaagtttccacactaggcaaagatactaatactggactagacagtacagctcatagctgcaattattcctgtaatataccagcatatggttttcaaaaaagttcagatcctatagcaaactggcctgagaaaacagtcatctagctatcagaaacaaggttttttttggtattaagtactcaaaatttgttgaatatagtcttctctataagaaaatcagattgctgaggcaggagaatcggytgaacccgggaggcggaggttgcagtgagctgagatggtgacactgcaccccagcctgggagacagagcgagactctgtctcaaaaaaaamaaaaaaaaaaaatcagactggacttcgtagtgagttgcttgttggcgttaacaaggttatcagcacttctcattgtttgctaggagttattacttcacttgttcctcagaatttatttagcactaagttttgtgcactcaatgtgctaaaacatcggtgttaaaaggaacagtatgccaggccacactgctcatgtttgacctggggtaaatcacaacctctcttgaactttgtctttagtgtgaggtggttgatcttacagctctaattaggtattctggcattcttttttgagacggagtcttgctctgtcacccacgctggagtgcartggcgcaatctcagctcactgcaacctctgcctcccrggctcaagcaattctcctgcctcagcctctcgagtaactgggattagaggcacccaccactatgcccgcctaatttttgtatttttagtagagacagggtttcaccatgttggccaggctggtcttgaattcctgacctcaaatgatcctcccacctcagcctcccaaagtgctgggattacaggtgtgggccaccacgcctggcctctggcattttattatcttaaccacaggtttaagtatcacccacccccggtgcagctctcagttaccaagaccaattctgccccaaggcatgaagcagayggccacgccagaacaaagattagaagcccagtagcaggtgagccttgctgctgcagactgtgctgtgtcttctttctgctcaatcatgcagtgactggtcaggctctgctgttaacagttgagacattaggtaatgcagtcttatcctttggaagttactgcccatagtaaatgaagtgaattgatcccttctggaaggggtacatgtcatccaaccctcatacagttggtcctctttgagaggaagattatacatgaaagtgctaacgggcaagctctgccaacagcatggatgtgtcactccagaagtttctgggatgagaactagagaaatggttcttctggacagggtgttttccatgcaacaaaacatatatgactgcatttcacaaaaccttaacatcaagtttaagggcaaattttctgtttaaacggtcctaaaattaggacccccccccsagattagcaagacttctgaagttcatctgatagacttcctgtctccacctgggtggaggctcctcctgtcctgcaagcagaccccccgttacccagaccagcggtcagcaccctcactgtggcacccaaaacaccacaatggacggagcacacggtggtacctgcaaacctgatgtggaaaaaatattttaaaatccccaaattggtggctcatgcctgtaatctcagcactttgggaggccgaggcgggtggatcacctgaggtcacgagttcaagaccagcctggccaatgtgatgaaaccccatctctactaaaaatataaaaattagccaggcgtggtggcgggtgcttgtaatccccactactcgggaggctgaggcaggagaatcacttgaacctgggatgcagaagttgcaatgagctgagatcgagccgttgcactccagcctgcgcaacaagagtgaatgaaactccatctcaaaaaaaaaaaaaaatctccaattggaaaacaagagacggtaccataagtacatcaggacattttagtaattcctgaaaaatagaagggatcaggtctgaaatgaaacagcaacaggaaatcatgaccccaaacatgtgagactgctggggagatgggagtgatttgggcggagccccaaactcaaacccagcccttgagacatgttggggaggcaagggttgaaaaactaactgttgggtactatgttcagtatgtgggtgatggcatcaatcataccacaaaccttagcatcacacaacatacctaggtaacagatctgtacatgtagcccctgaatctaaaataaaagttgaaaaaaaacaawaacaaaaaccaaccctaaaacagttcaaccatcaccacaaggaaaaaaataaacacacttggggtcactgtgtgccagaactccagccctgccgtcagccctgaaccccaggtacacagcagctgctgggcctctggaagcagggagcccccatactctgacaaacatgcccttaacaaacccacaggggccaatcccaagttgtctgcagaaaccacaacataatgtcaaagtcactcctactgttagattttatttcagaagcagtgtgaagaggctacatagctcgtgacatgttgcttagaactctccttttctcagcctctgcaccctgttatgtctttagctcaaaaacagaaaagctctccctkctgtagcctgagcaccaccctccttccatcccctccatcaagaaagctccccaaacctggcttgacaattactcagctctcttggagcgggtagtggacgtggatgaatgcagtagggaaagccagaatccttttgagaaggaaaggggaaatgaggccagcatggtggctcatgcctgtaatcatagccctttgggaggctgaggcgggaggatcgcttgaggcccaaagtttgaggttgaagtgagctatgactgtgccactgtactccagcctgggtgacagagtgagaccctatctcaaacaaacaaaaaacccaaccacaccaaaataacaattagcaaaacttcagtaaggtctatagattatggtattgttggtcattgctattgtatcaatgtgaactttcctggttctgataattgtacataattggttaagtaatagaacatccctgaagtatttagggataaaggggtattagctctgtaatttgcttctaataggtcagaaaaaaatgtgtgcatacacgatacatggacattacaaacattacaagatgagtctctgtgattcctgtacacacacacacagaatgacaaagcaattgtgcaatgttagcagtttatgaatctgggtgaagggtaaatggcagtccttatactattgatgaaactttaatggaagcctggaatcatttcaaaataaaacatttggctgttgaaataaactcagatgggctgacaaaagtagaaggtaggatgaaacatatgagaagcatagtaacaattatggaagaaacatctaggggacctgagatttgttctagaaagttctagaaagagaaaaggaaaagaaagaaaaaagggaagaaacaaaagaaataatgggagaaaatttcccaggtctaagaaaagatcccattagtactaagaaacagaatgaatatatttagatatggccagtttcaacttccaacatcwataataaaaagaaaattctatttcttgaaaataagttaacctgtataacatgtcacttattagatccacatcagacttctcactggtgacaagggatgctagaagatcatggagtatcatcttcagagttagattctatctccagctgaactcctagccaagtatgaggacaggatcaagtaataaaaattgcttttgaaatgtcttgattaaaatccctcccacagcagtgtaggtctttcagtggagacttccaattttttatgtttttcaacactgacctgcatttcagtcatacagtagagcaacagatgtcatcatctggattctaaactggcttttaaaaatggctcttccattaaagaaaaacaagggggcccaatattttcttcacatygcttgawaatatatatatatatakgtgtgtgtgtgtgtgtgtatatatatatatwtatttttttttctttttttttttttkagagacggagtcttgctctgttgcccagsctggaatgcagtggtgcgatctcagctcactgcaacctccgcctcctgggttcaagtgattctcctgcctcagcttcccaaggagctgggactacaggcgagtaccaccacacccagctaatttttgtaccttagagacagggtttcactatatgttggccaggctgctcctgacctcaggtggtctgcccgcctcagcctcccagagtgctgggattagaggcattagccactgcacccagccaaaaatattttcaatataaacattccatattgattttcactttgagcttcctgcataatgtttagaatgtgagccaggcatggtggcatggtcccagctactcaggaggctgaggtgggaggatggcttgagatcaggagtttgaggctacagtgcgttatgattatgcctgtgaacagccactgcacastagcctgggtgacagtgcaagactgtctctaaaaaagacaaaattaggatataagcactgaggtggatgtagcgacattgagagatatggaattgacttagatttcatttgaacaaagaccaagaagctgctaagattcagaggagcaataggttgatggaatatgtgaattaacaattcctatgtcaaaaggagattatgggctgggcgcagtggctcacgcctataatcccagcactctggaaggccaaggtgggcagatcacctgaggttgggagttcgagaccagcctggccmacatggtaaaccccgtctctactaaaaatacaaaattagctgagtgtggtggtgcacgcctgtaatcccaacttctcaggtggctgaggcaggagaattgctttaacccgggaggtggaggttgcagtgagctgggatcaccccattgcgctccagcctgggtgacagagcgagactccacctaaaaaaaaaaagaaaaaaagattatgaatgaacctttcagccctagtccttgctcccttccaaaaatattttttgtatgtgccactgcacttgaaataagccgccatctggatcccagcatcgaggtgactctcccacttctgcttataccagcactcacacatttaagtctccatgcctgcagcagtgccgctgayagtaggtggcctctgctcactgctggccactttcagcggtttatgtccacccagtcaagactgtatgctccaagsgctgagccaaggctgtgtaggagcgtgcacctaacttgatataaggatgacatgtcagaaatggtcaatatgctactactatcagcaaatgtttctccaagtgaaaacttagtaactgacttactgtctgcttgaaactatctacaaggattaaacctattttggaagaacaaggattagacaattctgtttcttaatgtctgctctgttaataatattaaagaaaccttggaatggagcagtgagactaacagattgctggaaaggagaaatgaatacatttattcagtgtttccacagacagaaggaaagctggcaagcatttgcagttcccagaaatcactgagtcttctttaccaggctgcatcagagcgcctgcgattattctgagaaacttacaatgacactgaacagagactcccgtgaggaa

SEQ ID NO: 9987 - DNA, 16762 bp, Homo sapiens
tctaaaaaaaaaagaaaagaaaactctctaagtcacccaaattacagcgtgcaggacagttgaaccaggccagccatccttttgcagaattccctcttgaggtgctttattcayacatgttgctgtgccatcaaagcacagtagtccccctccacagaggtgtgaataaaataatttcttccatacatcctcccaatcctcccaccccaccctatatgtctagccagctgcccttttattgaataagccgttcttcagcgyctcttatgagaattacccactgtatcatatatatgaaattctgatatgtaagtagtctattttatgaactctttcatctcactgatctgtttctttacacacacaccaattccagtttattttttaaactttaactttataacaaatttaagctgactgggctagtatctcatttttcttttcaaaaatactttttcttcttattttgatttttctgatgttgaagtttcctatgaatttccrtacattttggctagtttctaattctccccctgaacaagtmatctctttcccatcttccatacactcacattaaagccttttaaaatgcccttcagtaggtgttttaataatgtctgcatggattatttctaacttacttgtttattcaccctaatcttccgatgaatacagagaaactgcagcaacttgatggaactatcgacacaaaaggatggtacctcccccacagtcagattgttattttattctctgcttatttcattttgtagtacttagatctctaattttgttcatgataatccagcagatttaaaaaaatttttacacttaagattctctctcttggcctggcacagtggctcaagcctatataatcctagcactttgggaggccaatgtggacagatcacttgaggccaggagttggagaccagtctggccaacacggtgaaaccccgtctctactaaaaatacaaaaattagccgggcgtcatggcgcatgcctgtcatctcagctacttgggaagctgaggcaggagaatcacttgaatctgggaggcggaggtttgagatagtgctgctgtactccagactaggcaacaggtgagagtctgyctagaaaaaaaaacctctctcctttgacctctcctcctcatgctccccagccagaatcctcacctttagccaaattcttctccttgtagttactcaataagtcctggtcctctttggccatcctgacccccagaggcttctcctttctctaaagtcctgaagcatgtgtagcaaatgtgtgtaatattcacatgatccatttgccactaagtcaacctgatacagttatatcattcttttttttcatccgccctcccctctccttttcctcacctcacctgagatacctacatgtttcaggcggcatcctgcactttcttttcttttctttttttttttttttgagagggagtctcactctgtcacccaggctggagtgcagtggcgcgatctcggttcactgcaacctcygcctcctgggttcaagtgattctcatgcctcagcctcccgagtagctgggattacaggtgcccascaccactcccagctaatttttttattttttagtagagaaggggtttgactatgttggccaggctggtcttgaactgctgacctcaaatgatccacccacgttggcctcccaagtgctgggattacaggtgtgagccacctcacccaggcctgcactttctttaaccccttattttgctaacacttatgcttttccaccacacctagaccaytgtctgctcttactggactattttacaaatggggtttgaggtaaaaactaaaaaatttccagtagtgaaaattatacttgaaaatccctttagtgcaaacggaatggctggtagcatagtctacttggcaacaagcagatttgttagtcctttcacttccccacttgcctctgggaatatgccctttgagtggaacggtgggtggctggcaccgtttcaatggtgatcttatttgctctcttatttgctgagccacaaagttgtattctagtcatctaaatgccctaaagatgatagcacatcatatttaagttcttcccattttcctggccttcccaattcccgctacctccttgaagcttccacagatattccacagcgagccttctcctttcgggatctctttggccttcggagctgctttttggtcttggtagctaccagtgtggtgcttgtctttttcagagcaactcacatactaggagcgtggattctagaggggcttgaaacctgatcctgtcacctactagctgtgtgatcttggacaattggcaccttcgatgtcttcacgttcctcatctgtgaaatgggtttctacctcaccggattcttataaagattacatgagttaatatttctaagtgcttaaaacagtgccgagcccaaagtaagcagtatatgtttttcaggttgtatccttttacttaawattggagttcctgttgaatgtagctaaagaaggaagaagaaaatagtgtacaagagcgcttactattaactgagacaaatgaattggcaccttttttgttctccaaaatgcaaaacctgctccttttaataataattaaaaaaaaaaaaaaccagttcgcaacttccctgactctttcactgaaactccgtaagtgatcttcaagatcacttacgaggtttctctcagttaccactaactgtggttaaagtactgacatttttatattaataactatgaggctgaattctcaagtactttcttgattaggcactgaaaaaagacaagcttgcagaaaatgagttggcaacttggcaaccccccagggtgtttttccaaaggcagctctcaggcaacgtgttgagtgaatgctgtaagagacccacttgtgtaagccccacaattatcagctccttgcttagtagcttcttaaaatgtctgctgggtattctatgaatttgtttttctgtaataatgrttgtaacctcctcaaggtcaaaggattatgactgctcagactttgtaacccctggcatggagctggaactactgcatagctcaataatttcctgctgatagattgattgttaagatgggtaggaccaagcaatgtttagatgctgccaaaccacagtgggagaaatcctackaataatagtacaactccccacgattcctttctactctgtcttcattggtgcaacctacaactaagaacactgattccatcctagtttctctcatccaataatgaaggggagcaaaagctgggaaggagacagaagtgaaaagcctggatcatccaatttagaggtttattgagtgagtgttgagtccttttaggagaaagcatggtctccctgaatcttccatttgaaggagctgaaagggagagtgacttctatggcattagtcaacaccagggggcaggagagaaagctgtatgaatggaacaggctgaaagggtggtgtgagtaaatggcacaagcatgtgaaaatttccaccacggttcttggcacctagcagtamgctatatgtgttagttgaatcccagagttttaacgcccttgaaaaattatttcttaattaggtcgtgtatgttcattgtagaaaaattaagaaaaacaacagagcagcaaaacaacgaagacatttttaatcactcataatctcaccattccaaaatgaactgttcacatttctgtagagcacattctgttttctatgcatggatacctttccctcaaaatgcgatcaccataaattgttattcatgtttctccatagttttaactggtaatatttactatttagctcaacatataatcatgggtagaggaaaagaatacccagggttctagttttggctcagacctagccagcccctggcaagcagcttgacctgtctaagctttyagttcctcatctgtgaaataaagagtttgatgcctatcacctcctacctccataattctaaccattgatgggtcattaaaataagacaatatggtgcrgcggttattgctctggtatcagccaggctctaatccctgctctacctgtgagaacctgggcaggttttttttttgttttttgttttcgagatagagtctcrctctgttgcccaggctggagtgcagtggtgcaatctcagctcactgcaacctccgcctcccgggttcaagcgattctcctgcctcagcctccagagtagctgagagtacaggtgtgcaccaccatgccyggctaatttttgtatttttagtagagatagggtttcaccatgttggccaggctggtcttgaactcctggcctcaagtgatccactgggcagatttcctgaccattcagtgtctccgttttcttttctctaaaatgggattaataattggacatatcacatagggttgttgtgaggattgaattgatagcacatagtgtttggcacagagtaaaggctcaacaagcrgcagctattctcaatattttagctcaggcaccaggcgccttgaggtgatagagtaaaaactctagctgagagatcaagtagaaacttgggaactagcccgggtggaacacaggcactgggcatcgtgctgagtctgttcattggcaccatcttacttcatcttcagaacgttactatctctgttttacacatgaggaaactgaggttagaacttgcctagattcgtgtagctagtaagtgtcaatccaaagaccttccagctagttttggttgagctaaaggggctagaagacctgccattagttagatatttcatttcaaaaataaaacccaggcatgaagtccctttcccagtgatattcagtgtgatttttttcttcactctaataattttaacaattccactgtttgacagttgtttaaaagacataggaatttttgtatattttaattgactaatggatagctcaattaggggagcaaaactaggatgtgggttttataaaaataatttagacttgacttagacatttaattttacagttgtaaatgatggtctaaaaattcttcaaactaatcaaaataatgaaacttcagcgaaagtgagtggctcagaaggcccatgaaacatacggcgtgattttttaaattttattttaacattttgatttccacaccactgccaaaggacgtcagaattgagtaaggggtttgggttgactgctgcctcttgaccggctgtatgtgtgaaaagggtcatttcacttccggctttagtgttccccgcaggggagaaaattgaagaatagacagaaatacgaagtgtcttttaattaaatgccaccttggtgttttatggggctcgtatgctttcctaacaacatttgttagataagttggtaattcccggcagctgtctactgtgtggtgcatctgtgaactcatactaatcgaaaagcatgcagccagtttgggatcgcgcaggctaaggtgagggagaaatgcggatacaccgggtaatgaacgatataaacatttcaaatgcgatacacattcggtttgagccacatcttctgtgtgcagattcacccgcagtgacccacaaagctattcccaagtaacagccgccccaagcctgaggcactggcgccccgcctgggcgaggctggctgcgctctctcttggccggcgcccgctgcatgcggtacgtgcctgcccggcccctagcccagggttcccgttacgcggctggttccagctggccgcggagtcccagaacctccccgsgatgcccagatagctctctgcacgtctsgccccggggcgatcacgttgccggggcgagggctggcgccccagctgggcgctggttggtcgcgccctggggctcgaggcccggcgattggtcccagggatcgggtcacgtgcttgggagcagataagcggcctctaggcgccgggccctcagtctctcccagcgaccgccgcgggggcaaggcctggagctgtggttcgaatytgtgcaggcagcgggtgctggcttttagggtccgccgcctctctgcctaatgagctgcaccaggtaggttcgctgcaactctgcgcgctaggaacacaggggaacgcgcagctgtggggaagttggggggcgtttcagttctatcatctctggaaatggacaccccagggggaggacaagtggactgactgcgtagttgaatctggcaaccgagaggccttggaggtgtagaaatttggctctatttcttaagcagagcctattttagtaatcagcatcttaaagcagaaattatcttaacgtgaatcagcttgagttaggattttctcatggatgcggctgttcttttggtcctgcacaaatgtcccaaagactcgggcagctgaagtggtgagaacagcactctgacattgctggttaggtggtttagcttggaggaaaaaaattacaggacgacgtttgcattcattcgtccttcttatcacagtttgccatagcaaaatctcaagagtttgagcaaacgattacttttaactcttgtccaggacttaaagttccaaggaaatcacccaaactaaaactgtctttctataaatgcaaaaagtaaaaaaaaaaaaacaaaaaaaccaaaaaaaacctcccataaaactactttaaatagcttctccagacatagcttagcagaagacttctctaaaaatcctgcctattaactattattagacccacaaatatagctttagctttcatttgtttgttctaagtttgcagatctcccagaaaaaccccagagctaacacagtaaattctgcgagtgttattacacacttttgtgataatgaccacttgcatacatgtttagagctgctgtgaggagagttactaaagccagactgagaaatgtcgtgtacagtatacacacacctcttacttgtaaggctaagatagggaaaaaaatcttaataccataagcttggaaatatatgatgagggctaaaggtcagagaaaagtcttctttatagatgcttcttggtttaatattgctgagcatagtcatgtttaaaactttaaatggttttattgtctttctacttataaatgtctattagaaaatgccaaaaaagaacaaaaacgaaaatagataatctataatcctatcacccagaaataataattattaaattattaggaaaggtgtatttcctatagagtttttcaatatttataagtttgtatatataaaatgtatattttaaaacactccaactttcaggtaatcagtttttccacttaaatgtggacttgtcatgggcatctctttaggtgaattatcaattatatagtttttaagtgcatatgaattgttggcttgtatttcagtggttatttgtgaaaaataagagcatgataatcaaagtgcaaagatgattctttgacttcttctctagccttctcactctcaaaactgttgcatgttattttttttttttcaagtgaattaccttaccagagaagtgtcaatcaatttagcagcaaaataagccaacgtagccagagggagcagagggtctggaactgtggctcctgaacctgtctggtcattagaatcacctgggaagctttaagaacatacccatcccttggccctagccccagaagttctgcctcagtagttctgagtcccaggaattggaaagaaagaagaaagagaaagagagagagagaggaagaaaggaaggaaggagggaaggaggaaaggaggaaagacaagaaagaaagaaaatgaattccctagacatagtgaccagacaggtttgaggaccactggtccagaacagagcacacagttctcaaggctgccttggagataatcaaatcgaacccttttatttctcagatggggaaactgagacccccatcaccctctaagtgttttaagcaattaatagcctttagccggccaagggtagaggtagacatagaagatctgatcacttaatactgttctcttttactacatatgatagcacctgcctgatatctagtgcactggctataattcagtcagcacaaaaatagtacatatgtatttggyactggggaagagcatttccgatccaggtgataatccctcttctttttgcattccagaatgatccaggttttagatccacgtcctttgacaagttcggtcatgcccgtggatgtggccatgaggctttgcttggcacattcaccacctgtgaagagtttcctgggcccgtacgatgaatttcaacgacgacattttgtgaataaattaaagcccctgaaatcatgtctcaatataaaacacaaagccaaatcacagaatgactggaagtgctcacacaaccaagccaagaagcgcgttgtgtttgctgactccaagggcctctctctcactgcgatccatgtcttctccgacctcccagaagaaccakcgtgggatctgcagtttgatctcttggaccttaatgatatctcctctgccttaaaacaccacgaggagaaaaacttgattttagatttccctcagccttcaacygattacttaagtttccggagccactttcagaagaactttgtctgtctggaraactgctcrttgcaagagcgaacagtgacagggactgttaaagtcaaaaatgtgagttttgagaagaaagttcagatccgtatcactttcgattcttggaaaaactacactgacgtagactgtgtctatatgaaaaatgtgtatggtggcacagatagtgataccttctcatttgccattgacttaccccctgtcattccaactgagcagaaaattgagttctgcatttcttaccatgctaatgggcaagtcttttgggacaacaatgatggtcagaattatagaattgttcatgttcaatggaagcctgatggggtgcagacacagatggyaccccaggactgtgcattccaccagacgtctcctaagacagagttagagtcaacaatctttggcagtccgaggctggctagtgggctcttcccagagtggcagagctgggggagaatggagaacttggcctcttatcgatgaattaagcaacaatgtaactggtcttgacttgtcatattcccccatgcaatcctaggtctgtattgctcaattttaggaagcctttgctactccatcagtaggtttagatttgagcttttgagacctggctatggaaaagaaagacacttgagaatttagtgttggggtctgtacagatgatgctacccaatttggctttgaaggatcaagtaacaggttgaaaactatttttataaaggtaatactttttcagttcccttcttccttccctctcaatccactagctttcatgttgggcaaggaaaagttgaggaaggatggctgatggtgatggaaagctrtgttaatggtatgaggaatgtgtgaaaagtatacacaaagggctctgaagctcaagtcagaggagtgggaggtctgatcattgttggtggaaaaacgtaaggktattttgtgtttttaagttggttttacaattctttcctggggaaattatttctggaggggaaaaagatccattctacgtatccttgtggagaaaagctaaataacctttaagaatgtgggtggtattggagaaagaagatgaattatagctccggagaatcaagatcttaagtgaagcctttctgttcagatgtgatctataaaaaatcataatttggggaaagtttaagcaaatctggctttgtagtcctgatgttataagtgactttgtgatcaaactgtcaggcttgggttcttgttatagaatgcttggtatagaaaaaccatgccatcattaatggctaacaacacgtagggacttcatgtcatgtcaaagatagctctttgcaagtgccttgattaaaccagaaaactgtcatcgtttaacccaaatatctgaatggtcatctggtaactcatgggtttttggcctcataagatggtccactctgtacacaggcattcctcctgcaataatgttgtatctttgagaccgttgtcagtgtacacaactcacatccttcatattgaaggtgactcatttttctgcacacttttttgatgtgatgcttgacgtgaggcccgacactaggattctcaatgcaagaatccagtaccttgcacatagaagtagcaacccatcccttgcctattttcatcttgctgttttcttttttttaaaaaaatggatgtgacttgttttgaatgttttgtattatacttgtttttgtgtgtgcataaattcattctgtaggatcttaagaaaaagagtcccagaatgttgcttctattattgtgcacaaccattgagaggtgttacaagaatgcagttaattttaacatgtgtgatgtgccatggtggaaaagtactatcggaataactctgcagtgacagaatttgaagtttggctagcatccatacttttctactgtaaatatttcactctcctctagctatccttgatgagcttctcactttaagaataaatgtgtttgatataaggcctgagtatattttctttctcaaagccacagtcaaataagaaactcaactgacattctcatttttcatttaggaacaactgagcagagttagtatggaccaagacatggatccatctgaggatattcacaaggccccagtctcaatagtgagcacacttcctaccacctgaccattggggctggagagcagggtcaataacttgagctgttgctactacttcttcccctaccctgactgtcctcatctatggtttctgctcacacacacacaatctgctgggtcagggttatgttggaggccatgtctcagctttaaaatggggaaggagttggtgtgggaaaggytggagtggctgctacgtcttgagctacagcacgttcctgaacgggcagaacttccagctgcacagaggggcatagggaaggggcagtaggcgccagtcctggactgaagggagcagcactgctccttggggtgagaggcagcaggtccatgaacctaagttgttgctccagttctgcctaaaatctgcacagtgtatctaaagaaagatctgcacagtgttgaccaatctactaaaaaggcccaattatgaagaataaacttttatcatatcatagaatcctctatgtcagagctgtaaaccacaggcctgcaggctgtatctgggcacagatgtattttatttgacaygggatttttaaagaatttattgccatgatataaccatcagcagactacattaaaaaatctgggtttactttttttcctaaaaaaattgtaaggtctccccacatggcaacaaatacatgaagttgaatagtagctgtgccccttagatggggcatgcatcctagatgggtcaaactgccttgttttggccacagtctctacccatgccttcactctctcacactatctgccgagctctgtaagagctggaatttacagcccctattttgtttcctctctatttatgctgatggtttggtggactgccctgttcccaagggatggagaaaaatcaaacttgggtctgacagggacctcgaagaccatggggctcaagtgcctaactttataaaagaagaaactaagatccagataggtgaagtgacttgttcaaggtagtgtggccagggtgagccagctgaacagtgacttgtcacttagtgtccctccctctgcttcacacagcctccttgaaatctcccatggagttgccccttctcccgcagcccccttcttacaggagagctattttcaggcaggcatgaccagcttgacccaattttggggtgaccctgggcagctgatgagggaggagctggtcaaagagcagggtgttcctggagctttactatcaaatagaattaactgcatttcacatcctgatatctcgcctaatagtagaagcaactttgcttttaaaaatttaacatgagagaataacttaaatttggaatgcatgatattctgttccaaaaaatattaagtttaatttagttatttaaggaaggactattttttttctctctacattgatggctctccttttagttcatccccagactgaaaggctggaaaactctagggtggcagtgaactgtgcatctttatcaatgtgaatccaaaagttctgcacaagtttgagtgacccttcaagctgcaaagggagaatctcttcctcagctttcatctctaggttcctcatagagttttttggcagctactgggagctgtcatctgaacaaaccctctcattagtggggaaggatcccaaactcagagcagtccatgtgcaccgttgctgactcctggccttgacttttccctctttttgacaatgagtggacacccattcctggatttggatggtccctctaagccagtggtccttaactttgcctgcatatcagatttaactggtaagctttacaaaatactgatgcctccccctgaacctcataagatttggatttaattggtccaagtcgtgccctgtgcattggacagttctaaaaactttccagatgtttccaatatgcatcaagtttgaggacctctgatttaagctgtgtgaagtgttttcaactgtcccgattcagagaacagagtcatgtaatggctcagaggattcctccacccacttacacacacacacacacacacacacacacacacacacacacacaaaataaaaattaaaaataaaattaaaaattaaagattaaaaataaaaaaaccaaaaaccaaccagacggtgaaatagaggtccatagtgattaaaatttgctgaagattacagaaatagtagagcttggcctactgccccttctccaacacccccagccctgcccataccatctcctgctaaacaacctggacatggacttcttaattttactaatcaattatctctttttctcttttctgatcttttgtgtataggagtaggttaatgaggaggctttttggcacaagtgacatgatcccttgactcacgtatcttcaactacaaaggaaatagattatcctacaatacaagatgcaaggtagagtgttttcaaagttggttaagtcagtggcttaaactcaggttatttctgtttttttcattttaccatcctcattactctttctttttctttcttttttttgttttttgagacagtcttgctccatcacccagggtggagtgcagtggtgcaatctcagctcactgcaayatctgcctcctgggttcaagcgattcttgtgcctcagcctcccaagtagctgggactacaggcgygcaccaccacacccagcyaatttttgtatttttagtagagatggggtttccccatgttgccccggctggtctcgaacttctgacctcaagtgatctgcccrcctcagcctcccaaagtaccagtattataggcgtgagctactgtgcccagcctatcctcattactcttgattgtccctgtgctaacttcctaatgataagatggctgccatagtttccaggcatgttaagcagacataatagccccaccaggagaaggagcctatctcttccttgtgtcactttttttatgggtgaataaaccttgtccagaagcttctcttatcctccactgcagacttgcagactctcccctatgtttcactgaccagaattaaatcatggttctgtacgtgaactagtctctgcacagggaaatgggacttcatgattggctcagaaaagtcaggattcccaccccacaactgcccactcagtcaggggttagagaaggtctagccttctgaaacaccaagtcatttagtagaagaatactgggactccatctcatggctgcccttgacacaggcattcataaatggttgaggcccattgtttcagcagcaactcaaaaacaattattcacagggccaaggtaatacaagccaacttttcagtttgtaattaaggatagaaatgagttatccagagaagcagatgaatcacatacttttcacatattaagaaattaggtctggagtcagacagaactagatttaaatctctatcccaccagttttgtggtgcagccttcagcaagtgacttaatgtctccaagtctcagtgttcctatctttaaaatgggaacaataacaattcctacctcacagagtgattatgagaataaagtgagatcatggagatgatgtgttaacaaagtatttggccaatagtatgtaataaataaatatgtattgtcactaatactaatgataaaaagtttccccacaaatttttctttttacagtgtgaatcttaaatttgagattcttttctcaaataaggacttagtactaatattagtattctgtgttactgattgggayagwacagtatctgaatagcactgtaggaagagtcactcattcatccaacatatatttatacagcactaactatgtgtttggcactgaatatatagtgatgaacaagacaagacaaacatgatttctgctgtcatggagcatgagtgctggagacattttcacatctctaccctatcagttcatagtaacaccccagctggataattttgggtaagttgcactatcactcaagtctcaatcctctatgaaatgggttgattatttacaagcttgtcgtgaggcttaataacaacagtggtgtattagtctattctcatgctcctaataaagacatacccaagactgggtaatttatgaaggaaagtggtttaatggactcacagttccacatggctggggaaacctcacaatcatggcggaaggcaaaggaagagcaaagggacgtcttacaaggtggcaagcaagagagcttgggcaggggagctcccatttataaaaccatcagatctcttgagacttattcactaccatgaaaacagtatgggagaaactgcccccatgattcagttatctccacttggccctgcccttgacacatgaggattattacaattcaacatgagatttgggtagggacacagccaaaccatatcaagtggcttataattatataacccttattacatggtcagcacgattctaagttatagcctcatttaactctcacaacagttctatgaggttggtttctcttattaacctcattttacagatgaggaaactgaggcacaggcaagatttgtgacttgtctaaggtcagagggttagtaagtgttggagctaagacttgagctcaaacttaaaagtttgtggtcacaacatttacactgtgatacttctcaaaactcttattcatagtgtaccttttaagtattttgtatatttgtatttaacccagttcttgatatatttgagttgacatataccattttattatttgttttgtatttgacccatttgtttatgttccttttcatttcttgttttcttttggatttttttggttattctatattttccagtttattaacttaatagttacagattcttttcttttagtgattaccctagtgattacaacacacatcctttattcttacagtatagtgaaaatgatcattttgacaccttctttgataaagctaggaccttaagcactttaccatcctcctatcatttgcatttttattatatattttaattctaaatatactttaagccccatgagataggatcatgttgttttgttcagtcaccattatttttttatttgtctgtgttttactccttctgttattctttctgtatttctgtgtttccgtcttggatcatttttcctttggcctgaaaaaaatccctttagtatttctttgaatgtatgtttgttggcgaagaagtctctcagtttttgtttaattgaaaacatcttcagctttcatttttgaaagacagtttcagtaaatatatatttctgggtagggatttaggtggaggttagaaaattctctgctattatctcttcaaatatttcctctgtctcatgttctttctcttctctttctgggactctgattagacgtatgttatatgttttcactttgccccactgtcttatcctcttttctctatttcccactcttttttctgtctgggcttcagttcatatatttgctattgacttgttttccagttcacatagcctttctttggctatgtctaattctgcttttaaatacattcctgcattttttattcagctatatttttgagttaaaatttttatttagttattttttatagttcccaattttctgggaacatcttcatttttcatccatttcccccctttcctctatttttcttggaaatggtaatgatagttaatctcaaagtacttgtcttytaattccaaaatytgaatctcctgcgggtytgattctgtcatatacttttttcttgttttttttttttcatgtggtcttgccttttggtattctaataatgtttgattaaatgacaagtattatgtataacaaaaatagatattaaaaatttcagggctgggcatggtggcacatgcctgtaaaccaaatgctttgggaggccgaagtgggtggattgcttgagctcaggaattcaagaccaccctgggcaacttagcaaaaccctgtctctatgaaaaaaaaaaaaaaacccac

SEQ ID NO: 9988 - DNA, 21228 bp, Homo sapiens
tgaggtcaggagttcgagaccagcttggtcaacatggtgaaaccctgtctctactaaatatacaaaaattagctaggtgtggtggcccacacctataatcccagatacttgggaggctaaggcaggagaatcacttgaacctgggaggcggaggttgcagtgagctgagattgcactactgcaccctagcctgggtgacagagtgagactatgtcttaaaaaaaaaagaaaaaagaaaagaaggaaggaaagaaagaaagaaagaaagaaagaaagaaagaaagaaagaaagaaagaaagaaaagaaaacaagccagaaagcccaggtaaagcaaacagcacagtgtaaacaccctagacctcccttaggagtgggtttatgcaacactttctgtcccctaccctgacccccatctcccccggggggtgagaatctggcagactctcaacttctggctgggtcttacatttctgggctcagatccaaagcaagagctggggataagacttgtttttgaccaaggcttctaaagtttgccatttcccctttactcttggttcctagccttttttcaattacttttctttgggagccttccttttctctttacctctcttacacattaatgggaggtgatgaaaaagcacaaacacttrgctgcctgtttcctgtaatgaggcttaattctataacaataagcctctggtaatcaagtgataccccccaacataatagctttcaaatattcagtgtaggcaataagcctgcatgttattaacttactagatttaagatgtaacagaaaggtcctcccactaaaggctactcaagaaaaaactcaaagcactcaagctttgggggagtttgtcattctcacaaaattccacaagagggcactaggttcacaccaccccggccaagcttctgattctccaaccscagtaaacaagtctccggagaacgggtttaaaagaagtggaagaggagaacggacaggaaaaatccagaagcagactaagaattgcccaagcatccagaaaacataccctagggctgtttgtttcctgttaaaatttggcgagtcaatgtgaaataaacagggatccaaattaactaatgaggtgggaggggagggaggaagggctgtggatcccattgaggatttctttgggaatggtaccaactaaagcacatactctgatctaaataattttttgatcagaatgctaaattctctaaattttttaattagcttcaataatgttccaatcaatctacagaacaacgatctgtacagtgtaaattgagaataaaggacaaaatgtatctaaaaaaacccgattcacaaaacaatgaaactggaggcagattatcagatgtgaaaaatgatctccaaagagtccttcaaagagaatctttcctatggtgttgtttttttctgctaatctagttattcacaaagaaaatatatattgagtgtctgctatacagaagtcactgggtaagcatacccaggattgagaggtaaatggttgctccctgtcctctgcacctccctcagtgaggactgtaggaattkcagtattttagagatggtggycccggaacagatcacccacagaccaaagcgactaaaggaaagggaacagaaaaagaacagcaccttgaaagctcattaagctctaaaatactaaccwaacatgacttcatcaagttactatgagttatctaagcctcagttcctcatctttaagatagaatgatgtgaagatctaattctagaattgtatrgctttaattttctcaataggacattttccccaggttgttaactaagatgaacttgattcttcccaactttccacgtagtttcctgctagagacatgattcagggtagagctcaaacagacccaaaccttccatcataacacgcagttggggaaatgaagtgttccttgtatttgactgatttcagcacgcatcctacaaaactcaaatcaggctacagatatggctgagacgtgaatttccaatttcctgtcttgaactgaagaatatcaaacaatcaaaaactgtaaagaacaattcctccattcttagtgctagttattgaactgaagtataatgtaaatgtagtctttccttctctaattgtataaagtgaaatttgaaagcttggccaactacagcttttccctaaattatggtttaagaataatgctatcaacttccagagctatttcttttcttcttcatttttattattattattttgatttggtttaagattctactatggtccattcttttggaaagaactgatgttggtttattacataataataatttttaaaagaatattttacaattctgggttgggtttccagggtgttccccaaccctgagtctcaattgtatctctttaacatgatttaaaggtctcactgaatgcctattgaaatcattcatacacagggaaaactccatttcctaaacagaaaaggtttggtcaatgtgagccctaccctaaattttgtgtctaatgtgtataaggcaaccacacaggccctgggaaggcactccagatccccaggtaaaggacttcatacttgcagagtgagaatggatcctttaaaagacagagaaagggccgggcacagtggctcacgcctgtaatcgcagcactttgggaggccgaggcaggcggatcacaaggtcaggagttcaagacaagtctggccaatatggtgaaacctcgtctctactaaaaataccaaaaaattagctgggtgtggtggcacacgcctgtaatcccagctcctygggaggctgaggcaggagaattgcttgaacccgggaggcagaggttacagtgagtggaggttgcagtgagccgagattgcrccmctgcatccagcctgagcaacagagtaagactccgtctcaaaaaaaaaaaaaaaaaaaaaaaaaaaaagagaaaagttgtttcctaatagagataagatttgggagtagagcaaaatcctaatacaaagcttttatttcaggcagcagaacaacattgaagaaatacttttaatctcaggctatttctgcagatttggaacaaaatctttccctgtaattgctctcccactccacccaccccttggacatggcaattctactctaagagagaaaaatatgacttcaaagcacatgcaatggaaccccttgtcagcactgatatggtgtgtaccaagaaacagaaaagttcatgggttcaagcattctaatgctctttttatggtgggggtgaagaatgggggygggtggcaatttagggaagaaggggaaggagaagaaagggcagcagacacagcaaagtcaaactggatgaaacaggctgttttacttttaacttctctaaaagtacagtctgggtttctgcgggtgaaccagttaagggttttcttctgcttttacttctcgcctatgctcaagcctccctggtcagttcttggactcatctgygccctaatttcatcattttaagtaaatgtggggctggccaaggaggacaaggcctcttgttcactcctgaaagagtcagtggtcatgtattatgttcctaacccttacaaagcgtgcccctggtcacatgaatggatcaaagcaaatccatttccattcttggaaaagcagctcaaagcacatgttctcttgatggtgctgctgtcacttctgtgtggttaacaaatatcatttattgaacactcaccgtggacactactgggggatatgacaatgaataaactgctcaatgaggtcaagacatctaggaagggaagcaggcactcaaatggcagaaataccataagcctgcagaaccgcactcacgccttaccattccgttctctgttatgtttgtcatccccacctcaggggctggtggtgtgtgcagcagaggctctggcttatggttcggtagtttggtatctggaaatgattaataacatcttttaaaataaaaatatcacttttctcctcctttgctccccttcctcgaccatttaaactcaaacctttacagaaagagatgaagacagctcactgtgttaccaaggttaagtccagtttgatataatgaatggtaaagcattacactgagtcagaaaagttgtattcaaaagtcgctatggggaaagaaagaatccaatcacctcagattatagaacttggcctatgataattataattgctgttttctaaacatttacgatgcaccaaggactactcaatctcttctgcatgtgctatcacaattaatccttttatgaggtaaaaatgattatccctcttttattatagacaaagaaacaggcttcatgtggctaagtgatttggccaacacaaagctggtatgaagggaaagcccagatttgaacctaggtttacctgacttgcagccgtgcctttagccacmacaatgtaatgcttcaaggggcagcactgaaatttaacaaggaatttgtaaggcaccttacccaatccaaaatgtcaccagtctgaaacatcccaaaaaaccctgtttgagatgaatgctgcatctgtcatgtaaaagcactacagtgttatacactcttaaaggaaagggatgttgaccaaagaagccaagttatgtgtgtgtggtygcaggcaacatttcttttccacatttgcggtacaaaacataaccagaacaaacttcttcccttcctcttccaaaggcactggaagcataaattcttgctctttaaactgaaagaagcaataaaatctggacaccatcaggtagatttcaggcactaaaaatagaatgatcgagtaatagtacggatagcagtatctacctacctacctacctacctacctatgttgtgtctctaggtacatttcaatattgtgttcacatacacattttcccaaccatcacggcaagctgagaggagaggtatgtattcccattttccagattaacaagaagcygcacttgataaagcaaaatcagggagaattcgttaaaggaatttcttgacaatccctggacttcaaagggggcaagtgaacacctcgatttcctttcagctgctccgggggcagtttgcacacagaatttcaaatctagtgggcggctccacaggtcattttcgatgaccactttattttgcagatgaggaaacttgggccctgaaagacctgcctagggtctggccagcagtatragacaggtctccagacttagtttctaccgccctccagaatcctctctgtaaaattagakaaacagcacgttgatttcaaatgtgaaatggcagagttctgtttatttccccagacccaagagagccggagcgggcggctcttccaggccttgggaaccccggcctgtccccaggcccgcgcgrcacccgccctagcccaggcccgcccaargttccctygggtcccgcgccccgcgctccctctcaagctaacccctgcccgcaggaagcggggctcggaggctccctcgcaacaaaaggctaaattcggtttccctggttccgcatttccccagggagctctcctcgtaaaactattccccgtgaaggcggcagggcagaggtccagggcgggctttgctgggagcctcgggaccccgggttgggggccgtggggcggcacctggcgagctggcgggtgggcggcgagccgaggcttcccggcctggcggcaactcgcccctctgccctcagccctcccggctccgctcccttcccccacgccgccctgcccctcccccacgcccctttctctttctttctttctttcccagttcgcttgcccccaccccagcggcgcccgccgggctcctcgcccaatggccgcggggcccgggaccgcatcagctgatcggcccgggctcctggccgctgggagccaatcagggcaccgggggcggccccgggccgcggataaagggtgcggggctgctggcggcyctgcagagtcgagagtgggagaagagcggagcgtgtgagcagtactgcggcctcctctcckctcctaacctcgctctcgcggcctasctttacccgcccgcctgctcggcgaccaggtaagcccccggacggcccggtgtcacgcaagcgaggcgcgccgcccctgctaccccgcgaggcgcgccgcccagcctcttttttcggctgcctgcccctccagtcccagccctacgctgcggcctctccggcccatgcctgagatccggcatgagtgctcctcccgcgtgcttccgccgcyggtggcttggacccgtcggggctggcgctggtggggcgcgcccttggccaggctctgggaagggcggggtgagttgttttgatcttcttttcactacttgcggccgaagcgccgcccctggaggccgttgggccggcctgcgccctggggctcgcagtggtttgtttgcgctgtggatggagtggcggtgcggtcccctgtggagcgcaaacaaggcgcttggttggcgcgggcgcctggctgccttcctcgtggtggggccttcggagcaatcgtcctggttctggcgatggttgagacgcctcgattgcggcgtrtaacggtgagcgttgtttgggcggccggctcccgcctcggggtcccgggggccttccaatgtgaccgaacaatggagagcccgggcctcggmgcagtcagtggagaagccggkccgggcggaggcagcagcagcgcgcagtccctmcggcctgcgcccccaccctcccccggaccccccaacccctcggcggcagggtatggccacctccgtgaggccctgagattcggacgggggcccgaggggcagggcgcccactttagggacatttcagtgggaaggggctgctctcaaagtggataattataactccctcgggggcgggaagcggggatcctcccccagccgcaagtccacgaagaaagcaacgaatgaaaattatgaagacaacgaraagtcagactcctccgggtcgcgctccagctgcttcggcttcgtcgcctactctgtgaactccggggagagatctcgagtcaagattaagaccttaacccaccaacctgcctgttcggacaccccccgggccggccgctgtctgtccccttctccatcgccctctcccagaaagctccggtgcttggaccagctagagtctgagaaagaggagaggcgcgaacgccactccaaaaagagaaggkttaaagagggcaaccctaacgatacgcttgactttctgtggctggggtgagtgagggggcagggaggacgaccccggagttggtgggagctgcagaaackgctgaaaacttcagaatccatttcccccacgtaaacttggcaccgcagcagcagcagttgatagagtggcactaggctgctggcatgcaactcggctcacggaaaagagcaagagatccgaaactgaggcttaggacaaagtgtgcatgatattggtggtgtaacatgttggagaggacagccgagaaattgggttgtaggttttttttttttgttttccgacagagtctctatctgttacccaggttggagtgcagtggtgcartctcccggctcactgcaacctctgcctctggggttcaggcgattctcctgtgtcagcctcccgagtagctgggattacaggcgtgcacaaccacgcccggctaatttttgtatttttagtagagacgggagtttcatcgtgttggccaggctggtctcgaactttgtacctcaggtgatctgcccgcttcggtgggttgtagcttttagcgggagctaaagggttctgggatggaggtgggaagtaggatttggccggctgagtcttctagaggcaatattggggtgttggtcttccccaaggggaagggtggtgaggctgagggagaagcagttatgttttcagctgggcaaacatggacggttgccygtagaaactttgccactgtacttcagaacgttgccctagtcgttggaggagaacaatgtgttccctttctagccaccctggtccacggagggaggagggagagagagaatgtttcctcttcggctgttgtggcttgagagtttctcttctttcggaggttttgtggtagtggctggcagttattagtatgcctcatggcttttaaatttccagatctttttgatttagaagtggaaatttcctaattacttgaagtcttgtagaattccataatgttgtgattcttgcccactatcttaagtgagactttgcatgagacctatggaaattatggcagcattccccttagaatctggcttgaatcagcttttgtgtaggaaactgctagccttctaaatatattgtaaccttgtttcatcctcaaatctaaatgtgtaatgagttttcttttggtggggaggggcggtgggtttgagttaagaccacagctaggatgaaagrcaaagagaaaaacaaactgtggaagccaagcctgttctgtggctggattttacttatattggaagaagttctatgttytgtaaatttgtgtattggttttgatttgtttcctctgatagtttagtatttggatagtttagtgttaacctcagctacactgaaggaatagaccttaktcctcacaagtataagttctagcttggaagcctgggttctgcagtagctgtggaacttaagcctstgagctcagggatgcagaggcattgagttactaccaagggcctgatcttttctttagcaggcatctgtgttaattgtttcaaaaggtggtgatcagttttacagcctattataaaggagatttttgcctactataaaactaatccccctgaaagagtgagtaaacataactttttgtgtgttgacttccacaagggaaggagttggcacttacactctgacttttgattcagtcgtccttcttgagccatttttgcaggggatcagtttggagtgggcgttaacartgttattctttttttcttctccagaacaccttccaccatgaccacctcagcaagttcccacttaaataaaggcatcaagcaggtgtacatgtccctgcctcagggtgagaaagtccaggccatgtatatctggatcgatggtactggagaaggactgcgctgcaagacccggaccctggacagtgagcccaagtgtgtggaaggtgagacagcaatgtggagtggagcacatgctgggtgggatctgcagaggggtgggcagcagcctttgactcagcctctggattaggcctctttcttctgtttgtaaaggttttctaaggcagggcttttcagactttattcaktcaacattargctcctacactgcctcaaagcagagcgacgatggaaccctttatttcaatggaattgtgcacgtaggccagtgtattgaagaaaaactaagtctggtttatggagagttggcatggggcttagaggttgccgacctggacatccccacttagctggctctaaggcaccctcagaaaaccactgctctaacctgagaatgccatctagtttacaaactcttagaaaactgtgtttaatactcatatcactggcttctagatgtgaagcaaatgctctacaatggtttttaaataggactaatttttagttgatgccacttttggaaattcttaaactaattgcrtatccctctaggagctacagttagattatagttgtgaccttcatttttcagtctagaacaagccatagtcttccctcttctggaaaggggccagaggaaagtatcatatcctacctagtttagggtagtttacttttcctttttgagtaagtgaatgatcataatacaaagcctatattgtgtacttgctatgtggcagatgatagtgcacagacactgaagatacaaagtgagagtctcgtctctgccttcagagaactcagtcagctagagagaccaagcagccttcaaaacagtgggaaaggtggataggtgataagggagcatcctagagtaagtcatcctgctagtcgtctgttccctcatctataaaataaggacataacttgccagaatacactgggggcataagaaggatgcaacacattacctaatggaagaatcagaatccttcactatctcaatattttaagtgattgataggatggtagtgataacagaatgcttcagcttgtctcctggaagacatttgggaagggagtatctgatatatttcttttaaggaattggtacaatggtcttacttggaactcaaataggaagggctataagatcaggtacaggtgccagggtatacatattaatgatggcatttataccttaatgaattcctggaaaagagatatttagagatgggaaggtgagtgaagggctggctgtatttgcattgcttggaaagctcctgtatgttttaaatgtaattttccctctttttgccccagagttgcctgagtggaatttcgatggctcyagtactttacagtctgagggttccaacagtgacatgtatctcgtgcctgctgccatgtttcgggaccccttccgwaaggaccctaacaagctggtgttatgtgaagttttcaagtacaatcgaaggcctgcaggtgtgttatagcacagctrtggatacccctcctcaatctgtgaatgctgtgaaggggagggagaagacattctgaaatcagcattgggaagactaggcaatttcagcactattttaagaatctgagtgattcttttccctgaacttctgctttgaggaagagataatatggcccatctttctatggkcttctctgttggttgcataaaatagcattggatttgtccagatctgtttgccggtcttggagtccccagtaacagccttcctgcctggaatgtaggccaggacaaatgtaaaccaatggacaaatgtttctcaaaaattatagaatggctccaagtgcctgagaaatgaagaataaatctgacaaccagaagcagctgtcttgtgaatagagggttaagtgcctggcatttggtgcttgggaggtggccagaatgcagataaggtgaaagttgccctgttctaaatccactcccatgtgacttggttgtaactgagtttagttaaaactgaagtctttcagagtcttcctacagatgtacaattaacagcttctctcatttttctgactcggtgatcccaagaaggcctatactgggtcagttcataccatagtgcacacctcagttgtatagaatccaaggactattctcccatcagcatcggtattcagcatctatgtctttagatccctgatggcgtattattgactcttttttctagagaccaatttgaggcacacctgtaaacggataatggacatggtgagcaaccagcacccctggtttggcatggagcaggagtataccctcatggggacagatgggcacccctttggttggccttccaacggcttcccagggccccagggtaagtctccttgggttagaggtgaaattcccagaagtgtctaactgtgcaggaatrccccttcccagggrtgggaatgactttcagaatcaagaagcaaaataatacagtaaaggcgaaacagccctcacatcaccaaagtccaaaaatggatatgaatatataaagtaaggttttagggggaacgtttggccccactgaagctgtggtgaagaggaactcccctattgcccctcccctgccccgcacctgcagatgaaggcaaggatagtgattcaagagggcaaggcttaagggccttctgatctctgactttgggattctctggatttcttgactcttagygttttgtcctgatgcttctgtaggtccatattactgtggtgtgggagcagacagagcctatggcagggacatcgtggaggcccattaccgggcctgcttgtatgctggagtcaagattgcggggactaatgccgaggtcatgcctgcccaggtaagtatagctccaatccatcaatgaagaagggtaggtaggtgyacataggacttttgctagtaagggctgctgatacaccactcactaacccaaaacstaagaacgggttggagtacaggtgagaagagaacaggtttaggagattctgagttggagtgagcagttagctttgttttaatggccaagcttctcgtt[450 bp omitted]ataatttatataatatatattagtcatatatcattatataaatatatatcgatatatatatttgtgacatatgtcatggtgacagggaaaagttgacaaattcatgcatttgaaaatcttttagaactaaattagtaacaatacaggcatgtggataagcttaatgcttatgagggggagaaagtttcaaatgattagtcttttcaacaaacagtaactttgtactgcttgtcgggcactgttctcaccactgagacacacaggtaagaagatgcagccactgccctcatgaagtatttgttctactggtatcatattttggtgcacttcattcttggctccatacctggagacaaggttggactgccatcttttctgtttactctaggtacatcgaggaggccattgaraaactaagcaagcggcaccagtaccacatccgtgcctatgatcccaagggaggcctggacaatgcccgacgtctaactggattccatgaaacctccaacatcaacgacttttctgctggtgtagccaatcgtagcgccagcatacgcattccccggactgttggccaggagaagaagggttactttgaagatcgtcgcccctctgccaactgcgaccccttttcggtgacagaagccctcatccgcacgtgtcttctcaatgaaaccggcgatgagcccttccagtacaaaaattaagtggactagacctccagctgttgagcccctcctagttcttcatcccactccaactcttccccctctcccagttgtcccgattgtaactcaaagggtggaatatcaaggtcgtttttttcattccatgtgcccagttaatcttgctttctttgtttggctgggatagaggggtcaagttattaatttcttcacacctaccctcctttttttccctatcactgaagctttttagtgcattagtggggaggagggtggggagacataaccactgcttccatttaatggggtgcacctgtccaataggcgtagctatccggacagagcacgtttgcagaagggggwctcttcttccaggtagctgaaaggggaagacctgacgtactctggttaggttaggacttgccctcgtggtggaaacttttcttaaaaagttataaccaactttyctattaaaagtgggaattaggagagaaggtaggggttgggaatcagagagaatggctttggtctcttgcttgtgggactagcctggcttgggactaaatgccctgctctgaacacgaagcttagtataaactgatggatatccctaccttgaaagaagaaaaggttcttactgcttggtccttgatttatcacacaaagcagaatagtatttttatatttaaatgtaaagacaaaaaactatatgtatggttttgtggattatgtgtgttttgctaaaggaaaaaaccatccaggtcacggggcaccaaatttgagacaaatagtcggattagaaataaagcatctcattttgagtagagagcaagggaagtgrttcttagrtggtgatctgggattaggccctcaagacccttttgggtttctgccctgcccaccctctggagaaggtgggcactggattagttaacagacracrcgttactagcagtcacttgatctccgtggctttggtttaaaagrcacacttgtccacataggtttagagataagagttggctggtcaacttgagcatgttactgacagagggggtattggggttattttctggtaggaatagcatgtcactaaagcaggccttttgatattaaattttttaaaaagcaaaattatagaagtttagattttaatcaaatttgtagggtttctaggtaatttttacagaattgcttgtttgcttcaactgtctcctacctctgctcttggaggagatggggacagggctggagtcaaaacacttgtaattttgtatcttgatgtctttgttaagactgctgaagaattattttttttcttttataataaggaataaaccccmcctttattccttcatttcatctaccattttytggttcttgtgttggctgtggcaggccagctgtggttttyttttgccatgacaacttytaattgccatgtacagtatgttcaaagtcaaataactcctcattgtaaacaaactgtgtaactgcccaaarcagcacttataaatcagcctaacataagatctctctgatgtgtttgtgattctttcaaatccctatgtgccattatatttctttatttcctaaaacaggcaaaataagctcaagtttatgtactctgagtttttaaaacactggagtgatgttgctgaccagccgtttcctgtacctctctaagttgggtatttgggacttaagggattaagtttttcacctagacttagttacacacaatcttggcatttcctagcctagaggtttgtagcagggtacaagccccactcctcccccttcctttgctcccctgagtttggttttggcttaccataacattgttttgaccattcctagcctaatacaatagcctaacataatgtaagattaactggctttacgatttctattctctgctctcagtgattcatttaagwaacaaatattagctaccctgctaccctggttgaagccttccaaggctggctatgccctaggcatgggctcatccttgggtgtatcttgccttgcaggaagaccagtggaccgattgtgattctcaaaagctctgtgttgtcacctgtgcccttgccccttgctcttatcttggtccgtgtatctgggagttcttccaccttatcytggccaattcctaccttcgttcattcctcatgaggttgggtaaaagctccctccggctcccatgatgctgtgcatatacctagcaaaaagcaattattggacacattggagtgcaatattattaatagcattaatactactaataatgtgggcaatagtgattgtttttaaaaggcagtatactcttaycagtgcgaggtagctggggcctgtgatagtttttagagataagttcttcaggcaactgtgtattttacactagtcaagtaatcctagatatccgtggtttttcttaagaaagttggctcgtaatatgatttaatattcaaagtagagtcatctacctattagcttgctggcgtggtcctagtttatgcctgtttcagcatgattgttgagtaccctgtttcatccttagcattttcttgattttgttgttaaatgatgtatacccttatttccattgaatctgtgcttccacccccccaactgaagttgtcttccctttgcttrgccacccttacascctcttggatggtgtatcctacagtgtaagcactaaactgaagaggcagtgacctgagcactttggattttgttcattgtaatcaattccatgacaaaatgattgcatgagaaggaattttaaattcataggatcagaatttaggtgaaaacaaccagcatatttgtttcttcaccctctcacctagaattagctttgacctacaggtcacagtgcaatccccttgtatttctaaggtgttttttatagttcatttgcagacaatgggttatgtgataacttttatcagtgatagattaaacagaataatgaccaagctttcaaccttaaggagtcaggccagtatttacaaaaggaggtctccatgaactccttaaatatgagttcccctaatatcatcttgccaggtactaaataacaactgatagcacaagctatagggaatttgaaagaattccatggatgggtgttgtctagggccttttgttgtttttgagacggggtctsactctcacccaggctggagtatagtgtggcgcaatcttggctcactgcaacttctgcctcccagattcaagcgattctcctgcctcagcctcccaagtagctgagactacaggtgtgcaccaccatgctcagctaatttttgtatttttagtacagatggggtttcaccatgttggccaggctggtcttgaactcctgatctcccaaagtgaggtcttgaactggtcttgaactcctccacctcccaaagtgctgggattacaggcgtgagccactgcaccyggcctagggccatgtaaaaagccagatctgtgctgctgtctgtgtagaagggtagacaagtggatgagaagttcctgaactattcttggcccttttaccactaagtgaaagtaacttgctgccccaaagaaagatgtctcatcattcgacaggacttyctagttgaacttcatgaaagcaagagatcctgtttttcttgctcaccactgtatcttgagacctgttgtagtgcctgcaatacttatttaataagttatttttaagtatcagttttgtgagctttaactctatgaggtctttgttgtttgactgtattttaactctggccatgacagcaagacaaagttccatttttattgagcttaaaaagaatcaaggccaggtgaagtggcttacgcctgtgatcccaacactttgtgaggctgcagcaggaggatctcttgagcccaggagtttgagaccgttctaggcaatgtagtgaggtccagactccacaaaataatttttttttaaaktgcacgcctgtagtctcagctatcaggaggctgagatgggaggatgacttgagcccaggaaattgaagctgcagtgaattgtgattgcaccactgcactccagcctgggtgacagatcaagamcttgcctaaacaaaacaaaacaaacaaaaccccaaaaaacaaattgaaaatgttgattctttttactacaaacattatggcagcactaaaaacttcgtgggagtgtactgtggaaaatagtgtacttaattaattctcattgtaatcaggctaccaagagccttgtgttgctttaagagttatamctgccaggcacagtggctcatgcctataatcccagcaccttgagaggccgaggcaggtggatcacctgagatcgggagtttgagaccagccgggccaatatggtgaaacaagctgtgtctctactaaatacaaaaaattagccgggcgtggtggcacatgcctgtaatcccagctgcttgggagactgagacaggagaattgcttgaacctggaaggcggaggttgcagtgagctgagattgcaacattgtactccagcctgggcaacaagagggaaactccatctcaaaaaaaaaaaaaaagttgtaactgaggctgggcatggtggctcatacctgtaatcccagcactttgaaaagccgaggcaggtagatcacttgagctcagaagttcgagactagcctgggcaacatgacaaaaccccatctctacaaaaaatasgaaaaattagctgggcgtggtggcatgcacctgtagtcctagctacctgggaggctgaggtgggaagattacttgaagctgcagtgagccatggttgtgccactgccctccagyctgggcaacaaagtgagaccctgtctcaaaaaaacaaaaaaaaattataactgatgtaaactggcagtttaggctgggtgtggtggctcaagcctgtaatcytagcactttgggaggccaaggcaggtggatcacctgagttcaggagttcgagaccagcgtggccaacatggtgaaaccttgtctctattaaaaataccraaattagcaagatgtggtggtgggtgcctataattccagctactcaggaggctgaggcaggaggatcgctggagccagggaggcagaggttacagtaagcaaagatcactccacttcactccagcctgggcaaaagagtgagacatatcaaaaaataaacaaataaataaataaataagtggcagttcatcatttaactccaaagactttgcgtacatttctactgaaaacaatctgagcwgattagaaccctgccattttatagcctttagctcgatctccgaccgttcatttaaaaaaattctacttcaggccgggcatggtggctcaagcctgtaatcccatcactgtaggaggccaaagtgggcagatcacttaaggtcaggagtttgagaccagcctggccaccatggtgaarccccatctctactaaaaatacaaaaattagccgggcttggtggtgagcacctgtaatcccaccctgccgagtggcaggctgaggcaggagaatcgcttgagcccaagagccggaggttgcagtgagccaagcttgcaccattgcactccagcctaggcaacagagtgtgactccatctcaagaaaaaaaaaattctatttcattttacaatatgcagatatatgtccatacacatgcataatataaatgtataccatatttgtgagaatatgcatatatgtacacattagatrcacaatacaagcacaatacatatgtmttttgcccaagatacagcattttgtaaaggagacaggaatttagtaatatatgttccagaaacagtacacaagagaattcgccgagatgagaaagttgtcactaggaatggggagtggtaagaygtagaaggtataattgttcttaaagttctactgccaactctttccaattaattacccactctgccatgctttatggacaggaggttgtcggacactgtcaattaataaatatttgagcatgatacactgcttggagctcctctaatataggagagtgatatcctagtgcatgttacagagggagtgtccacacagttcctattgtcatttgatgagttacttttcaggggccttgtacctgagcaagttgtcctctttttgatggatttcagattgagttacctgcattgtcttgagattgcagcgtgtttcctccactgtacggcgtagtcagcagatctattagttaaactccagtgggccctcagtcactaaatctatcctctgtgttgaaggctttctgcatttgcctttcaataaaggtttagaataactccttctctgtgactctgttttactcctctattgacagtaaattgaatcagcatttaagatgtgaaaaaattaataatcaaatgaaatgggggtcaaataggcactagtttggtgtgttggggaaagcatatgaatgaggggtggtcaagtgaatggtcaagtctcctttatgaccctccttttatagctaaaggttgtcactggcagcaccaaaaggaaggggactcctgggcccattgctatgtatcccagtttattctcaaatgattttgtgagctgttttggtaactgtttaaataaggctacagaatgaaatgtagtatcacattgtgggaggagagggaaaaggattccttttttcgttttttggaagaagtgaacacttgcctggactctgggaaggaacctgtgatctaattagctaaatttagagagacagtacagtaagagaatgcacttttccagagcttcctttgcaagagaggatccatctcttcaaacaatctaccaccaggctcattcctaggtgggcctaagatccagaaactaccaatctattaacatttttatataaatactgctatggcatagcacttagccaaggaagccttcaataaatgtttgttgtttacattatcagagaaaggtcactactatgtcactggctaaagaaagtaggtagaaggctggggtgtgaggcctattaatcatagtattaatcataggtattaaaggtttgtgtatgagctgcctcactcctgcagtaaattccaaattacttagttcagaaatatcctcctcttcctgatgccaaatgcagggcctttggggtggtcatctgaaatgctatgtcctggaagctgctgagtttccaggttcttcccttctcttggaagaggatggttgggaatatacttagattatctgtgtcattaagtgattcactcctccaggaattgacaccattctttacaaaatcagcctgagataagctatgrcatccccaaaattccttccaaatttggaattttatgctgtgaaccatcacacccaatattgaagttaagcagtttttggttaaatgtgctaccttagagggtaaaagagctcctccaacttatgactggttatttgtcatcaaggttcacagctgaattcagtgttggagaagttggaaaaagatgaacaagctgttttgttttgttttgagacasagtattgctctgtcgcccaggctgcagtgcagtgtcgtgatctcggctcactgtaatctctgcctcctgggttcaagggattctcctgccttagctttccaagtagctgggattacaggtatgcaccatcacactcagctaatttttgcatttttagtagagacggggttttaccatgttggccaggctggtcttgatctcctgacctcaggtgatctgctcacctcagcctcccaaaatgctgggattacaggtgtgagccaacatgcctggccatattttaacacagcatttgggtgtcatggaggggta

SEQ ID NO: 9989 - DNA, 33868 bp, Homo sapiens
cagaaaggggtggaaaataaaggaaaaaatattgcattggatgaaaacgctagtctgagtctttactggaaatattatcaataatattaattcaagtctttcttgtttaattttgaatgatcccttattgtcattagagcacgatttttctttgcagaaaaatatccttctaggaaaaataagcaaagtcacatgaccacatgtaaataacaccctctttgtagatttatcttctcagaataaattaaccaagaaaggctaaaaaaatagtcaattcatggcctgtcgcggtggctcacgcttgtaatcccagcactttgggaggccgaggcaggcagattacttgagctgaggagttcaagaccaggttgggcaacatggtgaaaccccacctgtacaaaaaatacaaaaatcagccaggtgtggtggtgcacacctgtggtcccaactacttgggaggctgagggtgggaggatcacttgagcccaggaggttaaggctgcagttagttgtgattgtgccaccgtactctagcctgggcaacagagcgagatcctgtctcaaaaaaaaaaaaaaagtcttttcttgacagtgcccttttaactcatctccctgatgtcctcccacagtccaccgtccacacagcatccattatcttccacttaaagtcaggtcatgttcttcctctgctcaaaacccttccatggtttctcatgactttgataataaaagtagagtgcyaaccacagtttacaagaccctgagtaagctcattactggctacctctcaggtatgatctattatacttgctttccttcactttagccacactggactccatttttcattgtaagcacaaatcacgctcctgcctcaggtgtaccctttgccttgtaaagtcttccctaagctaagtatatggttttmtctcttactttcttcagggcactactcaaaaagttatttccttgaagagttttctctgactgtcctatagcacatatcctatgtgtagcattttatctttttcttcctatcacttcctaaaattatattacatatctatttgtctgtcgtttgtctctgccactagaatgtcagctccatgagaccagagaccttgcctattttgatcactgttatatttcccagtcctagaaatgtacatgtgccattaatgtgttgcatggttgaaagtgaataactacctagaaattaccccagtatttatgttctaagaagcatttagatgaatcaagatatatcttggaggtgggaggagttggtgattgattggatgtggggggtgagggaggggggatatcaaagatgattccctggattttggyaggaatrtatgggtgggtggagatgtcatttactgagaagaggaagaccaaagaagcaggtttgtagggaaagtagagttcagttttggacatctaaagcttgagattcctgtgaacattcaagtagggatgtcaaataggcagtttgatatgtaggtctggagtgagaggagtgtatttccttattatttcttttttaaagagatgggggtctcactgtattgcccaggctgggcttgaattactgggttcaagggaatctcctctttcagccttctgagtagctgggactacaggcgtgtgatcagctttgtctgaattcttttttgagctacgttttaaaaaactgtatctaaaagaaactattgacatcctcatgagtaagcagaactgactctacagtattagactttatggctgaagtaaaacccgacttttcagaagttgatagggcttttattttctgaataaagtgaagcttcctgataaccaaggaatatgacagagaatgttcactgcatgggcaattggtcacttcacgtaaaatcacaaactaactctccaacaaaatgcttaaatcccactgatggtgttctgcaaataggtccagataggttataggctgtttaacatggttgtagaagcagctcaagtatgtgtaccttgtataaaaaaatgggttctttggctgtttcttccacactgtttattccaggttgccaactggcatacataccctattaatactttaaaaatttgaacataagggaacctcctgctgcatttgcagactgcacctagcagatgaaaactgacttccttggcttaggtgtatgcatcttgttctaggtaaaagtgattccagtttaattctcaaacagacttcatttttggccttttacaagtactttagtttttgctgcagagaataattgctttacaaaggctaaattcaatgatgatctagcattttagtgtgttatctgaaacacactgggaatctcctaaagcaatggaatagttcatgtctgtacattgacaggggatattccttccttctactgtttggggcaagtccaatacagcatctccagccacttaaacaattaattgttacctatgaatgtgtaacaaaaagtttcrtttcattctcaagaaatttcatacatccatcaccaggtcatttgaagaagcgtttcgttgttgttgttgtttttgaaacaggctcttgctctgtcgtccagactggaatgaagtggcatcactgctcactgcagccttgaatttttgattcaagcaatcttcccacctcagcctcctgagtagctggaaccacaggctcacgccaccacacccagctaattttttttttttttgagacatagtttcactctgtcacccagcttgagtacagtggtgcagtctctactcactgcaacctctgccttgtgggttcatgtaattttcctgcctcagcctccccagtagccaggattacaggcgtgcgccaccacgcccagcttatttttgtatcttcagtagagatggggtttcaccacattgcccaggctgctctcgaactcccggcctcaagtgatccacccacctcggactctcaaagtgttgggattagaggcgtaagccaccgcacccggcaacagaaacgggttaaacacaacccaaggcgtccctgggtgggcaggaactgattttttaaattttttgtagagataggttttgctatgttgccggggctggtctcaaattcctggcttggccgggcgcggtggctcacacctgtaatcccagcactttgggaggccgaggcgggcggatcacgaggtcaggagatcgagaccgtcctgactagcacagtgaaaccccgtctctactaaaaatacaaaaaaaattagccgggcgtggtggcaggtgcctgttgtcccagctacttgggagacaggaaggagaatggcgtcaacccgggagtgagccgagatcgcgccattgcacctccagcctgggcaacagagtgaaactctgtctcaaaaaaaaaaaaaaaaaaaaaaaaattcctgggctcaagcaatcatccctccttggcctaccaaagtgttgggattataggcatgagccacagcacctggccaaaagttkttttttttttaatgccagagatgaaatgagatggtgtggagaggagactttcaagtccctggaagaacacctagtttgcttgaaagccccttaatctaacaagttggacatacttattattttgtcattcaataattcaactggcaattacatagtgtggatatactgctgctgtgtttatgtgtgtgtgagagtgtgttagggagggagrgatacatagaagacactgttttctaagaactcatggtctagtagaaaacaatgaagaataacagaggtaaagataaagggctgtgaaaagggatcattaattctgcctcaggaagcctgggaagacttcacataaatagtaacatttgtttgtttttgagacagggtctcactctgcctttctcactgcagcctccaccttccaggttcaagtgatcctcccacttcagcctcaggagtagctggaacaacaggaaccaccatgccaggttaattttctgactttttgtagaggcaaggtctcactccgttgcccaggctgatggccaactccttgaggcaagcaatcctcccgacttggcctctcaaagtgctggattacaggcgtgagccaccacgcctgccagaagttaagtgagttccaagaagaatattgtgtggatgcaggagcacatcctggatgtagagatcttggccataatatcaaggactatcagtgatatggacatcatacatcctcataaagcatgtaaaggtgttagctttaaaatcattcctaggttgtctggaacttttgacataaattctaagaattccagaagctcctaagctacatgtgaaatcaaaatgaaccttttggaaaagtcactattaccaaaaggtgggtatgtctaatgatatcttaagatcaaaataaatgacaattaccgtcacttgagccagaaaagattaaacagacttcccttcagtcaatcatcttagttgtatctaacccggaatatatggtttgagcaccatatccactttatcctttgctaatattctggcaggtggagacaaatgtggagtcactaccactttacggtaaacattcttggtattacctttatgtgacttgattattacgggagtttggtaagattatatttttaggacgttttcagaatttgacctgtattcttgagttttaattattctgtaatgtaaattctactaacttgattaataaaacttacttataatcttcctttgagatttttggatagtgtccaattaatacaaattcgtttaactgcagtggaaaatacctaaactttttttttttttttttttttgagacggagtctcgctctgtcgcccaggctggagtgcaagtggcatgatctcgactccctgcaatctccacctcccgggttcaagcgattctcctgcctcagcctcctgagtacctgagattacaggtaccggccaccacgcccggctaatttttgtatttttagtagacacgggggtttcaccatgttggtcaggcttgtctcgaactcctgacctcgtgatccgcccgcctcggcctcccaaagtgctgggattacaggcgtgagccaccgcgcccggcccaaatacttaaactcttaagatttttgctggagtctgcaaactcgtctttgtttcccccgtgcccgaacactttaattaaacaggcaaataattatttgttgactacagaagtacctagaagcttcattttcttctaaggatactgctggaagcagcaaatcccaaagcccgaataatccagtctccagccgaggcagcgggaatttttaataggtgtataaaattactttttatacaccttaatgaaacgcctaacggtgttacaagaaaagaaaaaaaaaaaccacgcacacacaacaaaaaagccaaacccgaacacaaactcataaacctcgtaaagatgactcacgacatttatatattctatgtacaaaggctaaagaacattaagcgaacccttgatttaacacactttccaattattagtaacgtaaaggaatcacggtacgttttaggatctttaaacaacaaaagcaawgcaaaaacaatgttttccttaagatatgcaagttacctgcttcttcgaccaaaaacaaaaaaattccaggagaaaagcaggcaaacaaaaatcttacttggaaagccaaatcttaaaaagaagccctatcggcccagcggcgatagacgaaaacctcaatgtcacccggtcccgggcggcgacggcagggagagtagctgcggcaatcagtgcgcgcgcggtccgctgcggcgcctggcgctccgcgggcgtccgggtggacagcgccaggggcacagggctgacwtctcagggctaattccctcctccagtgcgtaaatccaggcttaagccgccgcagggtgtgagcctcccctcccccacccgaacgccgcagctgcacggggcacgacagccttcgcagaggtgcagccacaccccggcctaacgctgctgctcccgccgctactggagtggtggggargggtgagtggactccaggaatcctcggaagggcgggggcggaggcagggggcccctctagccgctacttcgaaacagcaytccttgttctcgatggtccccgcgcgactgtcttagctcacgacacttccggttccttttaaaggcccccaaggctgtgcaacgcggagcgtgagaggaaggtataaagggtagcgagagggcgggaccgaggaggaaagggaaaaaaaaaaaactagggggataggggtggggggacgcgcgaagggcgcgctctcgcgtcacgtgaccgggacgcgccgttcttccgtcggccattttaggtggtccgcggcggcgccattaaagcgaggaggaggcgagagcggccgccgctggtgcttattcttttttagtgcagcgggagagagcgggagtgtgcgccgcgcgagagtgggaggcgaagggggcaggccagggagaggcgcaggagcctttgcagccacgcgcgcgccttccctgtcttgtgtgcttcgcgaggtagagcgggcgcgcggcagcggcggggattactttgctgctagtttcggttcgcggcagcggcgggtgtagtctcggcggcagcggcggagacactagcactatgtcggaggagcagttcggcggggacggggcggcggcagcggcaacggcggcggtaggcggctcggcgggcgagcaggagggagccatggtggcggcgacacagggggcagcggcggcggcgggaagcggagccgggaccgggggcggaaccgcgtctggaggcaccgaagggggcagcgccgagtcggagggggcgaagattgacgccagtaagaacgaggaggatgaagggtgagtaaggggcatcccaggatagtcaggcccaactagtccccctccccctctttattcccccgccattagssctggttcccgctctcagcccgttctccgggcccccatgcagcctccttgcactggtctccctttttctatgttgggttccccggaccttcatttccttcttcctttgcctgcttatcgcccccctcccccatcacacacgtttccacctttagccgtcaccwtgctgctcctcggcccgccctcctttcctccctcgccatgggtctcctcccaccgacttagccgccaggattttttcccgcctgtcgtgrggtaccttttttctttccatgctgtcccctctttttccctttttctacagtcttgggcataaaaacacagacacaaacagcttctctgtttgtattactaaggtttatttggtgcttctccaccatcctgaaacgatgcgattgtttataagcacatgttttggggaacgcgtaggctgtccacctctgcctctcccttgtcggccttasgccgactgttttcttgggattttgaataagtttcgcctaaggatttactcattttctccaccatacgctatcgcacaatggcatactcatacaggccctacattttgacatgcagaccaaattgggtctggtgaaatgctccgagtttcttgttggtacattggttttgctccgcgggctctggttaagttcttagtcgatcgggcctgcacttgactggagctgttcctatctccggcctagcatctacccttcccccaccccactgagttattctaaccgcgcacccttttcgcgccctcagctattgggttccccaactgttagtacagattgtaccttactttttatgtgcaacctaattttttacaacccccagccccctttttttcccggtgcccaggatcctattttggtgtcttgatatctgtttcccgcccactaagggaggcctgtagtcctcttaagagaaacaaatcctgtattgtgctatgggatactttttttttctttttgrtgcaaatttcttagtattaacttgcttcctccaattgaaataacagttgtatatactacctaaatctgcatttagtgtattaaaatgcagcatttgggattgggaacataatacgggagttagcaggagggactaaatcargtttcttggttgagttttcttagctccgattactgaccgatgatcgtgggttcacgcttccattcctttttgtaatggggaggggtgtgtgtgtgtctgaatttttttttaactgtaaagagaaaggtgttggtggatataacaagatgtcgctttaatctagtattagaaaacacgatttcytttactgagaaagagcccaggatttggagggaaagttgggaggggagaagcactttggaatatagggtttattaagcccagcytaggcagattcttgtcaggctgtttgatgatagtgctggttttgggggagtggtggtgggaagggaagcaaacttttaaaaattaaacagaaccaactcgaattgwatatagcttatttgagaaaggaagatgttagatatttggaaacttaaaacctttaacattttggttttcgtttgctgaattctgttctttggacagaggcaccaaaatgattaattgtataacttcctgtttggggcaggctttctgttagccctgataattcaaatcgcaaagcagctgactttatagttacctactgttgaagtgtaaatgaattaaagtttttaaccctaacagtgtcaaaaactaaaactagaattttgattggttgctgtaccggttgttaattccctagccattcaaactcctccccacgacactctgaagcagcgacggcacagcgggaagaatggtaaawcttttaaattttatttctgtattataaaggtttcagtagtcataatatgtagaggctgtgtattggttagttgcccattgatccccaggaaattctagaccatagtacatacagtaggtttgtacctgggatatataccttttataggcatcatgtgtaatctttgggcaaaattgatgccgttacatggtatttggtctgtggtaatgcatgtagttgcagtttggcaatttaagctaaacaattagtaacgatatttttatatcgagcaagaaaaaatattaccgkaatcttcacatttgatttattttaagatgaaaaatatttttgttggaatttaagtttaatggctaaatatgaagactccttgatataaaatattgtgtttaaaatgtcatgcatgttatactgaaatattctggagatgtctgaagcagttctttaagcagcactgtgtattatggaaaaatgtttgtcttttacctagcatatttgtaaatagacctttaataarawgtgtgtgtgtgtgtgtgtgtgtgtgtgtgtrtrtrtatatataccattaaaaggtgggctaatgtggctttccactacagctcttaccagattttttattttcagtgtgatttggctggaatattaataacagttggttgacatgtattcacaattgcatgacttctctttggargctggtaggttgagtattgttctttttatccatcctttcccctcccctaaatgtcagtcttyctgcttttaggattatatttgaattttcaggggtktatacaccaccactggagagtagaaggccactaacttgcaggcagttaacttatatctttmcaagctacattctattttaagagcctatttagggtaacatttaaagatttgcttatcactgtattctcatccactgaaatcagtccagctttaccttggagaaaaagcagatgggaaacaggcaaggggaaaagcaaaaaagaggaaaaaaaaagactggggtcacagtttcgatgaatgttattccctgtattkggtgagtggtgggcactagcagctcaatttcactgctagctaatagtggcaaattaagattaaactataaactatttgacattactccattatgtattttgagtctcatgtaattgtttccagtgatttgaaatgaccataaacttaaatttgaaggtcagtgttttgactcttcgaagtaattacacttgacctgctacctaaaacgatgtaatattacaacttttttgaataatctcaggaaaaatggagaaatgtttatattcatagttaataaacattctagatagtaaccaactgtcatttactgaaaataaaattttacccaggtttattttatttttgagacggagtttagcttttgttgcccaggctggagtgcagtggtgtgatcttggctcagcgcaacctccacctcccaggttcaagcaattctcctgcctcagcctccaaagtagttgggattacaggcatattccaccatgcctggctaattttgtatttttagtagagacagggtttcttcatgttggtcaggctggtctcgaactcccgacctcaggtgatccgcctgcctcggcctccccaagtgctgtaatcacaggcgtgagccactgcgcccggcctasccaggttgattttaaaattacacttaaaaataatgttctcatttttaagggctctaatatttgacttttcttaactttccaattatgcagccctatcctgttccagacgttaaggctttctttttgaatgaaaaactttcagacttttttctctctctttttttttttttggtgtctgcactccccaccgtatctgtcccttcctctttctcccattttgagggatattataagggcaacagttttatagtctcaatattgagggtaagactggttaatagagtatccaaattgaatttattaaacacagttctgtgtgcatttccttctgcaaatctgagaataaagtgattacagtttcatcctaaaatactttaaaaatcagttggttttagaaataggtttttttccttttgcatgtaagaatggacagctatttttaggaaggcatgcctgttacacctctagtggatgtttctacagtttactatgggactttagaataagtaattatttccatagtatgccctcctgagttcactttgatttactctttcccacattaacatccgtagtttttacttataagcattggaatttctcattttactttgtggtgtggacccattctgttctctgcagtgctgcagttcatttggggtaggtactttaaaattatttagtgtctggcaamatatacatgccatgtagcaagctctctgagggcasagtttttaaagtttaaaaatcaatggaaactacaatgttgtgttaactttgagatagttttacaaggtaggtacatagactttcctgcattggattgggtaggaagcaaaaaagtccccccattcacttagccaaagtccagcaatgcttctttaataacaggacagtagatattgtcctgttaatggttagtgtataatgagcccaagtgtgattcttcccatttgggaattctgtgaatcctgctgtaggttgttgcctgtctgattataaaagactaggctcatgtttttgctttaaatgtttgagattatggtcttataccttagtgcttctggggcaatctgaacattgtttgctttgtaaaataatttcttttagagtagtctcatgccaaatttactggcctttgattcagtacagttgggtttactgtatgtagtaaagttgagaccctgcgtagattggtctcagtgttagcattcttgggagcctttgacaaatttcccgagttaaaaattccagaaattgatgtccccagatctttagatgaacatttaagcgaagagtattaaatacttctcactgtaaattttcatctattatgaaagatactaaaaataatctcgttttttaagtttggaattgggagaatgtcattgaagtttttcagtgcttgtttttgagatacacatactttgccttaaatctggggttttttcccttaagccatgtgaccctttctacaaactcagtgtatgtttttaatatttcctgggtactctgctatcgtcctaatacataatattagggtaaggctgccctaataygagaacattttgagtatactattgagtatacatttgagtatacatattgagtatactatttatgccaacgtgaaggatrtgattagttttagccttcaagtcataatacataccatgcttgaaagcatttaaaaaggaatagagtaattttttttcccattccacttggaagctgtgtacctcaagtgtgtgcacatttacaaatgggtgaaacataacttatgttagtccaagcttgatttgacttcagttctgcttcaacgttttagtagatagggcactgaactggatgctgaaagcgtgggatctctttctgttgcttcacttccaacagtgtggtttcaggtaatacgacatgtttgttacttggtttgctgatctatgtgttggaaacaatgctcaccacaggaggattgactacatagcctgctttcatagcttgtgtgtatttatccagtgccctaatagttgatactgccagtgatttactcctgtggagtaaaggtaagcatgttttagtttctggagtattatattgtacgttggagctaggtatttaagaatatttgggggtggrgagggaagactccaatttactggtggtgcttggccagtaatcaaggtgacagtttaagtattgggtcttgcactgtaaactcctgcttatctagacttcagactaccacagagcccacacagccaggaagtctgtctccccatttagtcttatgagcaagatagatgaagccatgagaaaatatactcaaaaagcaaccaacagacaatgtcatggaatgaatctcctacagatttttccttacacttttgaaaagtaacatgattttaaaacgttggaaaattcatcaaggtacaaatcattttctgacttcagcattgatacctaaattgatttccagtacacagttttatagaattgtgaatatgtagtaatctcagttaaccagaaccttaaccttcaggttaaggaaaatacctattccttaacctctaggtaaatgggagtttmccttacaaagctgattgagagcttatttaaaacgtaaacatacaagatgtcattgcttccttgtagtgaagtgaaaaggaggtattggattaagcatttaaagttaattaaagtagtggctcgtgcctgtaatcactggctactcagaagtcttgaggtatgaggatcatttcatgccaggatttctagaccagctaggcaacataatatgacccctgtttctttaaaaaaaaaaaaaaaaaaaaggctagtgtgttggggggtgtgtttgtagttgtagttacatctactcaggaggcagaggcaggagaatgtgttgagcccaggaaggagctcagggctgcaggaagctatgatggagccactgcattttgatagtgagacctggtctcttaaagtgttttatttttaggccaggygtagtggctcacacctgtaatctcagcactttgggaggccaagatgggtggatcacctaaggtcaggaattggagaccagcctggccaacatggcgaaaccccagctctactaaaaatacaaaaattagccaggtgtggttacatgcgcctgtagtcactcaggaggctgaggcgggagaatcacttgaaccctggaggcggaggttgcagtgagacaaggttgcaccactgcattccagcttgggcaacagagcaagactccgtctcaaaaaaagaaaaaaaaagtttatttaaaaaactgtcaygttggccgggcgcggtggcttatgcctgtcatcccagcactttgggaggctgacgcaagcgaatcacctgaggtcaggagttcgagaccaacctggccaacatgttgaaaccctgtctctactaaaaatacagaaattagccgggcatgatggtgggcatctgtagtcccatctacttgggaggctgaggcaggagaagagcttgaacccgggaagcagaggttgcagtgagccaagatcgcgccaccgcactccagcctgggcgacaaagcgagactcygtcccccmcccaaaaaaactgtcatgtttcatttattagatgtttattttttcaacttcgctttttagtagtcatttagttaggttcattctaaagtgtgaagtaatgagatttaatacagagaagtctctgaaaatgtttggtccattgtatattagtcttgaataaatggaattctttttcacacttaccttgaaaatgtcatctgtagaaagctgggggagaggaatacctattctttaatgatggggaaataataccaaaatttatatttttattgactaaagtgttttttggggaagatttgttattggctaaccttaatgtctcattagttttaaatagttaaaaaaagtgggctgggtgcggtggctcacgcttgtaatatagcactttgggaggctgaggtgggcagattgaacccaggagttccagaccagcctgggcaacatgatgagatcctgtctctacaaaaaaaaaaaaaaaaaaaaaaaattagctgggcctcgtggtgtgcacccatagtctcagctacccaggagcttgagatgggaagattgcttgaacttgggaggcagaggttgaagtgagccaggatcacaccattgcaccacagcctggcaatagagcgagactctgtctcaaaaaagtggttttcatgaattttataccagatcagatctaaaaaggctggttagtatttgaactcgatgaaagcttgtcaagctctctcccaaggtagttttcatacaacttgtaaaataccctaacgtgtgatattatctagttgcattgtaacctcctcccttccccttaggtaactagtgacttagctttagtttgtcattttaggattttagaagaataattatgatggataaaatactggaaaaattcagtaaggatttaatggtgtgcttgagtaacattactttaaaagatgacagtgattggtcatttatgttttatacctgaaatgtatatcaggttgacattctgttgtattttttaaactgtcagaacttgttataaagccatgtatgtaagatcataagttgttaggaagtgtttaaaagttaaaggattggctgggtgtggtggctcatgcctgtaatcctagcactttgggaggctgatcgctatgtccaggagttctgtgactagcctgggtaacagagcaagatctcgtctctaaaaaagtaaaaataatacgaagttatagaacatagaaaaagaatactattccaaaattgggagtgagtataatggctaactttttaccttgaataaggtgtttgacaataaagacttattaggggaggtatcttggaataaaatagttaatattgactgggaatgttaaaaacctagtgacctaaatagtccagagaataagtttattgatggggaaaagccaggattattaaatcggaacattttccaccagccaggattgctccatgtatatttccttttatgttttaaattattctttactaaaattactggcataaatgtagggtagaccaagtcatcaaggtgattttggaagctacatttaaagggtcttagttgaaataccacctaatttttagtttatatatttttttacatggactatttaaaaatttctgggttatttcaagttggcagcattgaaaatattagaatatgtttatataaaactcattgtggccttttccttttaatgttggaaagtttataaagcctatgcagttttaaaaaattaagccattgagtaaataaaaagtttgctttattaaattatgtttagatagtgcttatagtgctttaccccttcaaaatagtaacttctatcaatcatttaggatgtgtgtcagactattctgtgtcctttaagtgtgttaactagttttaaccctctgcaaatatctgaggtatgctctttttacagatgggaaaacaatcttggactttaatattttttcttaatgttacacaattagtaagaggcagggggccaggtggagtggttcatgtttggaattccagcactttgggaggctgaggtgggcagcttgagcccaggagttggaagactagcctgggcgacatagtaaaacctgatctctgcaaaaatattagccgggtgtgttggtgggtgcctgtagtccgagctactggtgaggctgaggtgggaggaccaactgagcccaggaggtcaaggctgcaatgagctgtcatggagccagtgcactccagcctgggagacagagtgagaccctgtcttaaaaaaaggcagcagtagggtttaaaccccggcattttgtctttattgcctctaaacttaacttgctttaaaagatgataaaatgtcccacaaaggagcctaaattcctgaatgatactgcatatcacttggatagttatctatgctgagttgtataactttatgcttgtcatttaattttacaatttggtggaagccaatgtgaaagcaaggagacttctrttgtggagtaggtgttttaaactgaataccatattcagccttggggtgctgaatatttagttcacagctaggattaagatactcaactatgttaataaaatacagtagatgaagtcctgcattttaattgggattgattcacttagaactaaggatcaaagtttaaacttattgcagcgttaggggccatctttgttgctagttgaacaagtcttggtcgtttttaacatggctccttagggtattttctgaagttctgtctacttcattggaaagtgtttgcactacgcaggagtgacagcaatatgaaatgctttgtattcaaggcagcagaggtaatctggacagacagtacatgtgctttaaaagcaagatabagtcatagaaaatatgtagataatttagccgggcatggtggctcgcgcctstaatttgggaggccgaggcaggtggatcacgaggtcaggagttcgagaccagcctgaccaatatggtgaaaccccrtctctactaaaagtgcaaaaaaaaattagcctggcatggtggcatgcacctgttatcccagctactcaggaggctgaggcaggagaattgcttgaacccgggaggtggaggttgcagtgagcctagatcatgccattgcactccagcccgggcgacagagtgagactctgtttaaaaagaaaaaaataagtatttgtaaatgtatatatatatayayayacacacacacacacacatatatatataaaatcattatgccatcagtttgagggagagcatgtatgccaacattgtaragactaagtgcccatttatccataattaagataagcagacttttccccaytgtactataaagttagagtttggggctgggtatggtagcttccgcctgtaatcccagcagtttgggaggctggagcgggcggatcacttgaggccaggagttcaagaccagcctggccaacgaggggaaaccccgtctctactaaaaatgcaaaaatcaagtcaggcgtggtggtgcagcctgtaatccctcccacggaggctgaggaatgagaatcacttgaacctgggaggcagaggttgcagtgagctgagatygtgccactgcgctccagcttgggcgacagagtgagactgtctcaaaaactaascaaccaraaacagaaaaagatggaatggaattaatatgttccatttagtaaagatggaatagaattggtccagtttgtgttcattgtagcatattcacctatttggtcwgcaaccatttttttttttttaaagcctaagcataccctgagaacaacaaccttttttgattagaacagaagaaaaagccagartgttcttgggctgccaaaatattaatacgtttgtctcaaagacgarccacttaggtgcttgcttagagacttctactttacacagaatttgaaaagtttgacagctggctacttactctgcaaaacggaagggagactttttagaacagcaactggtgatctggcaaaaatgaaaagtagaacttgtgaagaaatgagatggacttggtgtattaatagctaattttagaagaccctgtggatattctaaatcagcataatagtgatgtctgagccatagtgttaaattatgattactgtatttgaagtataagaaggcagaaaagtgtgatgctgttagaaaaaaatctcatttcaaatgattgaaggttaaaaacaattggggaaagattagagagggcaggcggtgctttaagggaggtggaataatacttggctccttattctccaaaagtgctggatagctgaagtttttaatattctggataattgatatttgattattagtttaggagggatagcatcttcagtgaacccttgtagctctaaggtaggcatattaaacaactaccatactaaaggtggggagtacgtttggagagcactttgctgggccagctgatgatatgcttaggtgatatttaagaaaatctgcttcttgtctgaaaaacatttggggcttcagaataataccacatacctcattcttggtgttttaatttatttctttgtaattgttttctgtttcttaataattttaaattaagggtattttcccaatataaacattgctttttggttaaataaaatcaaaactagttctgtctccatatctgaatagaccagacagagaattttcttgcctttcaacagcttaaaaaatgtttttgttagaactgttgtgttcaggctgaaatactttcaaagtttgttagttattattgagaaatttctgtaataatcatggaaagggtaatttaatagttaaatctcaacttaattgaagttatttctgttgtggaacttatggwcatcttagcaagaggtcattgctttatagtcagttctctttctcattaaaaatatagtgtactcacctttacagggtgaatgttggtaaataacttctgtctgtgaaggamgtattctggasctgtaagttaaaaataaggtgtttatagcaaattatgtaaataaagattgtatattagaaggtacacactattcaaattaaagaaaatgtatattgagaaaataactcaaatttcttccatgaaattggcaagaagtaaacatttcaaatacacaaaacattatgggtatttttgttcatttgattataaaatgccaaagttgttttataaatgctacttcaagcctggaaactttgaggaagtcctgaacattaagcatataaatggcccarctctagaatacatgtaagttgaaaagctaacctgaagtgggaagcgcagtatatacctaagacttactctgcactgaaagtttgctttgtcactagaagtaaaacaagactgtggtaggatagtaagatcagtaacacctcagttaatcaggtatcttggaggaagtgaagaaagaccctaattcaagggacagttaattggccttttattccaagaatgggccttagtggcagtatcttaaaagcccacaagatggagatgtttcctaatgaaaggcctttaatttctttatagagctgagttagtgtcacatcccagtccccacccatgacccttccccagttaaaaagaagagaaaatgttgagcaagtctgatttgattcccatggtgacatttttagccattatgtaacaaattctgacagtttacccttaaaattaaaaacctccagtcctgtctttttaaagggtagaaagaaggttaggtataggatagctttttatttatttatttatttatttttgtacaaagggagcctatgtaaagctgccagatstgaactttctggtgttttgctgtaatgttagtaagatttcgccttaaaatattttattttgagtatatacgtttggtcttagagtgtcttggtggatttccgcttaccacccatcrctttctgcattttaaaggcttaaatactttattgctggttaactgaggttctactgtaaacgaatcatctaagttaattagtggattgtacttcaatggataattttcactaaattgtttatattgcacattacttttgtcttaaggactcttagcacatcaaaaaaattggctcacaacttaattgtgagatgtagaattttccattttatgtgctaagagttttgttaatgagagaactgttaaaatagaaaaggagcttcagcatagacaccaatgctggttgctgagatcagtggggaactgcatagcattttaacaagtttaatgaacatttggaagagaaatttgaagctaagattctggtttttttgctgttaaytttttaatctaaggaaaacttttatgtacagtatttttactttgggtatatgtttatcttttagcaagttgaaagacttaatttgctgcttgctcactattttgtaattatttgggagcagcagtaataagccagctttttggaataggatgttcctgatgtgtggttatgtaggaagaatgatgttttaatatactgcccagtaaactggtgcagtttggaaaaggtgtgttattgatgtggataatatttaaggcaatttttkttaagcattttaatactgctttttgtctttacaggaaaatgtttataggaggccttagctgggacactacaaagaaagatcykaaggactacttttccaaatttggtgaagttgtagactgcactctgaagttagatcctatcacagggcgatcaaggggttttggctttgtgctatttaaagaatcggagagtgtagataaggtagtgtgttacgtgttctgatcagttaataatataaaatattaacatatggatagtttgatacaatgagtttgcctatttgtggttccccattttgatagtataggaaggaagaatagttcttgccccaatacgttttatgaagatagaggtaggttcaggaattatttcctgaataatttgtgttccaggctctgctaaattttgaaattaactttaaagatactatagacttaaagatgcctagttaaaaggatgtgttttagcaattcacagaagtccatattttgaaattttgttaggcaagcaacttttaactgaatcattattttgatcctgggctaaagggaagtagcagttatgtttgtatatagtgctaaagggaagtagcagtcatgtttgtatatattgaaggtaatggttatctagtaattggttaaatttgtgtatgtcctaccattcttacctttagatttaaacagtatatgttagttgatgttacatcaccaccatgacttgacagtttaatctwgagcaagtcaacatatgcttggcattatctgtatttatagttatttttaagtaagttaatagtctctgaacttcagttaagatatatattttttaaatgaaaacttcaatttccttaggtcatggatcaaaaagaacataaattgaatgggaaggtgattgatcctaaaagggccaaagccatgaaaacaaaagagccggttaaaaaaatttttgttggtggcctttctccagatacacctgaagagaaaataagggagtactttggtggttttggtgaggtatgttataaatgttttgacccagtttatgtcaaaattagtgtgaatgtgattgtcccattatggactcagagtcacttrgcttttcaragctgttagggtagattatgtgatctgttttggaataaggatattgtaaatacttcattagcaggtctttgaaggttggataatgtgtttttctcattgagcacctactctatgcagaktattgctggggtagagtatacaaagatgaaatagacaaacattcttaaatacagacaattaagaggaagaaatctagattagaaggagacttttgttgaaaataggaaaggaattaagaatagggtgtagtgccttatcagttgaaatgcatgtgtaagtgcaaatttaatgagactaatcattatagactcwttagtgaggctggacgcgatggctcatgcctgtagtaatcccagcacttgggaggccgaagtgggtggattactggagaccaggagatgaagaccatcctggacaacatagtgggaccccgtctcaattaaaagtaaaacaaacttagactcattagtgaaataggtagataatagaggtttcttttatgaattaatgaaagttgagaaatttgtggccttgggctccagatacgtcccacagacatttattgcttgattgaaacaataagtgcttttttagtgttgaggatttgagatattgcccacaaaactcagtatctagctttttaaaaaatayttgcaagagcacgcaacatgggaactgacrctgccctcctgtacggcagcatctctcaaactgagtagtagcttccatcttggtttgggcatatgctctccagtttttagtagtcctcaccaccctacttcctgttttctctcaaatacatttttwttctgtttttcttagatttgactgttttcttcttgttctttgtgggcatttgaatttgtgacccttgagttaggtagtaaatgtcagtgcgtggtaaagcttatttttgtaaatagttgtgragaccttagatggartgggtgttctaatttgaagaattccttaaaaggattagaataaatagggagaaacaggagactagaacttcagtgccaaatacatgttttctttgtgtgttttcccccctctaaacttgtgtttcttttaaggtcaataaaatgcatgttagcatattaaaatttgttttttaataccaggtggaatccatagagctccccatggacaacaagaccaataagaggcgtgggttctgctttattacctttaaggaagaagaaccagtgaagaagataatggaaaagaaataccacaatgttggtcttagtaaagtaagttaagcatccatttacttgtagagaaaactagctgttgtaaagagcttaaccatttatctttctctgtaaaggcttaagttctttgcatgctttaaaaacttctcattggttacttaccattgaccarctttttgtggggagcaggatggacacatttgttagtgtttttgtctaggctttcacaaaaatagtttttagaacttgacaagtaaaatgaagtaacatcactagcaagtactcataagtgattactcttaagtactaaatattggtttaattaataaactgactgaggaaagtttcaaattagcctactctatttaaacatgttggctattctggttattagaaacttatttagcaacttttattttcttgagtcagtttaataatgtaatttttctcttttagtgtgaaataaaagtagccatgtcgaaggaacaatatcagcaacagcaacagtggggatctagaggaggatttgcaggaagagctcgtggaagaggtggtggtaagctagagcctaagtttactctatcttaagcttttctgctttttaattatcctgaagtaaagatctttgctgatcttctgactttagtgaacctattaatgtgctgcaggccccagtcaaaactggaaccagggatatagtaactattggaatcaaggytatggcaactatggatataacagccaaggttacggtggttatggaggatatgactacactggttacaacaactactatggatatggtgattatagcagtaagtactatactttttatattaactgctatttgacatttattttgtacaaatttggataggcagaaaggttagtgtagccttgccargtgcaaatgtcttcaggtttcaaattcctggaaacttgaaactgcagccattttattgcttggttcctcccagcctatatcacacacacattataagggtagggtgtatgtgtggttctatatatgtttgctgggcatttgttttacttggatttaaaaattttaagctcagttcagatcttttaagctcaaggtattctaaatgtcacttcttggaccaaccaataatcttggcatgatgtgtcttaatcctataaaactgaataataccacatgttgccagttaaaactaatagtatcctcgctttaggattattaatgtagaaactcttaaaacagatgttgagcttgatagaaccaaaaaacttgacttttagacatggaaagccctgacttcattgtgcaactaaggtagttgctctccacctgatttgtagcaactgttgagtcgtcaggtaaagggttctactagaagcaatcttacatttttttggaggagagtggttgcattggttgcattgttttaagtggtttttcttttccttccttggttagaccagttcttggagttatatcctttcttaggtgactaggcctgctgcacaataataggttaattaaagtcagaagaaggtcagcaaagatggattgggtgagattggggcccttttcttagaagggcagagatactaagcactgattgtggttgacaatttgttctaaattttaagatattttttgctggtggttgtgaaagggtcagctgtccatcctttgaaacttaaaacttttaaactgtaagggtgaggggattgtctcccattttatacaataagtcaagtaatcagctcattctgaatgcctgccattgtatgcattcactacatatttggtaaattatttgataaatgattgctcagggtgaatttttcacacktgggaattaagctacccttaattttttgagattgtttaaaattaggtactgttctgattattagtatgtaaccactaccgttctggttctaacacttgttttattttagaccagcagagtggttatgggaaggtatccaggcgaggtggtcatcaaaatagctacaaaccatactaaattattccatttgcaacttatccccaacaggtatgttctaaaaatagtttttttttgtcatttacaatagtagtttttataatctatattgttcataaaayaatgcttaatttaagagtttcacagcacccagaagtgcttaccatattataacatagtgactttcaaagatatgtaacacaggtgctcttaagcttttgcctttttgtcctattattaacaagtcagtaaagttaacaggtaaagtactgctaatgggtacaaattaaggaattgcagcaaaaaagtattgcctactaactctgacattataccttgtttgtacccgccagcgggaacttcattgcaggccctgtgtcgcgctgacttcacgattctcacaggcccgctcaatgcggacagggtacgagatgctcacgctctcgaatgctgccgtttggtatggtctcttccaacatcctgtatcagcattataaaataaaatggatacttcaagctttgccttcacttatttctttgctttttaaaaactatttgtaatgtaattttaatgcattttttacaggcccagtaatggttaaatacgtcagcttactgaataattttaactatttattcttctaaggatacagcttgtctctggattttccagtcttaattttatattttattaatctattttaatgcttgcttttcccatttatagacgttgtagcagtaattgcaagaagttcttgagctgaattcctgttgtgacaacttcctataattacagtagataactttttyttttagtcgtatataacttttctataacttgtgatggacaagagatatgcttatccaataaaataagcttaaatattagatgctcttgggtcaaaatgtccttttaccaaattgacctttttatgagttctttgggtaaatactttaaagctttttatattttaaagaatacttgtaaaagcatatcacatcttaaaccagtggtgcacatgtggatttacagctcatggactctactgttcagctttaatttataaaacatatcacacatttaatgttatacagtatttacatatagtggaacatagggataactcagttttatgtaaatttttgttaagtgttgtagcctgcccagagtgacttctattttttcttctttgtctccaggtggtgaagcagtattttccaatttgaagattcatttgaaggtggctcctgccacctgctaatagcagttcaaactaaatttttwgtatcaagtccctgaatggaagtatgacgttgggtccctctgaagtttaattctgagttctcattaaaagaaatttgctttcattgttttatttcttaattgctatgcttcagaatcaatttgtgttttatgccctttcccccagtattgtagagcaagtcttgtgttaaaagcccagtgtgacagtgtcatgatgtagtagtgtcttactggttttttaataaatccttttgtataaaaatgtattggctcttttatcatcagaataggaaaaattgtcatggattcaagttattaaaagcataagtttggaagacaggcttgccgaaattgaggacatgattaaaattgcagtgaagtttgaaatgtttttagcaaaatctaatttttgccataatgtgtcctccctgtccaaattgggaaygacttaatgtcaatttgtttgttggttgttttaataatacttccttatgtagccattaagatttatatgaatattttcccaaatgcccagtttttgcttaatatgtattgtgctttttagaacaaatctggataaatgtgcaaaagtacccctttgcacagatarttaatgttttatgcttccattaaataaaaaggacttaaaatctgttaattataatagaaatgcggctagttcagagagatttttagagctgtggtggacttcatagatgaattcaagtgttgagggaggattaaagaaatatataccgtgwttatgtgtgtgtgcttatttgtttgaatgattttattttccatttctcaaaggttttatttttttggttagggccttaaaatttcaggactgtgattattagtatgtgtgcctaaggaactttttgagtcactcttaagaaagtgaaactgaagagtctaagtgataactataggattaagtcagaattgtttttcctgtcatttgttggaagcttcttgagttctgttattagcattcagggaattgatacccatcaacttgaatggaaaatcstttgtaggtattacttaagtgaatgttaagagttccaccctgagtggtaatctaaggctgtgcagtcagttacttcagactgctcagaatagttcattagaaaggtaacaaatgagaaatgtattattatacagttctatagtagtgaagtgatggaatacctttcttacttttgtggagttacatctgatgctaagaatttgacctccaactaagcaaacattttaatgagcaaaagttagtgttattaaagtttttttatgatagatccaaattgaggacctgtgtcctgtttttataagattgcaacccagctatgctcatttgtttatgttttgtatatggctgcttttgtgttacagtggtagagtttagtagttaggacagagacctgcaaagcaaaataatttacagtctggccctttacagaaaagtttgctgactcatggtcaaaataaatgaaaattttttgtgttagggttgttaagctagggttctttttggtatcatatgcttattttatgtaaatctctcaataaaaaattatttttaagagacagggtctccctctgtcgttcatgctagagtacagtggctcactgcagcctccaactcctgggctcaagtgctcctcattagcctcctcagtgattgggactacaggcgcataccactgtgcccaactaatatttttattgtttgtagagacagggtcttgctatgttccccaggctggtcttgaactcttggcctcaagcaatcctcctcctccttcggcctcccaaagtgctgggattataggcataaaccaccgtgttcggccttcacatcaaaaactttataaatgtgcggggagggggtaaaaacagattgaattaaaaccaggtttagtgtgactaaaaacatgctaccagattaattttgattgttgtgttaaaatgttyacaagctgcacttttggcagttaattagtactaaatgagagacactacttagatttaattttaaggattaattttggagatcaaacccattcttgaaaaaaacttgtaacccgatttttgtacygttttgtttctgtatgtctgactcatttaaattgcaattctcagagccgtttctagcagtacctcttggcctagataattttctgtccagcagacactgattttcaaacggtaacaagaattgaaaaaagattttttatatacattaatttggtaattagtttcatgtttttcttgatggttttctgtgttctaatctgaactgtttgccctttttgaattgttgagtaactgttgagttggggctttgccattgttctgggtttccctttgcctctcaatttatgatctgtttcctagatctatggctttgttggtttggtgtaggatatcttccaataggttagagaccttcctgtctgtaaagttctattttgcattggattactaagtttagctatgtagagaattcaggtttggtgaagaaatttattttatttgtttttgagacagcatctcactctgttgccaggctgsagtgcagtggtgcgatctcagctcactgcaacctctgcctcgtgggttcaagcgattctcctgcctcagcctccttagcagctgggactacaggcctgtgccaccatgcccagctagtttttgtatttttagtagagacggagtttcaccatgttggccaggatggtctcaatctcttgatgctgtgatccgtccgcctcggcctcccaaagtgctgggattacaggtgtgagccaccatgcctggccagaaatttatttattttttttatttttgagacggagttttgcttttgttgcccaggctgtagtgcartggcatatcggctcacggcaacctccgcctcctagattcaagcaattctyctgcctcagccgcctgagcagctgggattacaggtgtgtgccaccaggctcggctaatttttttttttttttttttagtagataatggggtttcaccatgttaggctggtcctgaactcctgacctcaggtgatccacctgacttggcctcccaaagtgctgggattacaggtgtgtgctacactgttctttgacccagaaatttattttaaatcttggtcttacatatggaatctttcttaacgctgaaatcacttggaattttaccattgttcttatggttcacaactgtatcttgggtttatttaatacattgtactggtcactcactgaatcttgtcattgtataaacttgctcttcagatacgggaaatattactgaactgattcttctttccccatctaccatctcgatctttgttctctggaattcttgtttgggtataagccctggacatgtgtttctgttaatttaatctttctcaatttttgtagataccaggtcttgctatgtttcccaggctggtcttgaactcttggcttcccaaagtgctggagttacaggcatgtgccactgcaccttgcctaattgtcaacttttaaaaacatcccaaaatttaagttgtgttagtttcttttttgggtgtgggtgtgtgtgtggggtggagttctctcgtcgcccaggctggagtgcagtggcactatctyggctcgctgcaacctctgcctcctgggttcaagcgattctcctgcctcagcctcccaggtagctgggactacaggtacacaccaccatgcccggctwatttttgtatttttagtagagacaggtttcaccatcttggccaggctggtctccacctcctgacctcaggtggtctgtccgcctcagcctcccaaagtgcagggattacaggcgggagccaccgcgcctggccaattgtgtcagtttctaagaccaccccctcatctgttataaataaatatcaacatacctttttcttatctctaaggttattaatgataacctgtttaaaagtttgtttccargatgctttgttttcctgttgctttggcttctggttttcatgttagaaaatttcttcaggtgtttggtgatccttgggtcatatttaggagtggaacattttaaatgctaattgaatgttatgtgtgtgggtctggcagggtgcttttcaatcactggcttcactgttgggtggtatggctgtgtcattttattgagaaatcacttgatacatttccttgttttgttttctgaagctggtcatgcttaccagaggtgtcttactctcctccctaaaggataagaaaaggtggtcagtttctgatcccagtggaaaaagargttgagggatctcaaaaagtaaactgtttattttcatcactgtgcctattcagtccaacagctcttttctaacttgcttaagagagtacatctccagttttctgccagggttcaggagtcaattgccagcagtatagaggatctggaggtttaactaattgttaagcgactttgaatcgatcttttgacctgtttcatctatgtttctacaggtatttggactgccaattcctaaatctttgcrgggagtcagggtgttctgtggtgtaatctgtgatatccacactgctgacagctggcagaatattgtttttttccttccttctttcyttttttttttttttttttttttttttttttttttgagacagagcctcactctgttgcccagactagagggcagtggcacggtcttggctccctgcaacccccacctcctgggttcaagcgattctcctgcctcagcttcccaagtagctgggactagagggatgcgccaccaggcctggctaatttttgtatttttagtagagatggggtttcaccatgttggccaggctggtctcgaactcctgaaatattatcccccccattccccagtttttttarataactcgtttttagtgtgacttcaraararactgggcatgacacagattattttttgtagcttttttgtgtaggtgggtgattggtgtaaggtttaggagaacaaaaaaggacaggtaaatcaatattaacagggagctcggtacccctgcttctagaatttgaccaacaaagtgaaatttacaagtagtttgctggtttattatcaaattaacctgtgtttactaatgggtagtgtcatgtagctttgatctcaattctcaaaacggttttgtagactctggttggaatcccactttttctcaagtaatgagctttctaggtctgttgttctgaatcagattttgataccttttggtttagtaggtgtctgctaccaggtgagttaatttctcttccttgggtcctgggtttccttttttgtctgtttctttcctaaccttcgatgtgtatagggttgcaagtcatgtaagcataatactctttacatcctgggatagtatttgcttctttgtacttggttgtgcacagttgagaatacagtgtgggtgtggaacacctgtccaggtgccagttcatgctgacagttttgaaaggtagtctcattagaatccagttattaagcctgtctgttgtatacatgagaaactaatttagtctctgcttttactattttagtgcttgggaaagtttctttttgtaattaagactagtactttaaacgtatgtttagggcctttgaggtattaggaattttggaaactggaaagatacaatctttctatcacagtatttgtgttgatcctgaaatgtctgagtttattttgtttggagtgagtttaacctgaaatgtcaaaacctagatccataatatagcatcacatctcaataaakttatttggaagcagtttcttaatagtgcagtttatcaatgaactaacatttaaggatgaccctaaactatcataaaatttgattttttttgaaagctacctttcctttttttttttggtgggggggggggtggagaaagggtcttgctctgtcgcccaagctggaatgcagtgatgtgatcacagctcacctcagcctcaacctgggctcaagcgatcctctcacctcagcctcctgagttgctgggactgcaggcaagcaccaccacatccagctyatatatatatatatatatatatatactttttttttcttttttttttttgagactgaatctcactttattgtccaggctggagtgcagtggtgtgatcttggctcatcaaaacctccgcctcccgggttcaagtgattctcctgcctcagcctcctgagtagctgggactacaggtgcacgccaccacatccggctgatttttgtatttttagtagagacggggtttcactggattggtcaggctgatcttgaactcctgacctggtgatctgcccgcctcaatctcccaaagtgctgggattgtgtgagccacctcgcccggcccagtttatttatttttttttttcatttttattttttgagacggagtctcggctctgtctctcaggctggagtgcagtggcgcaattttggcttactgcaacctttgcctcccaggttcaagctattctcccgcagcctcccgagtagctgggattacaggtacacaccaccacacctggctaacttttgtatttttagtagagacggggtttcaccatatgaccagcctggtctcaaactcctgagctcaggtgatccgtccacctcagcctcccaaagtgctgggattacaggtgtgagcaattgcacccggcctaatttttgaaattttttgtagagatggggtcttactgtgttgctcaggctggtctccaactcctgtgctcaagtgatctgcctgcctcggcctcctgaagtgctgggattacaggcgtgagccactgtgcccagcctaagatacctacttttgatagggttgagaagggtatatcctttctttaatactagccatattcaaactgttactaggcatagttaggagtcgcctgaaaatttccatgggtaaaatgattctagcaagataaatattcagttgtgcaaatggagtccgcttgtcctgttagttggtaacagttgcttttaatctggtaaattgggtaagggttgattataagctggttggcatttcaaagaggcttgtaggcatctatatcagaatcacttagaattgtttgggagtgttgcctgggattctgtatttcacatacaccatgtgattttttttttttttttttttttttttgagayggagtctcactctgttgcccasactggagtgcagtggcacgatctcagctcactgcaatctctgcctcccsggttcaagtgattctcctgcctcagcctcccaagtagttgggattacaggctcctaccaccatgcctggctaatttttgtatttttagtagagacagggtttcaccatgttggccaggctggtcttgaactcctgacctcaggtgatccgcctgcctcggcctccctgtgtgctgggattacaggcgtgagtcacygccyctggcctccaagtgatcttaattgcatactaatgtgttaaggactttaatgtgttaactctttaagatagagttaaacacactgtttcctaagggtttgtt

SEQ ID NO: 9990 - DNA, 43363 bp, Homo sapiens
gagtagatcttatagaagtggcagctcagccttcccactccttgacccttcagaggcccagggctgctctctgaatttccccactctcttgtgcttctcaggaattcaccgtcccccagctccrtggccagcagcgactcaggaagtacagatgagatccaggatgagttcgagcgcgaggcggatgtggagcccatggtcagctgatgactgaggccctgcgagcctggtggtcttggtgatggggccctgccacctctcctcatggggccaggaaggcccctcggagtggggttcgaagccacaccacacagactttctctgccctcccttctctggaggcccygagggactgctgcttccttccttccttccacaccaccaacgggtgccccgtctccatcccccacccacccaaggaatggtgctgtcaatttctattgttctccacattacaaatgcagacttctgtgcggactttgcagtgttaactgtgccttctcccttaagctgagccactttgagctccaaagaattattcctagcaggtgtttttatacagaactctaagctgagggccgggccaaccggccgtggtgtaatgtggtttctgccgtccgtcccacctgctcctctgattggccatgggctatgccctcccttcctcctgagccagcccagactcggcctggagcttggggtgctctgccaacccccaggaaggagccgcttgcctctgtgagctttctaggcctgggtagggaccaccccaattttctcactccctgaaggagagaaaggtggaaggaagggaaggaggacacattttaattttttggggggatcgagtggcaaagttgaagggacaaggcactgtgaggggaaggcagagsctcactgtgtttaaactactatgcaaaaaacaaaacaaacaacaaaagcagcttgccttatatcattgtggaaggcaggacctctcctgggctcctggcttccccctggagctgggagagaggccggggttagggtgatctgtgtggcagcactgactgggtagtgtgggtttggccgaggttggtcatgaggcyggggttcccgcaaggcactggcctccctgaccgcttgctyccttccggacctctgggttcagggcgggggyggagggatccttgatttccctgataacttgatgttcttccctccctcgccagccaacaatagaggcttagagatctgtaatttctctgtgagaaagtctgaaggggccaggcctggtctctgctcccttctacccgccttgggttaggactgtccggcagttgcctgcttttggctgctggcaggagagaagcagggtgggctgctggcagtgcaggagctggagtgagggccatcctctttctgctcctcgacacacgcaagccgctctcagcagttccctcgactggccagtcggggtattgatctgagccagcatcccccaagacttgaatggcttgagtgggactgcrttgaagggcactgtgtggcccccttccaaatctcagcttggagccagctgagcaggctttgctttattattattttttaagcctactgcagtgggtctgttgccaattttaattttttattgtcccaggagctccctctagtggtcaaggtagcaaaatgtgcccaaggactagaacttgggtccctctgccttgcctggaggcagaaggagggggctctgggtttgactgggattgtggtccccaggggtccgtggcctttaaggctcttctctcttttctgtttccsccacctgtgttacagtcttaaaaatactgtacataaaagatatatgtagagagagagagagagcgtgagaatgtgttagtgactatgtgtgatgtaatttatcacgatttggtggccttcgtcatgagttttttcctttgttttcttttgctgggggcacctcccacgggtcccctgtggcagtctggctgtgacacttccatagtcagcatctcttgttagccaaacagttccctttgacaggtacttggagggacaatggttttggaagagagacggcccttctctctcctcactcacccttgttctaaaggttacagggttcaaacatacctgattcttgttgttattgttgttgaatttttattttaaccaaaggttatcagagccagttgggcttggacctcagctgctaaaaagattttccgtttcctcgagggcaggaaaacatccaccctcgtgggtctcctccgtccagggccgagggaggcattggayaatgtggtatgggagtttcgtgggcagcgtggaagccggccctgggttgttccccaaggtggtgggagggtgacagatatatctttagacttaagactgtaaggcagcagtgttagcatgggagtaactaaggttactgtggttatcggtgtccggcggtattatttttactttcctccttgtatacataggtcatttgtctttgaggactagggtactctagggagtttgaaaactgcaggagccagaaagagatcctggcctgagagtcccytcyggctggcttttaatatctgctctcctcttgggagtgaggacttggggcaggtgggtaggagagggaaagccagagtgtgatgggcctgcctcctgggctggttcctgggtccggcctgcctgcctgcctgcctgcctctccaccacatgcttttttcagttaatgtcagtgggccctgcttgtcccctcaccatgagcccacagcttgccaagaaagaccccaacgctcgctggggcagcaccagtcctagctgggacgaattggtccatcctytgtaaagctgtaaatrcttaattttgactttctatttctaagcccagtgtcatattgacactggtattttagaattttctcagatgggctctcctgcgctgccctctgtctcctgtttttgggggttttatacaaacagaggattggggagggataggaagactagcatccttttggctccctggttggttgtgaaatacacacacacacacacacacacacacacacactcgcactcctctgagactccgaacagagaaaaaaattattggcaaatcaacacatttttctttctcgtcttgagaaaatgtcttgaggtccctgaagggccaaatccatcgtggactaactctgtgggtagagctcagatgacctagggagaattaaaccacttamgcttggagtgggaggagagggggtggggtgggggagaatataagatgtaacttaagctaaatgtaatctatttataaagcaagagactctcatctatttttatgaaaggaagggttttttaatctagggtaggcagttgtggtagcccagcattttcctgtggacgagacatggtgcatgttgttgctggattgaatggaacccattcctgtccccyggcctcgtcttctgtcctcacttttggtcatccacacccatgagcagcttcagcagagtgtaggtcccacttcaccccattctcctctcctctgacccctcagctccttggaagtcttggggtggggatctgagggggtgggtgggctgcaggaaattcagaaatgtggtgggtgggggaagggacaaggcgcattagggagggaacaagctgggctctggggataggctctgattaattagttactctgactctggtctgccgagatccatttccaacccagttgcgttgggagagggttgggaggcagcagagcatgggtracagtgggagcacacgacttccttggagcctgggcctttgcgggtcccaggtggtcaggcagctggagcaraagtggaaatggcttaagatgctcatagcccagccccggctgtgtctactccaggccaagcctgggctgcagtccttgctatgttccccccagggccctgrggggagggatcagggtgctgggggtttcctaggacaggggtcttcccccttgagacaccaagctctggctctagaagagctctctcctggagtggggagtctggaggggactgggtgggtgcaggtaaagccagattctctctggaagggaattttctakgaatggatgatttccaggctcagggtgggctgtgtgttagttctgagcaaatccctcaccaagacccttccctcccaagccctcaaagaaatgaggcaaagcccttccctgcaagaccccttgtggaygtttttgcatctacctgatttttagccccacccagggagactttataccccatgatcctgccccaccgttgctgttgtctgccagctgggtctagcatcacagggaagggggggatttatactcayggaaagactactgatcctaccggaaaccaacctgtttactgtactgttgtaaatatcatgccctttatatcctgtatattggcttcttttaaataaagtgaaatgtcttagaactgatggtgcttttttttgtttttgtttttaaacagaagatgaatctggtgttgggggaggggtaggaggacggaaggccacagaaaccctcaaactcattagttaattagccataaaataggggatttcatatcacctgttacatttgtagctcacaataaaagctttggaagatgacaaagcaggaatcattacacacattttactgaaggggaagagaggacatgagacatcacaggctcagtaactggcttggcctggtttggaactgatgtccttttaaccacaaagcccccatttttccaggctctccaacgtgcccacaggaggtcaccttcccaggctctggatttgacagtaaccaatgttctagtttttcttgtcaatgggcatgttcagggcaacattgcccaaatgtgaactgagcccacctgtctagggttttctccaaaggtgaagacaaatagccgccaccaattccaatttgctttttgccattcctaatacttggcayttaggtaatctccctctcctactcttcatttaaatgtttacattctcccaaagtacctcaaatggtgtaatctggagaaaaataagtggcttaagatcacgggggctttgtgagttgggtactattacttccgttttacagatgaggaaactgaggcccggaaaggatatgtagtctgcctagtgccctgcttgaggaaccaaaatcagcatgggaactgactcctaagcaggtgcgcggttcatgctgctggaagaaatataaacaaattagaacagagagtaaggaaacgtaacattactttaggaatagattgggtccctgagacctcgtcatcagagaagacttcagaatccaagttttaaatagcattctagtgtttaccaagcacacaacattttgcaaagaaagctraawtttttacttgggggtaaaaggctcaggaacaactggttttgcggccaaaggctttaaatgaaaagctaagcgttggccagctcaggttttatcttgcattgatcgtaatctgcaaggaagctaagaagctggccggccccgcgcctggagggtaggtggagagcggctgggtcctggccaagaagctggaaggcaggctcattccaggggccgcagcccccgggaagaagcagggggctggccgcgctgtggccctgcggggtcgaggagtctggtagcggacaggtttccagccttgtacaagccaccggcagcccgagagaagtcagtcggactcccaycgaacccggggcscacgccagagggccggrcgcagcgagtccttctgccccgcttcagcacgtgtcccatttcggttatctcattggctctattcagcccctctctgctccgctttggaaggctgccgcaggaccgccccgctgattggttcagaagctttggtgtgtcactctgactggtcgacagagttcacgccctctctcccgggtcataccataaagagaggaggggaaaacgcatgcatttcaggacttcgctttcgggttcccttgtcctgtgttgtgtaatgcccccgttatggcactagaaatattttttattagccgaagctaaatatagtgggactttggctgatcccgagctcggaggacagccggggtgatccgtttccccccgaggatcgaggtggtgcgctctggacggggttgtgcattctcgccgcgcccgggcggacgatccagcgaacagccccgcttctarccmgagatgctgctgccggcgcccgcgctccgccgcgccctgctgtcccgcccctggaccggggccgggtgagtgagcacggggcccggggcggcccgagcgcgcgcctggggcccgggagcctgagagtcactgggcgtcccccgcgccgcactccctccctgccggacccccaagctgcctcggtcaacgccgggttcctcaggggctcccctccgwcccccacccaggcctttctcccactgagatcccttagcctcctccctcaggtagtcaccttcctttagcgaggggacccctcttcccgaatcctgcgaccgagtagggtgcctcggtggccctgccggttcccacgctcggaaagtagcctctgtagtcactcacctcactcctaatactggatcttcgcaatttgctggcttcccctgaggggcccttctatttttagcacaccacacatctcacttccccaccctcgtctcacgttcagtgtccccatcccgccccggattccccgagtcctctccttctaccaggatttctacctctctcttttccgctccccacacaccccgccgcccgtttttttttttttttttcaagttaaatgttggacagaaaaaaggattcctttcttcttgtaggtggaataatcatatttatagagtgcttataatgaaccaaatgctggccgggcaattggcaggtgtcttatgaggattaaatgagttaatacatggggagtgcactgaacagtgcccagcacaaaggcagcgcccggttattattattgccacgatcatcatcattatcacctctatttaaacttctcactcctgtgaggcaggtcattattccaaataatgaagaaacccaggagcagttcaggggtggacctgcccttcaaatcccgatttgcaaacctgacattgtggagccaggtgcctggacccttgcccactcaatgacaaatattctcagagcccctccagctcggagctaggtttggagaggtaggtgggacacagaccctgccccagaggggttcctagtctggtggggctgcccacctgtggatcagccccccctcccattkgargtttgtttgcttgacccctggggctgttagtggcagkgtctttcctgatgagctgtgccctttctgagttaatcagtggccctctcccttcccccaagggatggcatggtggtgctctgagcacawgtgagttkcaacactgctgtgtgtcctctgtgggtgragaggggataggaaagggcgcaggaagaggacatgggacagaggggttcctcttctaggctgagactggggccacacttgccatactcyckgtgtgatcccgtttgcaggccttccctgcactctgagactcaggaagatggagcttatagagtcctgtgtttactgagtgcctactgtgagctggtgctctgccaaacaccctagagatgaggrgtacccagggaatttacatggggtggggcctttgaggagttttcggcttaataggggagaaatgcataggaaaaccctccaatatctagtagaaagcaatccatattctaaaagataagcccatgataacaataatgattatcaagcaatcaagcaccatgggcctaacaccgagccggtaagtactgtctcattcctgtattatcatgggaaacgatctgccatcagagatatatgactgaaattacatttggtctaaatccagatttatgctctgaattatgaggcctcctgaattgagaggggaaagagaaagagcattttgcagctggttccctgggctcaagttacccctttgatacagcagctggccgcatgccctagacaggatttctcaacctcaccactattcgcatttggggctacattttggttgctgtggagtctgtcctgtgcactgtagaatgtttagcagcgtctctggcctttacccgctgcatgtcaggggcacccccggccctgacaattacgaaaaaaaccctggccctgacaggaaacacaagttcccagacattgtcagatgttacctgggggacaaaagtcacctccggttgagagccagtgctctagaggaacagctttgatgtttgatcacttgttcatttactcagtgaacatttagagcacacccgtgacatgccatgtctgcatttatggagaaacagtcgcagggcattttcagtgacatccctcagtgtcctacgtgtaaaactctagtcctgagaaaaaccgctgcttttgaggaacgggtataggagatgcttcttagtgttttcttttttgccttgagtgccaggaatctctgctagttttaaaaaatacccttgatacatgttttcttttagtttaatacatgtcaactgtgaaaagtacagataaggcaaaaaaatagaaaaatcacctggaattgtaccacacagaggtacccactgttaacattttgattcatgtcctttaactttccatgaatagatatgcttttaaaaaaaacctcatagaaacaagctcatctgcccatactttattgtagcttgttttttccctttatacacttgtctgccttacagtatgttcccaggccctggaactgtgtctggcacctggtaagcccttggcaaacatttagggaatgaatgaactaatcatgtgagcccttccttgtcaatcgatatttatcacggccagcctcaggacaatcaccataaagtgtggcctttataggtgggcccagggatggcagctggtgacaatgactgccatttacttttcatgtggattattttactcagcctctcagcaacctatgatgtaggggttaccacccccatttcacagattaaacaactgaggcccatggaaattaaggaaaacttgtccgaggccttgagctggtgaacaccaggcctcccaactgactgtctctttcctcctttaaccctgacttcctgtttttttctcaatcaactttaccatcagtatcctcagttctctttggaaacaggcaggatacagattaatagccagcccaggcatgtagtaggcttataagagttcacttctgttccttatttcttgtgccaagcccagacatgactccagctcagcccgtctgacatcagggggcttgtgggccggaattggttactaccgtgtcccctgcagtgatcctgggtggttttggactcttctcaggctacctgatggtttaattttcaaaatatcaaaagcacacaatgcttttccyagtctgcccagcccttggatgggcacagcttgccctgggtcgagggctggcatttcccaccattccttagacattctctgctcttgaactcctccaaccagtggctggggcagtgcctttggcctggaatgtcctgctggccacctcrgtgagcccatccagtgctttgtggccttggcaaggcagcttctgtcccttcagtatcctcgtctgcaaaatggggatgattgtattaacagccacgtagcaggtggctgcaaggattagcggtgatgtgatcagtggtttcctggatgctggtaccgaatgcgtgctctgtgagtatttgagttggagaataattaaaacctgtgattatcatcacacttctaaagtagtgaaagcgccattgaggcagtgcttggcagtggcacccctgggagcagcctgcctcctgtgccctgcatctggcccggcacacagtaggcgttgaacggttgctgttgagatggtccagaacacagcatggcttggatcctggctccaactcttggcagctctgtggccccgggcaggttactcaccctctctgggctcccttatgttctcatatggaaaataaagatgacagtagtagtcacctcataggattgtcctgcgtgttaaatggtctcatacatggaaagcactttggagtgcccagcacctgaaatgctcagtaagtgctgctgtggttatgatgatccccctctcccaccaatgggcttcctggagtgatcatcttcgatcaggaatatcaagacagcagggcccagcagtgaaggatggtggcaggaggggaggtatggaactcagatgtcctcggtctcttctgtttattccaattaagtaccccagatgccaaacctcttctgttattattgttggtttgtttgtttgtttgttttggagacagagtctcactctgttgtccaggctggagtacagtgtcatgatctcagctcactacagcctcaacctcctgggctcagtcatcctcccacctcagcctcccaagtagctggaactacaggcgcacatcaccatacccagctaatttttgtattttttttttttcgtagagacggggtttcaccatgttggccaggatgatctcaacctcctgggctgaagtgatcctcctgcctcagcctcccaaagtgctgggattataggcgtgagccactgcgtccgaccttctgttagggttttgaccctgctcacctcaggggatggaaragacttctccctttcttgcagcctccttaatccccaaaccttccctttcctggcagaggtcatggcatggagtgaagagtccctgggctgagctgctgtgccagtggacagctgagtgaccttgggcaagtcactgcccaccttggggcggcggctttcctcaggtggaaatgaggttctagctgtatggtgaggaggatgaacgtgtcccatcagccccacctgaccatgggcctctgagatgttccaggtgcttcagccatactgtaagtctcctgagtaaggaacagctggggtcaaatcctgctctgtcactcatgagctgtgaccctgagccaggagtgagtaactctgaacctcatccgtaaacagatcattctacggtcgagtgtccctcatctgaaatgcttcagaacagagtgtttcgttttttgggtttttgtttttttgagacggagtctcgctctacctcccaggctggagtatagtggccagatcttggctcactgcaaccttcacctcctgggctcaagccatcctcctacctcagcctcctaagtagctgagactacaggcacacgccaccacgtccagctaatttttgtacttttagtagagatggggttttgccatgttggccaggctggtctagaactcctgacctcaagtgatccgccctcttccgcctcccaaagcgctgggattataggcatgagccactgcgcctggccggaagtgttttgtatattggacttgcttggattttggagaatttgccgaacaagttgagcatccctactcccaagttccaaagtccaaaatgctccaatgagcatttcctttgagcgtcacgttgacactcaaaaagtttcagattttggaacatttcggattttggatttttggatcagggatgctcaacttgtcatgcgttcctcatacgcttatgtggtggattcagtgagatgatcctgtctcacttaggttaatgcttggcatgtggtggcaagtgcttgacaaatgttgcctgatgtttgctgggcagtggctgaagcagctcatccctggcattgggtctttctttcttttttttttttttgagacatcgtctcactctgttgcccaggctggagtgcagtggcacgattttggctcactccaacctcttcttcccgggtacaagcaattcctcttcctcagcctcccaagtagatgggattacaggcatgtgccaccatgtccagctaatttttgtatttttagtagagacggggtttcaccatgttggccaggctggtctcaaactcctgacctcaagtgatccaccctcctcagcctcccaaagtgttgggattacaggtgtgagccactttgcctggctgggcctttctttccctccaggccccgccctgggccctgcactttctctgctcacctagtgttgcctttatgtcggtgatagggaggattagccttatcaggctccagataatggctggaaaagtcaggaggctgcatgaagcaaagataatttcctttctatttctcctctccttgtccttggccacccctcaccttagccactggggaacccaaggggccagtgtccagccccaggtgatagcagaagagcactggccttggagtccagtcctgggggcctggtgtcagctctgacactcatgcattgattgtatttctcaggtgcttactgtggccagtcagtgtgttaggcttggggtgcctggtggtgaatgggatgggtacgggctggctgtgtggagcctgtggcctggcgggcacacagatggtcagtcagagctctataatagggttttcactagtgcttccagaaaagtctagagctatgagaggaatccgataggagccccattccggctatgtgaggttggaccagtggaggacatctcaagcagagaggaccccagaagagaccggggtgaccggattgcaccaaatggggcagggtgatggggaatacatttggaggccttggtaaggattctgatgtctttattttagaagaaatgagaagccactgagtagtttctcactgagctccccactgtgccatctctctgatgatcagattttcatgttaactttggttgcggtgtggacctgagtgacttggagactggagcagggctggcatggcgtgagtccaggttgaagtgactagtacctcggacgaggtgtcttgggcaaggtggagtctgggccctctgtgtcttttcagtttttccctctatagatttctgaagctgcattggctggcccrcagctccttgcaaccctgacatctcctggtgcagaaggtgaaatggtgcctggcctttgtagatcagatcccagtacttgcaaccctgacatctggtgcaggaggtgaaatggtgcatgtcctttgtagatcatatctcagtacttgtagccctgacatctccygccacaggaggtgaaatggtgcatggccttcatggatcggatcccagtacttgcagccctgacatgtcccgctgcaggaggtgaaacggtacatggccttcgtggatcagatcccagcatttgtagccctgacaacttccagtgcaggaggtgaaacggtgcatggccttcgtagattagatcccacttgtagagggtgagggggaccaacttgaggtctcaggctcagggcatgagcagaaagggcactgcagattttcagggaaacctgagtcagattcagactctgtcttgtgccgccttccctaagtgggaggactgagggctgctctgagaaaggttgggttggatccatatctgcctcccagagccaggcacttcctgggtgcttggaaaacgcatgctgaataattgagtgagctgttattgacctgatccaatttatctctgcatcgttgccatgtggaataaatgtgtactgactgcataaatgcgtgaatggatgaggaatgctgtcctgccaagaaggtcctcatggatcctcagagaggccccaagtcctgtgactgattcatctctgccttcaccygagcagccagtggatggatactcctgttagcccaaaattgttcatgamccaaaaaaaaaaaaaaaaaaaaagaaagaaagaaagaaaaaagaaagcactgatgggtgggagtccttaggttatttttagctgcagtcgactcaggctgaactttgaactagtgtctgttctccaggccacactcagactgatggacggacagctgggccagtgcttggagacttccaggcacagggaaagccgtgggggcatgtgatcctgaggtcacagtgggcatctgggcctctgccctgtggaaggaggagggaggcctgcaggatctctgactctgacatttcctgggagggaacggagaaaggagaactggccgctactacatttatttatatattttgagatggagtcttgctctcttgcccaggctggagtgcagtggcacgatctgggctcactgctacctctacctcccaggttcaagtgattctcctgcctcagcctcctgagtagctgggtgtataggcgcgtgccaccacgtctggctaatttttttgtagttttagtagagatggtgttttgccatgttggccaggctggtctcgaactcctgacctcaagcaatccgcccacctcagcctcccaaagtgctgggattacaggcgtgagccactgcaaccggcctactccgttttaacctggggatggaatatggtgctgtgtattcctccagcagttgctgagtacctgggccagtccccgaggctgtgatttttgggggcatctgggagcccatttgtctctgaaagcctgatctactgaaatagcattctgagacctttacagttttctttggaaagcaagagcaggaggggtgaggaaaggccaacacttgtaatcctcctgatggccctgcaaggtgcatcatgtcaaccttaaatagtgagattcagaaagaaggattaagtagtttattcgagctcagaacttgaggatggccaccggggagcatagattcaagttacctcgaatatacactccgattagctgcagtaacaagtgggattttaaggtgcggaggaaagaggcagtttctaagtcatttaccaaaaatttatattaaaataatataagctaccggctgggcacagtggctcacgcctgtaatcccagcactttgggaggccarggcgggtggatcacttgaggtcaggagttcgagaccagcctggccaacatggtgaaaccccatctctactaaaaatacaaaaaatgagctgggtgtggtggcgggcacctgtaatcccagctacttgggaggctgaggcaggagaattgcttgaattcgggaggcggaggttgcagtgagctgagatcgcaccactgcacttcagcctgggtgacagagtaagactccgactcaaaaaagaaaaaaaaaagctactgattkgctgtgcattgttctttgtgtgacgctttccaggatcatgaagttaatggatgmggcagctagtcagaaacaaaatgccttgaaataattgccatcgggtgtggatgcaaagggcatgactcaggtcccatattcgtgtctccctgggcctgatacattttgcatacttcacatagctcacrctgctctgagctatttttctcttttcggtagtattgtacccattttccaggtgaggaaactgaggctcgcagactttctaagaatgcactgaggtcatggagcaggtgtgagctttgcctccggatttgtccacttctggggcctgtgcttttcccatccactgggacctgggctccaaagaggggctgggacagactcagttatttggagtcccgcttctcggctgaaagagttgatggtgatatctggctcaccatctttggtgggtgtggtgctgttgaggcctggagcgcagcttgaatgcagggtcaggagcttagctgaggtccctgtcagaagcttccagatggtcccaggggattgacactgccttgtcccttcctgagggactgtggagactcgtggctgcctctycattcttctcatgatggtagatggaagagggccgtgcagattttaatgtatttatcgttatcaaatctccatattaaccccatgagggggtgtcagtgttttakggagggagggaaactggcttcaagacatgtgacttgcccaaggtcacacagctagtgggaggcagagtgggggtggggagtgcagagctaccggctcagggtggaggttggtggggaggggaggggagtggagagaaggtcctatgtgctcactttacctgtcaggatcttgggtgccctgcccctgcctctccctctccctctaccacgcaggcccctctcagcccccccccgcctccttctacctgggatgctcttcccagctcctctcaagcctcctttaagtccctctcagggtcacctcctcagagaggccttccctgaccaccctggctgaagcagccctattctcccccttgtttgccatgctcaccatctgcggttaccttgcttatttcctgaccaggcctcacactgaaggtcacctgtgtgcagccaggggcctcgctgtctctgtcactgctttatctccagggtctgagacggcaccagagacccagcaggtcctcagtcaacctcaagtcaagtggaatgaacacagggcctggccacactcctttggttttgtgtccttccttcaggcttcccaggctgggtctttgagccccagactccttctggcccccgacactcatagccgggccagtctgtctcccatagggcaaaaacaatcccgcagaacactagcctcaggccacgtccctctgagaccatgatcagatgagacacaataagccctcttcctgatttttttttttttccttgagatggaatcttgctctgtcatccaggctggagtgcagtggcgtgatctcagctcactgcaacctctgcctcccgggttcrtgtgattcttctgcctcagcctcccaagtagctgggagtacaggagtgggccactacgcccagctaatttttgtatttttagtagagacggggttttaccatattggccaggctggtctcacactcctgacctcaagtgatccgcccaccttggcctcccaaagtcctgtgattacaggtgtgagccaccatgccgggccttctcttcatgatttttgtctaagcacggacaaaaacaaggtctctgtgccacccacaaagctctgcacatcttggtaaatgttccttttttcccagtcagcctcacccccactttctgatggcagccaatccagagctaaccgtggcttccttaaaccctccccaagtcaccctgccaaaccccatgggtttcctaacagcatcttactgagatgccctgtggttccctacgctgtgtgttttccctcattgcgccgaccagtgaaccccacctgtgcacttccagctgttcgggttgtctggggccattgacaccagagagagatggtatctgggccttctggactcaagtgcaggtttcccctactcttgatcttgaactagtcattttccttttaggaccaaaatgaccttatttctgtagagaggtggctggtgaggcccgtcctatgccacggtagatgggaagtttgtcaatttcaagtgccctttgggcattagttgactttgtcatcatcattcttctcatttacagagggggaaacaggcctgaaggggaagccccacagctgggaggtggcagggctgaggctccagctctggaatgactgaccccagcgtcctagctttgagccacctgacctcccaccttgtgaccctcagatgtggtagggggtggtggaaagaggtcagaggatttgagcaaggagttcttgagactcagtgtcctggaatcaggcacctcacccccagggccagccctcccggggctgtgagctgagctcarggcagctctccaagttcatggtccacatcttggacattcctgcccagccagagctctcagccctttgtgccaaggggatctcagctggttcacattctgagactgtgttctggaatgtgctgccctttcagcttagagagaggagtttgggtctttttgggataaagcctgccttgtgggagaagaaagggagagtaacgctttgcatgtggaaaatacttcaacgtggttttgcatctgtgtgtttaaacttcaaacaaccgcgtgagttcggtgcgattattcttacttgatagacgtagaaccacgttcacaggaggcaactcacaggctcaaggacacacaaccgtgggactgggacttgaaccttgggttgtggacccccaaggtgggtttttgttgttgttttgagatggagtttttcgctctctcacccaggctggagtgcagtggcacgatctcggctcactgcaacctctgcctcctgggttcaagcaattctcttgcctcagcctcctgagtagctcagactacaggcacacatgccaccacacctggctaacgtttaaaatatttttagtagagacgggatttcaccgtgttggccaggctggtctcgaactcctgacctcaagtgatttgcccgccttggtctcccaaagtgctgggattacaggtgtgagccaccatgcccagcccaaggtggggttttgaccccccactttctagttgcattggatttcaggctctgggtgcccacctaggaccccctgtcggaggtagaggggctggggtctggtggtggggccgctgctgacctctctgcctctgtcccctgcccttgtgttccagcctgcggtggaagcacacctcctccctgaaggtggccaacgagcccgtcttagccttcacgcagggcagccctgagcgagatgccctgcaaaaggtaatgggagggtgggaggcacccgagaggtgcagggcatggagcagaggccatccccagcagccctgagatagcgcyccgtgcctgcagccatcacccgcttctacccttgctcccagccttgggtggaagcctgggagggctgtgggtctggagtgtgggaacagctgggaggaccaaggtggcagcctggagctactctggggcttctcaggccaggtcagatgtcataaacctagttgttttatagttaaacatgttttccagttaattgccagcattttaaaaatcatgagatttcatataagtttcaggtgcagtttttttatctctgtgtcatgggtagacctcaccttcctgcagggtgacaatggctggagcagagtccggctgtccccgagggcagcacatgttctctgatggccaccgacctggcctggcccccttctcatttctgtattgcctgggcacctccgtctgtggactctgcgttagggttttagatgggaggaagcgaggaagksggtgaccatacccactcttgtccctctccccaggccttgaaggacctgaagggccggatggaagccatcccatgcgtggtgggggatgaggaggtgtggacgtcggacgtgcagtaccaagtgtcggtatgtccagcgggtgggcagrgctcagcccctcccctgaatatgtgacctctttctctgacagctcgtaagcttataatgtgtgggctctgacttcaaggcctttatagtgcccctccccaccccagattttgaattctgtggaccagtaaaactcccaaagcaaaggacggcacccacactgcatccagcccatagcggcatcctgtgtctgggcaagaaaggccatgagggggccacacagcatcttctgttattcctcatagatttcttgccaagggggtttgggagctaatgacaaaaagctgggccccgggccccgagcacctcagatggcattggcctaagaagcccccatgcttggagtttatccatccagaaactggcatgcactttacgtgggccaggaaactcayaggtctgtgatttgagggagartaaaaggtcagcccttttgcaaacagggcaagcacattctggctctgtccggctgaaaccctgggcagacgtgtgcagggggaggggtgactgagggggaggacccaggtcccccactctgaaggttcccaggacagcctggggcaggagttgaccacagcagtgtcctggagctctagttgctgggtcaggactacctggagctgtccaagcatggcctggggtctgcaggcattggccaggtcactctgtctgtcactgggtgtgtgtgcaggtgccagctgacagcagcacctgccacccagctccctggttgtctctgtakctgcctagagcttgccctcacctgtagctccrcaggcgtctgaggctgcatggcagctgggatttttccaggcagcgaggctccggcattctgataagcccctgggtggatactgctgattttcatttcccacattgccttgccgacctggctggagattctggccatgtgctgatcactgtggcacgagacatttggggttctggggcatgtgagggcaggatctatgtttgccgggacatagtgctgacggggttctgcagtccactggggcccaggtcgcagccaccttctctgcccttaagcatcacaggccaatctcaggtgtggcccgaatacagagtgactgtgccaagctttaacatgaaggagaatggtcactttctactcaagcctagaccagcgccggccagtagaatttcctgcagtgaggacagaaatgttccagatctgcattgtccgttccagyggccatgagccgccacgtgtggttgtygagcaygtgaaatgtggctcgtggctactcttttagacaggaaagctccaataacccaccagaagacggataggtagcaaaagtgtcagctattacgmtataaactatcttgccagccctaggaaggaaagaagtgaaatttctccctgcttcattggtcatgctagcgttcaccactgccgggcattaggttttgaagggaagacaggggttaaagaaagacacacacacagagagagggcagctgaaacagcaacaccagtatattgcagaaacctgaggaagtgggggaccagcttaatgccagggcccaccgctgcttacaggctgaggtactcatcggtatgggtgagacgggtctgggcagtatggcttgctgcctggcaggatattgataagatgttgttatgatcaggtggtttggccctctccggtgggatgtcatcgtggtgttccttgtacctttacccagcaagatatgatagggatggtttttttttttctgagacggagtctcgctctgtcgcccaggctggagtgcagtggygcgatctcggctcactgcaagctccgcctcccaggttcatgccattctcctgcctcagcctccccagtagctgggattacaggcatccgccaccacgcccrgctaattttttgtatttttagtagagasagggtttcaycatgttagccaggatggtctcgatctcctgacctyrtgatccgcccgccttggcctcccaaagtgctgggatcacaggtgtgagccacygcgcccggccaacagggaagtttctttaggtgggccttcgtccgccttgcggtcaggcggctgagccggatggttctcatggcctgagctcctgtgaaatgtttcacttggcccgaggtctgcaaaatagcggggagctgacaaaatggtgcgstttggaccaacaccaggttgtgtttataaatgtttgttgaggatcttcctatttagattagtaaatctggggcttaggaaacaattgctctgtccatgatggcttcsgggcagggcggaagtcccaagcatgtcacaacacyggtgcattcttttgggcctcacctggttttgttgcccatagtcgcagcctcatactggaccaaagaattttcatccatgatccccyttggttctcctgtccatgctaagagacagggagggcagtccccatttcctagatgaagagacttagggaaggaagtgagcttacctggggccccacagctagtaggtggcagagccaggattcgaacccatgtctctctgaccacaaaggtccgtgctttcctggaaagaccctggggtctatgcctttctcctggactctgagccttctggagaaggagccatgtcttactcatggtatagcgggtacaccagcacccttaacagggagcaacctgtgggccgggcactggggagggtttcatgggagcgggggaggggggacagcaggcgtgtccaggactttcctggaaaaccggctctgagtccagtcctcttcatccttatcctggcacctccctcccgggcaaggacctcaytcttctctcctttcagccttttaaccatggacataaggtggccaagttctgttatgcagacaaggtgagtgagcctgtgtgcctggtgacccggggttagggttgctgcccctgctctgccctgccagctgctgatatggygggggcagggggcatcagttgctgtgtccttctttggccatggtgggtaggtgggcagggggtggctgacactgagggagtccctgggtgatgtctttgactgggccaggcatacaaaggttaacttgagccaaacacaagctgcctcagccagggctgagacattcccagacatgcccattgtggtggggcagaccttggactggggaggaggtggattctggaaggctgagtcagggcaattggagacaccattgatggaaagctaggccaagaattggcactggaaagggccagcaggaggggctggggtggctgggggtccaggaactggcattgtgtggcgatgagggcagttggggtctgggaggccagcagcagagccgtgtctcaggctccagttgacctcaagtttctggatggtgggttaaggggcaccaggtcccaagaataaggtaaggttttgattagaccatgagagaaagtggagccagtgtaacagctgcgggactcagtgccaaggcctcggagagctgaccaacctggccgggcccttcaggcttcagactggcagccactacaggctctgatgggacgctgttgttggcagctatggtggcagggggctgagggcccagggagacaggcattgtccccggatggaagagagtggcctcccaggtctctcctccctcgctcactccccagggcctttcccgctgcaggtggcagtccccaacctctccctctccctttagagcctgctcaacaaagccattgaggctgccctggctgcccggaaagagtgggacctgaagcctattgcagaccgggcccagatcttcctgaaggcggcagacatgctgagtgggccgcgcagggctgagatcctcgccaagaccatggtgggacaggtgaggtgctggtgggcccgggtgggtggggcggggtggggtgggagtcaggtgtgccctacccatggcagcagacatcagctgaagcgcttctgggtcctaagcccttttggggacccagagatgtcctcaagggacaaggcctaggagctgggatggatgatcacagattattaggcgagacagattgtgcagagcccatgtgtcctgcctcggaaatgtcccctctcctccatccctctgtcctcgctcctaggcctttgtcatgctttgcctggactggtggtggcctgcactgtctccctgcctcctagcttggtcagcccctcgccgccctcagagtggtctttccaacacctccaggatgttactcctggcttatgacccacccagacctctccaccactgagaggcaagtcccaagacctgagccccatacccagggcccttctgcccacctctgtccagctcgcccactgctctgcatttccctgccaagctgtcctgcccatagtgtagccatttggcacttagcaggactccccggccatggcaggcatcctctctgcctctgcccacgtgtcctcctgcctggaatgcctgctgtctcttccgtgctcagtgaactcttacctcctggtccagcccagatgtcacccmctccgtgagacttcctgagccttctccagccgaaaggactattcctgcctctgtttccccagagcatgttgttcctgcatcagttacagctcagattgcactggagtgtattgagttcctaggtactgcccctttacaagctttttggacatagtaaacatgtcttgacattctcggtctttttctgggctttgcatgatacctttcaggaggcatagcaagcccctgatcaatggttttctctgcacagagctggcatgacagctcctcaccctgctaaatgcaagttgagtgaggagtggctctagcaggcagagtgtgcgggggacaggagtcgagggagaaagggttatttcaccacctccaggacctgagccctacgctgccaactaacctgggttcctgaagggtaaattgcaggagccagaacccaggctgctttctggatcaggcatttgccactgcctgctcctcggtccccatggtgagcrccccctctgctgcacagagctggtatgacagcccctcakcctgctaaatgccttcttagattggctcagcagccctctggggtgggcgtcagctctgcgtgttcctggtgagccgcacgttgctgggaagacagtctaggatcagtttaggctttctctgtatttggcctaagactcaggaacttctaggaagcaaggtacacatcttagctcagcttcatgggctgtgtgtctctaataggtcgtgcacctgccagtgaccttgggtgccaagaggaggccacgtcaatctggaaaagccccgttcttggctgtccacagttcttttccctgcagctcacatttgctgttattaagaattgacggtttaagggaatcacagtcactcgcctcttggtttttggcccaaactaaccagcaaggccgaacatcattcctggggaaggagccatccacctcccacacaccgagtctctctcctggttttccagtgaccaatctccagctcatgctaatctgcccttctgtctggaaggctctgatcctgaatttagtctgaggcttgaccatagatcctttgccatgcaccaccattcagagttgctatgaaatgaagacagtgcatggcaagtacctggcctgctacagaggatcactaaaattcttctgatccccgtccagcccagagggccggctacaggaggtgctagctcaggggcttgagaatcctttccccctcagcccctgggatgggacctggtgagccctccaaatgtttcctggtccctcctggggccyggctcagtgctcgctttgggcacagcgtcagatgtgagaagaggatggacaggaggctgttggctgctcctgacccccggccctctgccttgcagggtaagaccgtgatccaagcggagattgacgctgcagcggaactcatcgacttcttccggttcaatgccaagtatgcggtggagctggaggggcagcagcccatcagcgtgcccccgagcaccaacagcacggtgtaccggggtctggaggtacctgcaggagrcagtgggcgagcaggcggggcagcccaatgccatgggcctgatctcaccgctgcctccttccccagggcttcgtggcggccatctcgccctttaacttcactgcaatcggcggcaacctggcgggggcaccggccctgatggtgagatgtgggcacaggtgggacagcggcagctggttgtcctcctggtcccaacagacagacagaggccacccygagccccttgggtctcagcctagtcatggggagaggcacagaaggtggaggcagcttggggctgtgggtaggctttgggaccagagacccagtttgaatcccagcgtcgtgcctctctgcctgggagaccctggcaatccctgaacttctctgaggcacagtttcctcatctgcaaagtggaaataataggaaagcctccatgactgggttgtgaggctcaaatgagacacatccagcagcaggcagggctggcccggagctggctgagtgttggtggctctgttgatgatcattaccgctgaccttcagtgctcaccacgtgcctgctgctgtcaagcacggcatggagatgatctcatttcatcctctcagcagcttcgagagggagttgtgactctgcctctttgccagatgacaaaactgagacacacagccgtgacttacttggcaagactgagtgactagtaaataaatgatggagcagagaaagatttggatgtagtctctctcggggttgatggtattcaagtcactcctctgccattatcggagtgaggttggctattactggatgaagtcccaggcctgtgggggaggcgcagcccagctcccagacagcctgggtgggagaggtccacatagttgtcgggaaccccgagccccagacaggggcactggatgctgatgccggagtgtgtactagggacatggatggggacgtcctcatgcatctgtgcacagacaaacacggtgcatggccaggcgcccacgtgcctggctgctgcacatgcctgacccaggacatgtgctgagagagcccgtgtgtacttgccccgccgcgcccggtgagcactcagtgactctagcagtaagaacagacctgcctaggtgatggcaggaccggttggtgcaggcttctggggaaagggagccttggccagagcgtggggcagattgggctgtgccgtggcctccttggcagggacttttggagatagggccagacgccttggaggagtggggtcgggtaggggatgtcctggttggcacagagtctggtggttccaggtgagggacaaccatgctgtagggtagggtggggtgggggttgggggctggtggcgccatcctcatgcatcactgaaacacctcccgggcagggcaacgtggtcctatggaagcccagtgacactgccatgctggccagctatgctgtctaccgcatycttcgggaggctggcctgccccccaacatcatccagtttgtgccagctgatgggcccctatttggggacactgtcaccagctcagagcacctctgtggcatcaacttcacaggcagtgtgccgtaagtccctggggatggtgtaggctgtggtggctaggggacgttcacaggcaaccctgctcacctgctgtctgcctggggatggggctgtgaacccaggggtcatgcacggactctactcccttacttgctgtgtggctatgagtgagccacttcacctctctgagcttccatttcttcacctgtacagggagtgattatccttaatttgcagagtcattgcaaggattaaacatgttaatgaacaggaaagagcttcgcagactggaagtgcaccctacagctgtgggtaatattgatttcagtgctacctctgctactggaaagggcacaggggagcacagaatgaactggaggagtcaggaagccttcctggaggaggtgacatctaagcagaggagttggccaggcagaggggaagaggcaggagaagaatatatatgttgggagagggaatagcacatacaatgttgccaagccaaaaacttgtgctctggggcatggcaggatcctgtgtggctggagtgtggagtttgggggcgacagggcaagagagtgagggcagggcatggtttgagttgaggtaggggaggcaggccactacctgatctcgaccatccatgcactcactggctgagcaggaaatttggagctcacactaaggctcagtggtgagcacacaccagggacaaggtcccggctctcaggctggaggtggcggcagggagtggttcagtgaccataagatacttaggagtctgcaaaggtgtctggcctttatcctgaaggtgatgggagccatggaaggcttcaagcagggagagtggctgagtcagagttctgtgtcaggcagagattgcaaataatggcccccaaattggatctggcaagaggctctactttctttgactcctaacagtgatggcccaactttgtataattgggacaatttcatagataaatccaaatattggcctgtcttggtcccctggacctggatgctctgatcttgcatttcctggtggtaccactggctggaagtgggtgggtgccctctggctccctgcatacctgatccacgctgtttcctttccctgctggctcctctgggcccctgtgttggcaccctcattctcagtgatctctctgtgacctgatgcaggagactggccagggactgttgacctccagggaggggtggtaggggcttgaaccaggggagagatgggggatgtggagaagggggcaggttcaggtgagaaggatgcagggaggcacagtggccattgcctgtcctggagttggggttggggtgcgtgtggggatgaggggggttgtcagcgagaatgttcaagatgggcacctgggagggcgagcgggctcgggggaagatgaatctcctgttggtcacttcgggtgttatctgggtggagatgcctggaggcagccagacgccgggtctgcagctcagggtccttcttacctcctcttccaggccccaggctctgccacccccttccccgcagctttgctgggggtgggagtgggtggtggcagcgttagaactgctgagaagggcygttttccaaaaggcctgctctgccagccacgggcccctgggctccccgcctatcagcgggcggagcgggcctggaccccattctccacgctctgatgagcagcgggsttaaaggtgggaaggccataaattagtattagctactgtgtcgctggctcccgggtgattagcatttttattgttttgtggtgctgaggttggtcacacttggagcctggggaggaggcgaggccctccagggtggtggcttcgggcggggcctgagctccctctcccaggactctcctyggtttggcctctcaggcctgggcgctgggcttgggggggatccttcgcagaccacagcggggtctgttccctgccaggtrcctgcagtgtgcccagcatgtcttaagcacatrcctcacacttgaactcatcacaaaacaaccctgccaggtcaggattgttctccctgtttcccagatgaggtgcagaattcgaggctcagagaggttaagtaatgaacccaggatcacacagcccttagtgtcctcctggctgcagaacatggacctcctctgcagcatcttgctgcctagccccccgttgcccgctccccrtagtcttggaatgcagcctgttcccagccgccatccccgacttggctcccacctcctgctgggctgcccccggcaatgctcctccctgggcttttccgcccccttcctctggcctggctccctgaaccccaccctttctcctgtggttccagcaccttcaaacacctgtggaagcaggtggcccagaacctggaccggttccacaccttcccacgcctggctggaggtaaggcctgcctcacctcctcctcccgtgtggccccagggacccctcccctggccattatgaaagaggagggaggtagaggggatccagccacaagtcaggtggatgaaccatttcaggcmccagcactgcccagtagaactttttgtsatgagggatgcgtccagtaccttcactctccaatatgcagccaccagccacacatggccatggagcccttgaagggtggcctgtgcgactgaggaactgcattatctagttttctttcattttaattaagttawatcttagtagccagtygtggctggtggctgccgtgtcgggcattgcagctgtaagcggaggcaagtgcaaatgcagagaccagaagtgggaatgaacttgtatttgaagaaacaaagcaaggcccatgagtagggagggaggagggctggtaggagaagacgggctgagacgtaggcagggctggaccttgttggcatattaaagttttcccacaaagaaacagtttcatggtcaaggaaatttggcatgtrtggtgttaaagcaaaatggactcctcccgtgcagaacttctcagagccttgaatgctctaatacgcatggcacatcttcaaggacaaggtctgccatgtagtgtttcccacacgcattgggccatggaaccccrtttctgcaaagacccccatggaccaagtgttttgtggagcacattttgggaatgtgctgaggcctagagggagggagagttgcagccagcacgtgaccagcagagctgggaccggtggtccagcatgtttctctgtggcgtgaattggggcccactggggagtctggaccctgttcctggactggtgggagttcggatgggggtgtcagggaaggtgagcgctcctcagggtcagctgtgtggctttctgctctcagagcctccttccctgcctccctgagggagagaggccgctggttaccactttccaacctggagcaggtgacttcatctctctgtgcctcagttttcttggcttgaaattggggatagtaatgggaggttgttgtgaggctttggtcagacaaagcacagcgtacttcgtccagagttgggcagctgttaagtgctttcagctgctgttagctgctgcttcccayggagggaggaaactgaggccrggagagtgaagtgacctgtctgaagctccctcccactggggaaatgggggagcggtttccagcacgcgtgrggaggaggggcccaaccctggcagccgacatagggtaggctccaatgtccctcgtggacgagggctcaggagaacctcacaaaaagctgtgcccacttctgggaatggctggctctcgggggccttgggttctcatctgtcctctgctgttgtgttgggtagtttcagttttcccatcagtgtaatggggctgttggacctgatcacctctgatgcccttcacccctccctgggcctcagtttcctcatctgtggagtgggagaatgggcctggcccgtgggtctctgggatgttggccagcgctcactctgagcctccgcccgctctgggctgctccgtgctcgtgttggtcccgggccatggatggcgtaggtggtgytttgggcccctgggcaacygggggagccagctcctctggtcatttccccacccccgacccctgtagagtgcggcggaaagaacttccacttcgtgcaccgctcggccgacgtggagagcgtggtgagcgggaccctccgctcagccttcgagtacggtggccagaagtgttccgcstgctygcgtctctacgtgccgcactcgctgtggccrcagatcaaarggcggctgctggaggagcacagtcggatcaaagtgggcgacgtgagtggcaccgtcacccccgccgcggcccagcggggggctgatgggattgggtccctgggaggctcctctgcagccggggctggggtgtgcggggaggggtctcccttggtctcggcctgcagtgactcgtctcttctggcgcctcccttgcctccagcctgcagaggattttgggaccttcttctctgcagtgattgatgccaaggtacggggtgggaagtgggcgttcctgggtgggggcaagccctggagtgggtggaagagggaggaagagatacagggtaccctgacccagggcatgacccagccccactgctttgatcaaggcagctcagcagccacacacgcacctccagcttcagaaagggcagaatcagccgtagccagacaagagctcatcttgcggccaccctggaaccaggctcagcgagctcctaatagcatttgcatgagtgcatgtacacgtgtgtttgtgaatgtgttcatatagggctccgtgtggctccacatgtaggtctttccatataaacaygtacatatccatttgcacataagcacacacacgcatatgtcrataagtccacccacacgcatgtacatggagaaggcatgcagatccctacatgcttagacatgtgaccatgcatatgcctatatatgcattgattgatgtgtgtctrtgtttatatgcgagtgcacctgtagtactaacacacgtacacttgtgtgtgtacacacacacacacacacacacacacacacagtgttcatgtctgtccttgtctctkctgtggctcagccagaccctggcttttgcccttggcgtcccctacccctgcccctgtttcaggagttgggcccttcaggtgcaggtgtttcggggtgagtgtgttgtgggggctgccgcagggatgccttcccagcctcttagacctccctcctccctgcccaccccagtcctttgcccgtatcaagaagtggctggagcacgcrcgctcctcrcccagcctcaccatcctggcygggggcaagtgtgatgactccgtgggctactttgtggagccctgcatcgtggagagcaaggaccctcaggagcccatcatgaaggaggtgactggggtgggcagcctggggtccagaggaggacartcccaccggagcacagcacacacacagttctcctggagacattctcccatttcacagatgaggccctaaagggagaccctaaaagggaatgcctccgaccgggagagagtagagccaggttttgagctcaggctgcctaactccaaatccggggctgtgtccttgaccctggctggggtctgagcatttccagtgccctcagcaaccacgtccactgcagccatcataatggctgacactgatagacttttactgtggggccrgctgtggctgagcacttggctgagatgacgtgggtgttactgttcccattttacagatgagaaactgaggtcaaggcacttgcccaagttggtagtgcagggctggagtgtgcctgagaagatcttccccccagccccttggtggcagagggaaccatgaacccttctggagggaatggtatctctgggcaactctcatgccagctgctgctggaagcctctgggacctggacccttagttctccgggtgtgggtttggcagggagagccagaaaatgtttgcatcttttgccggcttgtggtgggatggacaggacagggagctgggcacgttgctgtcctggagggaacccaggaggaggcgrcacctgacccttcttgcagacactgaagtgtaaactgaggcccagggactggggagagggtgagccagagcaggggcactgggagggctcagggccctggtccctggtcccgtggaggrtctgacgccggggcctctctcctaggagatcttcgggcctgtactgtctgtgtacgtctacccggaygacaagtacaaggagacgctgcagctgrttgacagcrccaccagctatggcctcacgggggcagtgttctcccaggataagtgagtggccaggccgcagccctggtgctgtgctccgggtgtcctgtcygtgtccccatccccacctcctggacgtggttcccagtaataatgctgcccctaccttctctctgtcccctcccctcagcccagacaggcagccagggctcgccacatgggcccacagcagcaggctctttgttgccggtactggtggtgccggtgccagggtgccactggggaccagtggatctgaacctctaggggcagggctaggaattggtgtcttcgactggctctgcgggatctggtgttgccccactgagtgaggtgattgtcccatgctacaaagcagggcaggccaggggctgcagaggcaggattcgaacctgggtcacatgaggctaaacttgaggcttcgcctcttctttcctccgtggcactggttgcccccatgtctgcctctatgagaaagtggaggtgagcttggagagggaggaagggtgtgggcctgggagctggagtttccsctgctcctgagggacaggaacattggaccaggacaggccactcccttcaacttcgcagtagccctgtaaygaggcgtgccaagcccctccccagaggaggaagctgggctcagagactgggtaacctgaccgaaggcccacagccaacagctggccagcatccctcatccctgactcggcctcstgttgaacctggaaagccagtgtgggctggagcagggstgttgaggctggagctggggctggaggggagatgagctggttgctctgtcaccactgctctgctttgtagggacgtcgtgcaggaggccacaaaggtgctgaggaatgctgccggcaacttctacatcaacgacaagtccactggctcgatagtgggycagcagccctttgggggggcccgagcctctggtgagtgggtcccccttcccacaggggagctgagttcctggtgggagascctagatgttacrtctcgaggggcttcagagtaataggaaggataccatttactgagcacttattgtgggccaagcaagtgcactagctcagggtcctttcagcaaactcgtgagcaaagggactattcttcccattttacagaggaggaaactgaggctcaaggccacatgaccctggtgggattgtaattttggctccagcagccgcactttctgcaccatagccagtgtcccttaagtccaacaacctctacttcacaatggggaactgaggctcaggaggagcaatggcttgccaaaggtgactgctcctgagtggcagagccagggctgaacccaggcgtgctggggtttcccacaccgaccagttctccagctcttgatggatgctggctgggtgtcctacagtttaacttgatgctcactgcctggggttagtgcagaccccacaggttaagaactcagtcccgtaagactgaycccccaacttcagatgccaatcacaagtactgggaccccaggttacccacaccttgtctgactttgcgaygcattagaagctcccatgatgccctcttgagttttgatacgttgttagaacagctcacggaaccgaggggaagcgtgcttactattacccatgtattgcagagggtattttaaaggatacagatgaacagccagatgcgcagacacatagggcaaagactggaagggtcccyggcakgggcaccgccgtccccctggagttcgggctgtgccacccccttggcatgtggacgtgttcaccaatctggaagctctcccgaccctgtccttttaggtttttatggaggctgcattacacaggcacgattgattcaatcattggccattggggtcgactcaacctccagcccctctgccctccctggggctgaaggttccaagcctctaatcacagggttggttcctttgccaatcagtgccatcctgcaagagccctcattagcataaactcatgtgtgattagaaggggcttgttatgaataacggaagacactcctttcacccccatcactctggaaattccaagagctttaggaattctggctaggaaccaggggtgaaggctagatatgtacctcttatggcaccccaggaccatgccaagtccctgcctctcagtctagtgttctctccaygccacaccctgcctcttagacatcctcgcatcccagcaaggatgcaaggctgggtgcgactggagagaacaatggaggctccccacagactggagactggaggcagggtctcctgtccatccctctggctcttctgcatgccccaagcttggcagcaggctcgctgctggccgctacactgctggtccgttgattccatcatctcctcccttccccttctgcccaggctgttgcaycttttcagagaaawacagaagtgtcttttccgcaggaaccaatgacaagccagggggcccacactacatcctgcgctggacgtcgccgcaggtcatcaaggagacacataagcccctgggggactggagctacgcgtacatgcagtgagcccctctcgggctccaccgtccagctgtctgtcygtccaggtggccgacctcactgcacagaccccactccagcccctccaccccttcttcatgcacagctgcctttctataatccrggcytgactcccttcttaccactgtattctggcctctcccatgcctcaggctctggtttgagatcgtgctrgggaggaacatggccactaccccttatcccatcggccatgtgggaggtatgaccctggtgcctggcaggttctccctctgccctccactgggcccagtggctcagggacctggggaaaggagatggagcagctcttgggatcctttggggaaaaggaggccattctgggccccttggcaaacctcaccactcacagaggctcctggccttgatccctgcccctccaggtgtccagggtaaagtgtaactcagacygacctgtggggcacagggggcaccagctggccttgccctctctggtctgggctgtctrccttcctcactgtatctttgcccagacccacctgggccagtaggcccctgtccccagccacacaccttagatgctggcatgccttactccaggtgcctgtgtttggccgaggcctgtgtgattcccggtctgcaccacatggcggggttggggggccgctggaggccacctgccaaggcgtgggatgggatggtcctgcyggtttaggcygtgattctggaaaaccttggatgggccttcgtcctatgtcagccttccctytgatcctcaggccctacctgtagagacctccactcctagagccagtctcagggtctgggatttccctgcaggagctcagccaccactgtgccatggtgacacaggccaaggcagacattggccctcccttctcccagcccccagaggcctggccttgrgttygtcagcatgggccgaggacgttgcctgtagaatcctcctctgcctgggagtggctctgtgtggaccagtccctcactggcccattctttttttgacgcagccaatctgtgaccacgattcctcccacagatgcctcctgcttggattctgagtggtcagagatctgtaaagcatgactttcaaggatggttcttaggggactgtgaaartgttgggtcttcctccaggatgcctgcatgggaccccacccggagctggtgtggccattcccsragtgccactggcccatggatgggggtgggtgctggtgccasctgggctgggtgtgggttctgtgtccttccaggatmtgtgtcatttcccatgaggggccggggcaggtggctgggtgggggcacaggctggagtattyttagttctactggttctacactgtgaggtggcaatgggatttgctcagatgccacccaataaaatgcctgttacttaatcacagtggtggatggtctttctggaggggatggtgggggcagccaacatcttttaagtctggtgtcattgccartgtgtcacctggtcatgggcacagtgctctcagtgtgacagaaggaacagtaggtgctgatgtttgaaattgtctgttggaggcggtggggctgggttcacatcctggctcactgcccccccgccagccagatgattgccacaaagttatgcaacctctctgaccttccatctcttcatccataagatggggtaaccgccccctctccccgccrtgggtcatcatgagaattgaatgagttaacacttccacatgcttagaatagtgccagacacatgatgattcaaaaatattacccataaggccgggtgcggtggctcacgcccgtaaccccagcactttgggaggccgagataggcggatcacttgaagcctggagtttgagacctggctggccaacatggtgaaaccccatctctactaaaaataaaaaaattaaccaggcatggcagcatgcacctgtaatcccagctacttggggaggctgagacaggagaatctcttgaacctggaaagcagaggttgcagtgagctgagatcacgccactgtactccagcmtgggtgacaaagtgagactctgcctcaaaaaaaaaaaaaaaaatacccgttrcccattttcgttgtaagaaccactatcctgtgtggtgatggttaattttatgtgtcactttggctgggcatggtgcccaggtatttggtcaaacattctgggtgtttctgtgarggtgtatttggatgagattaacatttaaatcagtggagttttaaaagtaaaaagcaaggcaggtgaccgttcatcctgtgggtgggcgtggtctaatcagctgaaggtcttcataaagtgaagaatgagctctccacgcgggaaggaattctgccagcagattccccttgcactgaatcgctgcagctcttccttgggcctccagcctgctgggctgccatgcagattttggacttagtaagcctccataatcacatgagcaaattcttaaaacctctctcttgctcctgttctgtgtctctggaggaycctgatgaatatgtgtgctgaaggcccagtatgtttccttacaacagcctttggaaggaattctgccaccctcccattttggagagaaggaaatttaggtacagaggtcaggggccttcctgggggtatggtattgctgagacgtaaaccctggtctgttggggaaggattcgttcctggtacagccacaagaaggcacatatgactgctgtcttggaaagacacgctcagctggccaaacgatgactgagaggagccactgcagccagttagcttgagcccaggtctgtgggccctagcccatgcaggccaggtgacttgtggaggggtggaaacatgtgacctggcctgttcccacctgcccatgatgtaaaaggggctgttttgtaaaccacactgacacctccagggacaataggcaatacccagagtgccccaggctggagcacagaagggaagggtggcaactgcatttatagtcgtgggaccagcaggctgtggatgtgtttgaaccattggtgtgacttgcttaagatcacactgagacagagttggctaattactaaatgctttacctacctggtcacttagagccttggcagtgaccttaccaggtaactgtggcaggacccacagaggtcagaggtgggataactagctcaagctcacgcagctggttaggaggaaggctcgggcttgcacccgggtctgcagctgcccacggcccacgctcttcgccacctgctccattgggctcytgacttccaagctcctcctctcctaatattattttatccaaccttcctcaacctgtcacctttgcctccttttggactaggggtgactcaaagctgttgcttaccctgttctctctcctctacctcgtcccctagacttggggctggtggctcttgagggcccagtgcctgctcggggacctgaggcctctttgcatggtcaccacaataagtccctgtgtctgcgktggcccaaggagccccttcatttccctgctgtggccagggccagggcttggagcgtgaaccatttgactgaggccggatgtccctgccaccactgtcccacgggccgccagtggagcatgccctctaaggaaatgaggggccacctgtgctggctgcaggccaccaggctgacccagagctcctggcggggggagtcaggggaagtggcaggaggcagacccaccctctccagagagtcttcattttcactagttcgtccccgacccattcatcgtcttacttcctgggtgttctgtttaggggccagattagtaaataacaagagccaccattgtttgaatgcaggctgtgtgccaggcattgggctaaatgcttcgggcatcatggcctcggatcctcatggaagtctcataaagtaggtgctgttactcccattttacaaaggaggaaactgacaccaatgggttaagtaactaacatgccagtaggaaatgaacaaactgggttttagtcccacacctctgactcccaagcccctggccataacyaccactgcacagtgccctggagctggacaggcgctgggctcagatcccaaccttagcgtcttgttcctgtgccttgacctcccagcttcagactcctccaggagctgaggaccaaatgaaatatttaaaaacaaaacgctgcatcccatggcctgccagggtgaggtgcccaatcaatgtgaacttttaattttcaacctcaacacttcttcatcctagatatgtgtgttccccaggaaagaggagaagccagatttaaatgagcacctatcaataggccaatcrttcctacaaattctcttggaccacaccggcctgtgagatagtattttagcaccatttcacagatgagsactgaggcttaaagaggtgaagagagacctgcttagtaagggacgggggcaagagaagaacttgtttctgatgaacataccagcaaccccttgtcattgtccctcacaggaatccatccttcygggtgttctgtgcatgggtgggaggaggcactgctgctgtcatggctctgaacacaaccagccagccttgtcctgtgtccggggggctgccagcccccctggatgacggagcaggtaccacatgcccctcaggcacccaaggtaaagcagaaggctgttccaggcctctgccatgctttccctcagccctatgtgcccaggcagttgccctcatccccgaagcatctggtccmtagaggttggagggagctgacgttcagttgggcacctgctccaggatgtgcatcggggcaggcgtcrctggagggagagtgagcctcagcgagggaaatgcccggaagaggccacacagcaagtggcagagccagaattggaaccccagtgagtcagattagagtgttagtcgacagccatagagtcacagaccccagccttttactagggctaaaattgagggtcccggccaggcgtgctggctcacgcctgtaaccccagcactttgggaagctgaggcgggaggatcacttgaggtcgagagttcgagaccagcctggccaacacggtgaaaccccgtgtctactaaaaatacaaaaattaaccggatgtggtggtgagcacctgtaatcccagctacacaggaggctgaggcaggagaatctcttgaacccgggagacagaggttgcagtgatctgagrttgtgccattgcactccagcckgggtgacagagtaagactccgtctcaaaaataaaaattaaaaaaaattgagggtcccttgccagtaccatgccaggcacaaagccatcggcactggagggcatcatttattggtgatcatttactaagcaggtgcttgatatattaacctcatttaatcamcatttgrgggtgcctgtggccgttttacaggtggggaagcttcgaggagtcaaagcctgcttgttgtcccctgtcccttgggccaggctggggcctcaggagccccacagaacaggaccactcccttgtcctcatcccagccctttattttccatcaagagctccctgagcctcttccttcccaggctgaacatcttttattccttcagctactctctgtgggatgtagtttctggatctttgtctacctagtgagctgctctggtgatgccagggagtagagtctggaatcatcctgaactgggatccaggctgtgtgacattggctgaatcacatcccctctctgggcctcagtctactctgctgtcaaatggggacataatgttgatagtactcatcccttacaattgttaggaggactgaatggtctgaaatgtgaaaacrgattttgtgctgggcctggtggccaggaacaggtcagtcaacatgagccagtactgttaaggtcatgcacccgtgtgaggtctgatcacaacatcacacggcaggacgatcacctctcttgttctggacaatctgctcctttggctataaccttaaatttcacttggcttacacgaatacagtggaaagattaagaactctggagtgcaatgaaagtggattcaggccgggcgcggtggttcttgccgtaatcccagtgctttgggaggccgaggagggagatcacttgaggacaggaatttcagaccagcctgggcaacgtagtgagacccgacttctaccaaaaaaaaaaaaaaaaaaaaaagagaagtttaaaaattagccaggaatgctggcatgtgactgtgctcccagctacttgagaggctgaggcaagagatctcttgagcccggaaggttgaagctacagtgagccatgatcacgccactgcactccagcttgggcaacagagcaagagagcaagatctttctcttaaaaaaaaaaargtcaattcccagggactttggacaagccacttaacctcctgagccctggtttcttcatctgtacaatggtgatacaaaatccttcacggagttctggagagcagatgcggtgatgtttgaaagcattgcagaggctccataaaagctgcttcctttcctttaggctttagtcaytattacccttttggctcttattgagcttgtggtcatttgagacctccagctctttttctggttgagaggcaaactgctcaccgtcactcagcaaagtttggtgaggaggcttgagtggatccctgggtgcgaaagagtatcccaaccacagcagagtcccttcctgaggtcttagccgatccctggcttcccaactttaggagcccacaccactccactccttggacttcttgtttcagaggggtcggatgaggagtgccgatgaggctgggccctctgagaactggctttgaggccttcccagcaaccctcctccgaggtgcttctgaaccaagtgggttggcttaggaactgcccatctcccagaactttcttggggtggccctgcatgcccaccctctccccatcataagccagactggaggtgggtttctagcggcccagttttgtcctggagtatggagtgctggtgagaaagagggagagagaatggtgggtggggaaggaggagacaggagtgaatggagagatatgcaagtagagagacagagacagatcagagggtggggcaggggcagcagctgatgtatcccccagtccctagggtcaggatcctcttgggggctccccctgtgccccatcctccatccaaccgcagggcagggggaggaaggacgttcagggcagtcccttccagccgacatgcccatttcctttccstgcacctcaggggaagcagatgccaaggcaaatgggcagctcctggctggctgtttccatggctcacccctctctccttcccccgtggactttgcataagtctgtcatggctgttggtcac

SEQ ID NO: 9991 - DNA, 60450 bp, Homo sapiens
tccaatgccctgactttggcaaaatccacgccctttttgaggaaggcaaacccacccagaataattgttgagccaacaagcagcttaagccgctcataagccctgaggtgcctgtgaaggctgaggcccagcaatgagctgycactgccaaaaccagtaagagtcactgtttttgccaagctttttttttttttttttttcttagctgttgtcattgttttttgggaggagagatgggacatctcaggaattcgcctgtgctgctgaattctcacgtgcagcctcatgtggactcacagccactccctatcctctgtaccatcatgttttactgttctctttaattccaccatgaagagacttgataggaatgttctggaaactgcagcctargggtggggacgggggatgcgaggagtggggagcagtttattctccctggcagcaggactgaactttggtgccagagggccactgggtgtgagactgtgggagatgtttgtttttttcctgcctctttatacattttatgggctttccatatttgcttaagcaaaaaagttaaaaaatgacaatgataatagttaacatttattgagcattgctggcatcgattgagcatttatcgaacatactgactttccatgtatgaactcacttaacccttacaaccaccttttttttttttttttttggaggcagtctcactctgtcacccaggctggagtgcagtggcragattatagctcattgcagactctacctcccaggcttacatgatcctcccacctcagcctcccaagtagctaggaccccataggcatgtgccaccatgctcagctaatttttaaaaaattttttttgtagagatggggtctcactacgttgcccaggctggactcgaactcctgggctcaagcgatcctcccacttcggcctcccaaagtcctgggattataggtgtgagccactgcaccaggtcagatattcttttttttakaccaggtctcactctcacccaggctggcctggagtgtagtggtgcaatcttggcctctgggggttcaagtgattcttgtgcctcagcctcctgagtagctgggactacaggcacatgccaccatgcccagctaatttttttgcatttttactagagacggtgttaagcctttggccaggctggtctcaaactcctggtctcaagtgatccactcgcttcggtctcccaaagtgttgggattacaggtgtgagccactgcacctggccccaggtcagatagtcctatagtcttatttccagatgaagaactgagtacagaaaaggaaaaattaaaactattgaaatttaaaaagagatcattwataaagaggaacaaactactgatacatgctaccacatggatgagcctcaaagacattgtgctcaatgaaagtggccagacacaagagatcacatattgtaaaatgtcatttatctgatatatgtagaaaaggcaactccatagagacagatcccagattagcggttgtctggggcagggggtaggagtggggatgatgaaatattctaaaactggtttatagcgttgtttgcacaacttggtaaatttattaaaaaccattgacatgggtgaattacataatatgtaaaatattcctcaataaagtaaaaaaaagaaatgcaattacgttctgcaaatataacatttcctaagcagccatgatccactttacaggaatttctccagtaactaacagctcattcatttgttcacctgaactcatcttygttgagcacctattatgtgccaggtaccatgccaggatatgggttccagggtgaatctgatcaagtgcttctgctctaatagagaatatgggttagcaagtgttagaaggctgggctagaaggggtggagatgcagatgagaaatccagcaatgacaagarcgtatacttggggctgccacagggtgggcagtgctggcagagcctggaggaagcaccctccacccagacctggcaggtacttgagaaggttccgagaagagaagtttccgagaagagaaggttccgtgcttgaggctgggacctgaaggatgaggagttgttagcaggtgaaatggctggggagtggggcaggaagaataaaagtcattttctcattcatttcttaattcttttattcattcattcagcaactgttcattgagagcagttatgcccatttccctgatgaggaaatagagcctcagagaggtaaagtgacttagatacaaaccttagccaatctcttgtcttaaaagcccacctttttccactccccactcttgcctccaaaaacagtctggacaggttagacacaccgctgtgactttgagggtcaaggggaggtaccctgccaaaaaacaaaaacctaattatccttgtttagtgagaggaggctggcgtcccccacagggatgttcctttgtctgttggaactcttccgctgccttgaggacccacctttagccccctttggatcttgaatgggggagccagcctgccagtgtctggggttaaggggaggagaccactgaattcattgtctgggccagggaggacctaccattggaaagggaatgggaccagaattccagaccaggctttgataccaattattcaggagacctgggtcagtccttacctctctgtggtcctcagttttctggtccctgaaacaagaaatctgggctggctgtatcctgaactataggacttctggcctcagatgcctccagattgatatgggctggaagtagggtgacacatttgttctgatttgctcgttctgatttactttccaggttttagcatcaagagaaaccttctcagttcctgataaattgggatggttggtcaccctagctggaggactgttaggttaacctaacctcacattttacccacaaagagcaagacacgcagcacccgcctttattcctatgtggccacgaagctattttcaagccattttgtttgcacatatcatgtttctagggttcagctgaaaaccctctcaggtccagctaccacttccctcaattccttcagatcttctgggctctgcttggccatctccttttcccccctctgcacccmctcccatgcctcaggatggtcttttttggttgtctccatcagctcccctggagcccctttagctccttcctctgcatttaatgcaggatttgtgccgaagcaggtgctccacaagtcatcacggaaagtctgaatatctccagggcccagggcagggctgcccccaccctcaaggagggctgcacaccccaattccagggcaactttgttggaaggacagatccttcctggaagaggttgcagggagccactccccaggtgtgacttcttaaccctttctcttccatgggamcactcaggcattgggtggagcctgtggaccccttctgagaataatttttttaaaaaggcattaggattactatgaaaagtcattttactaaaaatagatatcaaactattaacaatttctcatatagtaacatacgttctcttttactaatacattaaataagatttagtggtcggtctaatatgactttaatttcacagttctcgtagcttagatgatatcttgagatgtttacaataactgtagtgtgttacrtaaatacctgtgatttctrctagtgacaaaatcacagggacatctacttgctgcctacattcataatcaaaggatatgttaaaaaccattggctgggcacggtggcttacgtctgtaatcccagaacttcgggaggtcaaggtgggcggatcacctgaggttgggggttcaagaccagcctgaccaacatagagaaacccccatctctactaagaatacaaaaaaattagccgggtgtggtggcgcatgcctgtaatcccagctacttgggaggctgaggcaggataatckcttgaaccccggaggtggaggttgtgatgagccaagatcgcaccattgcactctagcctgggcaacaagagtgaaactctgtttcaaacaaacaaataaacaaacagacaacaaagcctttagagattagtgaggctaaagrtataacttttgtccacccctgtgtcatggaccccccagaattctatcctcagtcctcttgggggtccatgaacctctgcttcaaggcaaaggggttttgattccttaggttagataaacaagaacatcatcaagagacgagagaacgaagagtaaagggcagtgtccagaytgggttgggttaagcagagaaaggtttctagatgagtgagtttcagagctgggtgtttaaggtgagtccgtgttggcaggaagcaaggaactgtggttgagggaaggaactatggggaaggtttgcttttgtggctaaatcaaaaacacagcagactaacatcacagccacatcactccagggcaagcccgtgtctcctttgtcaccaagaacaccaaggcattgtccrtgtaagacagtgtgcctgtcctcaagcttacatacaaagagacaaaacaaacacaaaagttaataacaagacaaaaattaaactgctagtaaaaaatgcagtcggaagtatctgaaacatgccacatatctggttaagtgcatacaatgcaagccacaggcgttcaaaggtgggggttcaaggtgggggtcacctcccctctgaggtttgcggtgaggaccaaatgcggaaatggacacgaggcccgaggccagcattgtggaaggccggttagagcatgcactttggaccattgtggctacttaacgtctcagtgaccttctctgtaaaatggggataataaataagtatggcgcctgacatatactaatgtttgcaacacggttcaggagacaccagagactggagaacttggcctttaacgtggtaggtgtgaaaacatttgaatgaatgaatgaatgaatgaatgggtcctcgggttgcctcggtctgccccaggcggcccgctaagccccatgtctgtgaaatgaatccccagctctcggggtcagcttcatctcagcgtgtgggtgtgggtggtggggaggtgctgagcagctcagcagaggcgaggcccaggccgagtttgtgggtgtcatcccgggagggtcttgctcggcctccccaacccccatgctgctcggctcctcagtgggcgggggaaccagcgggcttagctgtgcccgggccgatctcgagaggacaaggcccgcagctagcattcgaggagcccacccccgggtccgcagcgtggggcacgggcgccctcttatccccgaaaggtcgatctgggcctccccaggctagagtgggggtggggtgccgatgcaccttcggatactgtggtcccccagcccttccagccgcggtcgcgcacatccgaaggaatttggggccaggggcattgcgggcagagaggacagagaaacggagccctctcggcaggcgacgtgggagaggagcgccctaaaaagtggaaagcgagcgttgccgaggctgctggcccctttaagaggcccggctggctctgcggcggttccagctaacccggtccctggtgcagctctgcggtccgggtcccccagcagagaatcggcacccggcggggaggcagsaccagacgcaggagagggcgtggccccgccggggagctgggcggagtctatgctgcggagaaagcgggagaacccggaggtgggcggagccgagggtctgtgggtggggcccggcgctgcgggcctcgtggggcggagcctcgggctcggggaacgccgcagagggaggaggggtgggcggggccgcggcgggggcggggccagtgtctgcagtgggcggggcccgccgcagaaggggcagtgccggccgagagtcctctgcgtgcggctgccgcggcccctccacagcgtctctgacagcccgggcggtgagacccgcgacccttctggccccgcgcagataccgcggcctccaccgcgtcccgaggagcggccgagtgccctctctcgcctcggcgcccgcatccggggccatccgtcctgccgtckctgcggaggccgcatctggcgcgcatctggaaccgcycggccggccgcgctggagcccgcgcccaccctggcccggccgcgccgggagccctgcccggagctggagccgcacctggagccgcgggcccggggccctgagccgcgcagccggcgcatggtgaactcgctgctgttcggggagatggccttggccttcggctgcccgccgggcggcggcggcgggggctgccctggcgggggcggcggcggcggcggggcagggccgggtccgtcgccggtgacggcggcgctgcgggacgacctgggctccaacatccacctcttgaaggggctcaacgtgcgcttccgctgcttcctggctaaggtgcacgagctggagcggcgcaaccggctgctggagaagcagctggagcagcagcagagcgagcgcgagcggcggctgcgctacaagaccttctcccgcgagcaggccgtgcagaccgggcccgagttgctgcggcccccggcgcccggcggcgggcacggcctcagcagtggcgcggcggccggcgccaacgccaatgccgtggccctgggcggcctgccccccggcggcggctcgcacccgcagcactacggccgcctgcccgggaccatctggagctacacgcaggtgcggcgcacgggcggcggcggcgtggagaccgtgcagggccccggcgtgtcgtgggtgcaccccgacggcgtgggcgtgcagatcgacaccatcacgccggagatccgcgcgctctacaacgtgctggccaaggtgaagcgcgagcgcgacgagtataagcggaggtgagtggccgcccctcccccgccgccctgggacggggcgcccaggtccaggctgccgcggaatgcgtatgcgggacgggggccgggcgggcagctggtactggcaggtgggctggaagctgtgtttgcagagcgtcttacgtacgccaggaaggcccagttatctagatcccaggatgggggcgggcgctggctaccgtgggggccacctcgatgctgtcactggtgaggcacattgttttctaggtgacataataactgtctgtgttttatgcgatctcatttaattctcagcacaatacagcgtattgtgtaaggcagtcttatcctcatctcgcagatgaggaaaccgaggtgcagaaatgctaagtgatttgcctaaggtggcttggcgagtaagtggtgaaaccgggatttcaaccagagattttaaccactcctggctagtctgtctcctagcataagtatttttaccaaggaagtaggaaatatgctcccctccctcaacatatgaaaagaaaaactctaaccaacccactgcctttttatttcttgaattaaatgagatcacgtttttgaaaatggatggatctgcccctaccccctggggccagtgtctgccgtcttgctccagctctgtaaggtccagcttgctgggttggataaccacaactacaacagactgctcacaagcttttataaaatgcctcctttcatccctcttctccccactccctgagtctcatggtttattgagccctaacaaactcagccttaaaagcccccaggagaagataatgttgggctggagactggacattgaatggactgagaccacaatctctggctakaactggggtccagactctgcaagactggccagtgcattcctgcctagcccagattccccagctgggaaactgtcattgcttcctgtctgcagtctggccgacaatactgtctgcttggctttccgataagaggagaggggtctcctatcctcctcctcttcccataagagaagaagggtctgtctttggcatctcaggcctggctggggaaggggccctctggccctggcaatcgctgttccaggcacaggcagccttccattcggagctattggctctgaactccagggcttggaggatgtactgagaaggacccttccttccatctctaaaggtctgtccagggagctgggcataggtctccttccgtattctcccattggacaggctagcaactgggtaggattcaaatgccagccttatacctgctggtgagattatcaaatcacttgaaagcctgtttgctcatcagagaaatgggaataataaaatctgcccacagttgctcgaggagacagcaggatggtgatgctctttgggaggtataaagtaatcatgctggtgttattaaagatgataggcactttgtcaagctagcagggagtagaaatgctgagagtcctcaagctctctcatgtggcgcctagcttcctgggggtaggtcttacactccactgggagacgggcttctctcctgggttacctgtttctctggaggacttgagaatggcccgcctggtgccttgccacagggaggccacctcgccgcccctcatggtcaatgtcattggggcaggctagggaagcaggcacttgctctcaatggtgaaactggggagggatgggccgggccctcctgtctgccactgttgattgtgttgtcatgcctcaggcttgtgttgtgtttgttttattgtgtgtgtgcttyttggacctggctactaaggtgatggaaaaaccgtgcccagtcttggagggagatgggttggcattgagcaacgatctattcaagttgcacccagggcgtggggtgtgatgtcagcttctggcgctggcctggaatgagacggtgctgctgagacaggtggagtgcgggcgtctctcttcccgcccttctgggatgcgtgcacaccttgtcttccatttattttctgaagttaactcaagactcatgttggatttttccaaagcaggtatattcctttcctggggcctcagtttccccgtctgtgaagtgaggttgagggggggctagaattgcggtccttgaaaccccaggctttcttagagatgctttagggtttccttgaatatctaataaaaatgatcatttaaaagaacattaagacgttaatacagtgataaaaatgtgctcacccacctttaagttcttaatattaactcactgggttctactaacatgctaacttgttagtagtatgttttgggtatccctaagaattttctttggggaggagggcagacatttgataaacattttttaaaaagttgaaaaaccactgggctagatgatctcaaagggtcttcccagccttggcaatatataaatctgagtttgagctcccagcccgcttctgatcccctggccataagagaagtcacygtctaagggatgagacccaggtgtctgcctggactgttgtggccatgaagggctttaaatcatcccaggatatctattacagaactccaagcaatgatgcccagaaggagcctaacccagaagggaaaggttccagggtttcccctggtccacctggaggaagctgcagctccagagacccccacttgcttccccaaaggacaacttaggctgcgaggctcagcgatcttcaagccggacgcttgttgagttccacctccatgatttctggccacatccatgtactaccgcctgtgctattacgtacataaaatattttaacaacttcattgaggtacaacttgcatatcacaaaaactgcccattttaagtgtacaagtcaagatgagtaaattcacagagttgtgcagtcattaccacaatcccgttttagggcattgcatcagcccccaaaaagatccttcatgtccatttacagaaaattccaattccaagcccagcccaggtaatcactgacctgctctgtctctagaaactagccttttccggacatttcatagaaatagaawcatacactctgcagtcttttgtgtttggcttttttcacttagagaattttttttgaagttcatccatgtcgtagcatgtatttgtaggctgttcctttttatagctaaaaatattcctctgtagtatagaccatattgtgtttatgaatccacccaggtattcaatgtattttaaatttaaaacgtcaactgtataccaccgagcatcatctcatgtgccatcagtggtccacaaactgtgctttggaaacaccaacccaaaccagagcccctggcctggggtgcctgggtcctggccccagtcaccactgctttggttttcccttggcccaaccaggtctttaccacgtgggaaatgtggtcgctgaagccgcaatgaggacgaggttgtcaagcgttgatttggaaaccaaaacaaacatctctactctgtcaccacccagggccactaaaatatcttgttctgactttgcaagctgggggcttttccctggagtttcccactgagtttatctgaactcaacagtggagagttccctgagttggcatccaggagacctggactttaggtccagctctgccactaggtgctgtgtgacctctggccaaccgctgccctctctgggcctcagctcctccacctttacatgcaggagttcctgtgggtgatctctctcagcttgctctctactttaggtcagtgactccaagaggcccgtgttgtggctgatctttctgcctctggagaccacactgtgttcgctgaagcctttctctgttctgggcttccccttccctctcctatctctgccccagataactagggtccaggctccaggcataggcagcgctggccatcccatccccaggcttaaccggttcaaccgtttcccctgtcttcattggctccaaggaaggatgcaggaaatctttaaggctgtcaagaaaaaggtccctccagcctggcagctgtcacaaagttgccatggactggtaggggaagttgccctgggctggtagaggaagttgcccggcgctagtagtgctggcctagctgcctatcagacagggcgactcttttgggggcctggtgtccctgtccagaagcctgtccagccatcctggccccctcaggcctagtgtgatttgcagctggctggcctggttccctcccgtgcgagtggctgactgtatgcgccccccagttgaagtcagcctggaggctaggtttctttttttcctggtgcctggggtgattggagggtggtttgggagcctggagagaccactgtgatcattcagcctggtggctttcaggtgggctttttagagccctggagtccatagcagggcgccttgggagactcgggggacagtgggaggctgagtacctgagatttgacccatgttgcccaccatagctccatgcctctctgactcccagactgtccaaaaagtattccattttaaaaagggttctgctgttttaaaaagaaagaaaccgctgattcagctgagtactttcattttaaaggtggggaaaccaaggcccagaggggggctggccctcagtgctgagctggacagaccttccatctgccgtgcagagctggcctccccgcctcgacatgatgcccgcatcatccgccagcagtcgaggctttgttatgttctttccacctttttgtgtgtctgttttaaacatttttttaaaaagccactttctgggatgggagggacttttgtcacagctatttctgactgtgagccggaaggggctgggctgtcggccggaatggaggactccaaaaagggatggtgggtgggtcagctggagtgtcccccgcccattcccgtcacaccccaggggggccctcaagcaggtgggtgctggcccctgaatgtcccgaagcccgaaggctgccctggaatagaaagctgagggctttgttccctgccactcccattgacactttcgttatttctgaagctggcaccgatacggattctttatttctgattttccagtgaggcagccttcgatggtggaaaagggtttygcatcctggctctgccactgtctgtgtgaacatgggcaagtggcttggcctctctgagctgcccgtggagctccccgcttcgtcctctgtaaaagagggatcatcttgttgctctcccagggwttgagaaggaacaaatgaggtctggtgttaaggtacctggggcttggcagattttgggcatacctacctccaccccagcccagcccccttcccctggcaaagtctgttcctttaatttacaaggatttctcagcatggccctgactgcctaacaagtccatttcagggcatgtcgccgctctctctgtcccatggaggcgccagagatggtgttgggggtggagggagaacggctgcttctttgtccggcatctaagaaggctgtttgacctactcttagcagttgatttgtgcctccggaaatctctcgccatcccccagccctttctcccaacttcctttaagagaaacacacaaacccctccatctagcgcctcgggtcccttgagaactatattacagaatcccttggctgggttggcattctcactggggacaaatttgggagcgattctcagagcctcaagctagagggaggggaatgaggtcccagaaaagaaaaggaagcagggagacagctgacgctgaagattccttctcagaggaatgcgaggcrgggctttgccttggcaaacgagaccggatgcgggtccctgggtcccccttccccccacgtgtatgcacactcacactcacacacatgtacgtgcacacacacacattcacatacacatgcagatgcacacaccagactctccgttcagtcctgtggcccacgtccccacacatgaccgtgtttgaaggacacagaagggtagacccggaatttgaacacgccctttgctgcaacgagatgcgttgccttccaggagaattgatttaaactgtgccatgtgtcagtgacaccggaggctgtgggctttgcatttgcagtcctggcttttgatcgyattgagaggtgaaggccggctggcattccatttatttcctatgtcgcggatggctgaaggcccgggacgggaaggaggcagccctgtcatgtccctgtgctcaggattagggatgtgttgctttttcctgactttctgctgtcaggcggtcctaagcacccaccacctcccgatcacagccccccacacccggagttgtaactacctggcatgtgtctgcccctgcatcgwctggaagctctgtgggggcctgctccaactctggcttcgtctcccactggcagatcccagccaggacctggccaaggtccatgctgagtaaatactcatgcagcagggaggcctctgtgtctggctgctgtgagctagtaggcctccaggaggatgggacagaagacggacaacacagaccacgtccagggattcggctgtttgtggaggggagggcctgcacttggaatcagaaggcctgggccaaagttcaaagtttgaatgaacccccaagcctggcagtgcrgggtgctggggccccagggcaggagttaaaagccgagtgagcttgggctagtcactgcctctcgagcctcagtttcttcatctgtaaaacagggatgctaagctctgtgtccggaggttgtggaagaagtagacaggctcgcctagctacagcacagggcgtgtaaacagtcaagttcagaatgatttcacagggcagagagtgggtgccctacagaggcrgatctgtgctggccctgtggggtgggcagaggttgagaaccaagctggaaactgggagagggtgtcccgtgccctttgctggcagcatctgtgggttgcacagccctttgagcattgccagactgtgaggtgtttagaaaattccaggccagatgggagactgctgaaggtttgtgatgttgcckccgcctgcccacgaggggagtgtcctcccacccacactgggcacygggtgcttggcttcctgrgcaggatgtggtttctcattctagacctggtacaagagagggtagttttcacccaacagtaaacctggcaaatggcaatgcctggttctctggagggtccgtggagcccaggtcctggtctgggtttgcctgcgatgtggtctgagcttcactgtgcccacctgggaatggggacagtgggaaggtgggcttgcccagcaaccctgtgaagactacgttctctctgtaatgtagcacaactctgtgcatgccatttaatctcttgcacctcagtttgtcgctctgtamaatgggggtgtggtttcttacgagttctgcttcccagggttgaggtaaaagtcaattaaaacagtgcagtaggaaaacattttgcaaaaggrtttgaaaataaatcaatatggcttaatgcttccgtttattgagcacctactttgtgctaggtgcagtgatgacttctttaaatatgtgataattatgggagcagtcccaagcagtgggaagtgattatgctcattttacaaatgagaggttcaragaggtgaagacttctgtcccagatctcgccacgagtccgtctgggtctctggmccccaaggtcagtgctcctcccakgaggtggccttgtcccatgcccctggaggttgccaaaggctggctcagggtgaggaggcaggcaggaggcacggggtctccccagcacctgtcacaatattgccatggcgggtggcagaataggaggcggctgctgcgctgggaagactccctgctgtcactttacagaaattatttcttgagaagcaaatgaatcactggcagtagcaggcagatgaggctcccgggccactgtagcaggcctgtccaggcccctgctctttggagaaggtctcaatgggggctggcagggctggcaggggaggagttggggaacagggaacacatattatgacccgtctggtgatttccacgcggtctcatttaaacccggtggtggcactgcaggatggaaaccgaggctcagagaggagaagtaacttggaagtcaggctccagatccaacctttatcctgtgctgtacccagaaagggccatgcccattgcaagccgctttcctgctgtgagcctcagttttcatttctgtgaaatgttgcctagcaaagctggggcaggctgtggatctcaggctctcaattaatgctccatttatcttgcccggcccctgagtgtcctcagggcacagccagcccgaggttctcatccacggatcaccagcagcagagggcctcgggcattctggtggctgtttgggagctcgcctccgccctgggctggagtatccctagcttttgctttcagtcagtgctgtgaactttgccagggaacagggaagttgttacaatcgtttggtgcctcttgttggggaagatgagactgctgggtgtggatgtctgagaagccaaagtggtggtggtttcagaacagtggctgagtacccaccgtgggccaggcccctgccctcgagaactcagaatctggggacatagacaaatgtgtcatgccatgtggcagcatcatgtgacaacagcatgtgcccagtaccttctccaacagtgcttgcggatagtaggaacacaataaacatgtgttagttaatgaatttcattaaatatttatacaacatttactctttgccaggcttcattcaaagtggtttgcaaacatttaattcatggaagctgtaataaccctgtgagttgggtgctatcattagcccattttagagatgctaaaactgagccacagaggcaggggagggaactgggccaagacaccttgaaagtggcaagcccaggcccggtgcggtagctcatgcctgtaatcccagcactttaggaggccgaggcgggtagatcatgaggtcaggagttcaagaccagcctggccaagatggtgaaaccctgtctctacaaaaaaaatacaaaaaaattagccgggcatggtggcaggcacctgtaatcccagctactcaggaagctgaggcaggagaatggcttgaacttggagggcggaggttgcagtgaaccgagatctcgccactgcactccagcctgggcaacagagtgagcctccatctcaaaaaaaaaaaaaaaaaaaaaaagaaagtggcaagcccagatctgaccgcaggaagtcaggttccagttccaaccttaaacctgtgtagtaccagaaagggccgtgcccattgcaagtagcttccctgcttgagcctcagttttcacttctatgaaatggaagtaataaatctgacctcatgaggctgtttggagggctgtctaaaatgatacccgtggagcactttgtaaactggcaagcggagtgcctgtggggaccaaatccttgggagccctgagctctacccacactgcggtttcttttccaacttcccatgcaggctgaagctccttgaagctccatgcaatgccttgtcctctcttgcctttacattcacacctcccctagatcctgggacgggaggttggacagaaacctgctatgttagacagcttagagcagaacgtttgtgtggaacccaaaagctgggaagagaggaacctgcagggtttatttctgctgcctgtcagctctgagaccttgggagagtcactgtgcctctctgagcctccgtttcttatctggaaatgggaatggtcatgttgcgtggatggcaagtgcgatgatggtgctccgattctggctgctgtggcaaaaatcactaaataaggctgggggttctggggagaggagctgggcaggaatcgaatggcgtttgggccttggccctggcagaagcccctccatgtggctgtgctgggggtggggcctgtctctgagctgtctctgagatgcttgctcagcgccctctggcctgcgtgctccgactctgggatgtgtgttcacacagaccctgctcatctgctgctcgatggagagaggcccctgcagcggagacagcgccttccgccctcttaattggctatctttattacttgagttatttaagacggttcttggctcactgccgcctgtttgctgtcttgggggaggggaagagctactggtctaagtagatcttgtgaagttccccagcagacaggctcctctctgtatagggtcagcccatcttcccagggcccgttggcacccccgttttgctcctggcccactgtggcaataggcagaaggccatcttggggggtggtagtggaagatttagggaaagcttgttgcaaagtcacgaccagagagtctcggaggtctgggtgggacactggtgagaccctagggtgcccaaaacccagggattctggaaggtacccaagccagttcagggccagtcaagaaaggtttcctggaggtgacatcacctaggttgtatctggaaggttcagtaagagtggaagagaaggagagagggtgttccagatagagaggacagcgtgtacaagggcctggagttgagctgctgtgcagaacagtgtggagctgctcctggtgcccgggcttgagcctggcactgccagaacttggcctgtcctgtgcttgcttctgccctgtcttgtcccctcctccctcctcatgctcttcttggctctcattttctgtcttgctctcctttcctctccctctttcctttctttcttgttttgatctctactctttatggctggctgtctcactcccatcctgcttggggcagggctctgagggacatcctgtcccccatccctcagccagatgctgggccctggtgagtggctcttactgctggggccttgtgagcccatgagtgtgcatgtatgtacgtgtgtgtgtgtatacacgcatgtgagcacaggtctggagcctctggatttggagcccttaaggtcattgccctgcctgtggcgggccctgcagaccccttgtactatggggctgggggtagggtcttgacatcatggtggggggcaagggaggctgcctagtgagagagaagctgctggtttggagctcaatgctggccactggagaccctcagcctccccatcccccattatggtccagggcctaggattagacacaggtcaggaattggggctggggggaggcttggctgctccccttacctctccccgccccggcccccgatcgccctggctgtcccttctccctcacacctatgacttcctctcatcccctggatgccccagaggacttgaggtacccttcaagctcatctcatccatcctcctgcttccaggcaaaatcattcsctgacatcccaaccaagttagctatgccttctgtctttcaaagcgaccttcagccattctgtagtggtttctatttctctctcacccctatttgcatattcacgaccattttatagatgagaaaactgaggcccagcgaaggagagcagctaccttgaggtcacgcaacagagcaggggccggaacccaggtattttcaccctgtcccctccacaggactccccttaaacccttgagctcagggctccctctgggggctgctggcactttcaggaggggtttggaaaactcccagaggacagagcacttggagcagagaagcaactgccaaaggcatgactcggagcctgtacagtggggtccgcagagacagggccctgctccttgaccagacatctgggtccctggcgctgtggatgaagctccctccacctacaaaagagacatctgaggttgcccgtggggtttgtctccatgtcgcaaaaggcacttctccagcctctggcctggttttgaggtcttgggatgctgacactgatctgccttcccgatctgccagccctgtgcttggctgcaccatttctctgtgcctcgttttccttttgtatgggatgggatgggatgatgatacccacagggtgttggtgagcctgattcaggaaaggctgccctgtctccttatctctgggttaagccctggagctggaagtcttgagaactttgcctagaatgttggagttgggtgaaccgtagaggctgatctttcattccccataaagaccatgtttccagggctccttgtctgggcatgtggcctgacaaatagtactttgggatttgcacatgtttttatatggaaagacattttttttaagacagggtcttgctctgttgccctgcctggagtgctgttgaatagtcactgcttgctgcatccttcaactccttaggcacaagcaatcctcctgcctcagcctcccgaggagctaggacttcagacacacaccactacacccagctaatttttttttaaaaaaaataatttttgttgagataggggtctcgctatgttgccggggctggtcttgaactcctggcctcaagtgatcctcctgccttggcctcccaaagtactgggcttacagatgtgagccaccatggctggctgagtcttaatattacattgctgttggtttcacacttacctttaaataaaatattagcatttaaaacatcaggacttaaatttgccgggtgtggtggcacgagcctgtaatcccagctacttgggaggcagaggcaggagaatggcttgaacccgcaaggtggaggttgcagtgagccaagatcttgccactgcactccagcctaggcgacagaatgagamtccatctcaaaaaaaaaaaaaaaagaaataatataaaataaaacatcaggacttatctgacttggagactgatggccygaactcagcaagctactgctggcagagccagaattaacctgatgccaagttgagggacctccaacttgtaggttattccttttctgagccctaagacataattcaattgtggggaattaaaaagaaattgcttcatttgctcttgcttcatgtttcctgttggcccgtgatttgggccttctcttgggtrggaactctggctctgaggtgacactgcttggagttgtgttactgctctgagcctcagttctctcatctgtaaaatggggatgacaatcttagctgatgaggttgcgaggatttgatgttgcctgcagagtgctacgtgtgctgctggcccctcagctgttaccgctccctccctcctgccctggcctggctcccaccagcccccaggccccaatttgtacacataaaaatgtgaacaaatgccaaagtactatttgtcaggccacatccccagacaaggagctctggaaacatagtctttgtgggggaatgaaggatcagcctctatggttcacccaactccaacattctaggcaaagttctcaagccttccagctccagggcttaccccggagataaggagacagggcagcctttcctgggtcaggctcaccaacaccctgtggttctcatcatcccatcccatctcatacaaaaggaaaacgcggcacagtgagaactgcctgctccctcccgctttggctgaagactggccttttgtgttctgagcacttcctctccccggtagagccgcctgggcagccaggaggaggtcatgtcccctctcttctcgagcagactgtcagcacagggtgactgggaaggcaagacctggcattcaaggctgtgtccagtgcagggtgtcacctggagcctgtggctcctaggagggcctgatggaatgtggacatgaatgggggaatctttccctgtccccgcctccctggggatcatggactgtctcagcctccccgttgtgtggatttggaagcagcctcagggggtcacattgctggtctgaggtctcactatgaggtagggccaggatcaggattcgaacctgcctcttgcagactgttacccaaagtactctctgccacacatgcaagctcattctggcaggctgagataggggaattggaagacaggggttcaagccctgccctgcacccagcagcagcaaggcagccgttcctccttctgggcccctgtaggcgatgggtagatggtttctgtgttttcatagactgccttgcgaggccttgtgggtgaagggcccaatcccagaccttggcagaggagtgacgttgaaggctggcttggcattgtttttccagagttgacgtcagggcagctggtttagggtttcatctgtgagacaaaggctgctttgtagcttctgcccggtttaagtccaagcacatcaccccscaaggtgggaaacgaggtggaagggattgcagggcccaaacagagaagccttgggaggcttggcttgcgctcagcccctccaagaagggagccaagatctcataattctatcgccatcttgctcacttcccgagagcactctgtatgcccactgcagtgtttgaagccgcacacatgtgttctctggaacatcgcaccactccagcaaggtggctgtgggtatgtccattgtacagatgagaaaactttgagtcgtgccaggtgaaatgacttgttccttgtcaaagctagakagtggcagagtgggcatgtgacctcaggtctctttggcttccaagatcaccactgggttccaccactagagtctcgtgttgcacccagctttggaaagggaattctaaaagccaagataccctggaatcagactggagcagataaacctcatggcttttgggggggacttggagctttctcttgtcaggattcagagttgggtcactgctttgagcacgtgttgcgtatttgtatctgcatgtttaggtatttgcacgtgtacgtacaagttaaagaagggatttggatactggagggtctgtatcactggcaagtgattccagggaggccttgtgggcaggtgtaaagagtcatcccaggggacacctaggaccttctgctcttctttgccaggattaccctacttgatcatttattcttccatccgtctgtccgtccgtctgtccatccatccatccatccatccatccatccatccatccatccatccgtttgtccatcagtctgtccatccatccatccttttctgggccacggtgctcagtccctatgcttgggctttggggatgatgctgcatgaactgggagcttgcagaatctggggagcttgccaaggaactgttaaatcagggctggaagagtccttagagattggttagatattttctctcccttttgtcagagaggggcagtgacttgcccaaagttgcacggggcgagtggcggagctagggctcaaagtcaggtctgtaggtcccagccccaagtttctgcttctctgctgtgtcaacagacagctctcactcctggccggcagctcccttacctagctcttcctcctctgctgttttcatgggttcttggcttttcgggagttgctggcagcctctgttctgagagacttctagaggtgtctactgaaccagcatgcaggccccagactggggccaagcttggctatgctctgccctgagatgacaccctcccgcatctggaacagcaggttggctgagcccctgaggggagagactccaaggccctgtttactttaccctactggacactggcttcttttcctccaagggtctccagaggtcatctgtttcttcctcatcttggggctaggaccactgcaaatcctgcctgaagatcttactgcctaggaagcacattccagaaccctttctgagacgggccgtccagtgtccttgtggccttttccattgggaagtgcttcctggtgtctaaccatgatccctactgcttcatttccccctttgtttagcctttcacagaggaggaaagtggttggatatcaattgcctggtggttctcaaggcagcaccattaccttgctgcgtaccctcttcccacctacaatctcccttttctccacttcctgagagactgtgccttgactcagatacaagttgagacacaatcttcatgcagaaaagatctggctggtccctgtagtatcccacaagtttctgggagggaggcacattccttttctaggagtcagggagccctctgagctagaagtggcctgaatcccagggatcactctggtcccatctttcctgatggggaaactgaggcccagagaggttgagcaacatgtccacagccattcagccagcctgtccgagttgggtgtcctccttcatgtggcaatgctgtttctatggtttgggcagggggcttgataaaggtggccggtggcctctggcctggtggtccctgccgcagacagatgtcctggaagcagaacagccagccccatgtggccccagagggctccctggcctggaatcagtgctcctgcctgctggttccctgggttggcagattcctggcggtcctgggctgccctcagggccaagcagtggcatcttctccgctcccacccaccctgtggcttcctctctcccacagcctcccagcctcccttttggccctagaggtgccagggaggcccctcacctccaaggggagaggacaggaggcctgagtgtacaccagtaattaagttgccagggggacactagctcctgtggctggggcaagaaggggttaagcagtgttgcctgccagggctggactcccagctggtgtcccggcccctggggccaaccaggccatctggcctgacagataccacactgtgtcccatctgtcccaaggcaaaatcaccaggaggagactgcctactgcctttgagggcctgcaggggtgggcgtggcccctgctgtctgtccctgggggggccaggccagttgggaggggctccccactgggcaggctgtcctctggccaccctccctgcagggtctccctaggtgtgaggtgggggagtctcagtccctggtgtggtcggagcttccttgtgcagaaggtctagagaggtgcagggatgggctcaaggccacacagtaagtcagcacaggcagagctgggcttcccccgaggcctgctggtggttacgcccagtggctccagctcacaagctcattcatccagtcagtagcggttgagggcctacggtgtgctgggcacttggtcactctggataccagacagttccccagtcccagcatgggagagggaacccagagacagagcctctaaggggaagcatggtgcagctcagccaagcccggggccctggacgctgtagcagccctcccagtagcctccctcccagcyttcccagcagctggaggtggggcttgctcactaggaggagcaaaataatgttasgcactggtgtttatgatcttatggggtcttcaccatccagggaggtgtaggtactattgttattcccattttacagatgaggaaactgaggctcagagaggtaaagtcgctttagcagatcaccagctgcggagcggctgagttggacgcccatcccagctctgcctgacgtcaaagtgttttgggataagggacagggggtggctgcaagtggcctcccactttgccccaagccggcttcttctcgccatgctggcctggaccatctcctttttggctttttgctgagtccgggctgggaatcctgtggctggaggcccaaatctcagggggaagagagcccccgctgggttggagttgagaagagaggctgtgctggtgccggttcttttgcatagctggggctagtgaccctctgcatcccatgtgtggggtgctcggcagcatctgggcagcgcttgagggattcccctcggaggaccctccatccatctgagagccccaaggctctgccctccagtggcggctgggccaggccgttgggagcctccataatgctgttatgattatgtgaccctggatgagtcactgcaccttggtgagcctcactttccccatcagcagaatgagggtgaggagatgacaagctccaataaagatgccctccgaggggctttgcagtcatggaagggtccctgggaggctttgctccatttcattccccgtctcatcttaaggggactgacttctctctccagccccatgggtagttgggaggaacactcttgtttgtgtgttgtggggttgcctggtgctcagcctccacactccccagtggttcacatcaggtggaatgccagggcccgccatgatgacaggagcctgggattaagtaatgagtccatccccttgagctgtatttagtcactaattcttttggtgcgcgtgtttgcagtctaattacctgcctcagctgcgctggaacctgccccttcccagcyagtgaggaccatgacggctctgcacagacaggtgaccgttgccctgttacccatccttggttgcacaagccccacgtgtcttttgttagctgggtccttgtcactcttccctcctccctcctggagattgctctggaatgttctcctccccttaccagcggcatggcaggcagctcctagtctctggagttgcactgagccagccgctgcctgtgtgggaccttggacatatcacctcccacctctgagcttcagacttctcatttatgaatgacctggacttccccgtctgatgtcctaggatcctgtgttctgtgctttttttttttttttgccccacctgcagccwgtttgtgtttgcacatcctcattgaatccaggtggggtcattctcacccattttacaggtgaggagactgagccctagagaagtgacttggcttaaggccgcagagccttgctttcaacccaggtgtgctgactcttgcctggtgggctctgcctggctgccagcccctcattttttcaggctgcacatgataaggaaaatctgggctcccaggcagctggctccagggcggctgcgggtgagtaagtatgcgggagattaccctgaggtgccctacatttacctccagggcagcacagtcacttggaataaacagtggagagacccaaagtacatattaggtttccaaaatagccttgggagttgctgtttttctcaaagctgtaaacataaccctgggcctgggggcccccacactctcctgggcacagaccccctgggcctcctgcctcttgacctgagtgcccaaagacctgctgcccagaccccctgctggcttccacttaagcaagagccagcagacacgggatggggatggggtggagggtccatgggggcttggccaggcctaggcagaaagacaatgtcccagggatggagagccgtggacaccaactttcccatcatctgctccatgcaaggtaggcccaggcttcaaggtgcagagaagagagtagcagagttggcctggactgtggaggttgtttggggaaactgaggctggcagggaggggctggcagggtggccatatctaaggcgacagggctgcattggcctagattggatctcctagagaaggccctggagatgacacttactgggcctttttaatccagtgaatatttatggggcctcctatgtgccaggctctgtgctgggcactggagttgcagctgtgacccatagatgggcctgatcttgaaagagatgagggccgggcgcagtggctcacacctgtaatgccagcactttgggagtctgaggcgagaggatcgcttcagcccaggagtttgagaccaatctgggcaacatagtgagaccttgtctctacaaaaaaaaaaaaaaaaaaaaaaatagaaaaattagccaggtgtggtggcatgcacctataatcccagctacttgggaggctaaggcaggaggatcccttgagcctaggaggtcgagagagctgttgttgcacccctgtgctccagcctgggcacacagcgagatcttatctcaaaaaaaaaaaaaaagacagaaggagagagagaaaagaaagatgagttaagcagaggagaccagcaggggatcagtaacctcaataccaagtggcccagagcctttgtagtacagaatagtggcacttgaccctgaccaaggagtcgggtcagcctcctggagggggttataagctgggtcctgaagtcacattaggtaagggagagagagaggaaaaggacaaaggggaaggggtgtagaacctgttgggcagagaatgcagcccatgccttggaggtgtgatggagcttggcacaggggggctggaggtgttggggggatgctattcagccttactctaccctagcacgtggccttgttctccagggcttatcacccaccaggtgagacctctgtctacccttttggagaagaagtgtctggcccatttctcagatgagcctgatctcccaacccttgctccttggggaaggtagagggccactggtgaggaagaacagtatttatagcggagtcttcctgcacccaacggaggcaatcttttgactaatgaggaaactaaggcacaaaacattgttgctgcaggarctggagtaagggcccaggaccctgcttttccttggctccctgggcaactgggagcctgtggtagagaatgccagagagcgttctctcyaacacgtcacacatggctctttagaggggcacaaaagccttttctacatctgcacacttgatccagaaacccaatctgggtatcccagagggatacctggacacatatgcaaatgtgagggtacraaggtgttcacagtcttgtttagattgcaaggactctgcgctgacagtggaggacccatcaaaccagtggccctgcagccacctgctgtgtcacctgctcgggaggatgctgccgtatattgttaggtggaaaaaatgcatttgaaaaccacatatggtcgcatccygttgtcgttaaaaaccaatctcataagaagagaaaatctcataagaaaaagttgggaaggatatagagccgatgttaaccgtaattctctcagggagggggattcatttgggtgggttttacattggttttatctggcttacctgtttttttctttttctatttcttgtgtaatcattgtaaacactcatgcaatttaaagcaaggggaaaacgagcaggtatttttgtcttttaaaaatttaagtggttttgatgttttgagcaggtatacatgacatcattcaaaattaaaaagatacagaaggaggggaaattctgacacacactacaacatggatgaaccttgaggatattatgctaaatgaaatcagccaggctgggcgcggtggctcacacctgtcatctcaatactttgggaggccaaggtgggagaattgcttgagcccrggagttcgagacctgctggacagcatggtgaaaccccgtctctacaaaaaataatttttaaaaattaactgggcatggtggctcatgcctatagtcccagctgctccagaggctgaggcagggggattgcttgagcccaggaggtggaggtgcagtgagttgtgtgattgtaccactgcactccagcctgggcaacagagtgagacgctgtctcaaaaaaaaaaaaaaaaaaaaaaaaaaagaaataagagaaataagctattcacagaaggacagatactatctgattctatttatacaaagtacccagaagtcgaatccacagagacagaaagtagaagggtggttgccaggggctgcggggagaggggtacggggtactactgcttaacaggyacagttgcagttttgcaagatgaaagagttctggagatggatggaggtgatggttgcacagcagtgtgaatgcacttaatgccactttaaaaatggttaagatggtaaattctatgttatatggtttatttatttatttatttttgagacagggtcttgctctgtcacccaggctggagtgcagtggcgcgatcttggctcactgcagccttgaggtcctgggctcaagcaatcctcccacctcagcctcctgagtatctgggactataagcggtgccaccacacctggctaaattttttgtagagatggggtttcgccatgttgcccaggctggtctggaactcctgggctcaagtgatccacctgcccaaagtgctgggattacaggcgtgagccaacgtgcctggcctgttatgtgtattaagaaaagatacagaggggacagagtgacagttctaccccataatccccagccacccacgtcgctgctgaagggaaccaatgttttcagtgtgatggtggatgcttggtttcctttctcgtgcccctgggtacaaatgggcagtggcaacttggatggggccccttcactcatggacggaggaagatgccccctgtcccagggtgagcattcccttccatccctgcttgcctggcacaaggcagycagtgcccagaacttcccacacttcttgggttgaagggattgaggatctgaggctggaggagccagaggtcctgccccrgcgagagctccggaactcgcctcccctctctcagcaggaagagaatactcttaatccacttctgtgtccccagcacttggctcctgggtgagcacttgggaaatgtttgttgattctgtcctgggggaagaagatgaaatgtaagccggcagccagcctgagttgggctgtgggagatattctgggctgccgggcctgggtgtctccagaaacmcccaaygctcgctcatgaaggctctcttggtgccaggtcttgtgccaggcactgggatatggtgccgaattggatacaagggagatgggacgtcctcctgtgtgtcttgactgtcggtgtgttgccgagcattggtagcagagggggctggtttggcacccaggtaccctgcctcatccccggggccttggccagtctacacagaggaactgccctccagctgagttacccattttccatggcagggaggacagcagaaaggccgtgttccatgactaatcatagcttccatctattgagcatttactgggagctgggcactgtgctaagtgtgaaacgtgtgttgactcatttactacaacaacctggcaaggcaggttcttccgttagcccctgctcaaagctaggggacctggagcacaggcggtcaagtgcttggctcaaggcacacagctcagaagtgcagatcctctgcccctcctggcatcccagtctgggggggtcaggggtgggatctctgcagtcagtgcctgggggctggatgacaagctgcagcctccccgcaaccccacgatttccatagcgcagtggagccagaaagaaacagaccattttacagaccagagaaacaaggktgctgctctctcagaccctggagccagtgacagggaaggcggagaagggacgagagcctccgtttattcggagcctgtgtataccctccttttcacaaactgtagcagcctccagaggcaggggggatctttatgatgaccaaatggggaggcttagggattggaaatcacttgcccgggagcgtgtggttggtaccactgggatttgagccttgttccgtccagctccagagcttggtgcctttcttgctcaccacgtgccggccccagctcgttgccttggcagtggaggtggtggtgtgccgaggccttcctgcaccctgggttctctggcgctgagaaataagtgcatgggcaaagtggctttgtttccaggtcagtgactgtgaccccatgtgtacacatctgtgcatctgaccgtggcactgtaacccaggggcattttctaagtgatgtgctgggggtgtgggcagggagtggggcttatggagccgacgagacaccatcagaccatagagaggctgcccaggcttgggagccatatggacctggatttgaccttgaacaggtcatttcacctgagtgtgtatagtgggaatgataacatccggctcacagaactgtggtgagaattagagatggtgggtgtcgaatgattagcacctaatcagcattttacaataaatgcaaattcttcccttctcgtagaagagtggagtctgatgagagagacagggaagtgaaaattcacagcccctggatgccagtgctgaaggagtgggttcaggactgggaacatcagwatgggcatagtgacttattctggggaagtcatgaaaagctccctggaggaggtgatgaaggggtacccaagcctggaagaggctggcagtggtactccagaaacttcatggtggcctgcaatttgtgatgcagatttttcctcactgtgagatgctggttgagacaatttcctccttggagtggcctggttttttaggggtagggggagtgcccacgtgggtgtagtttctagacagaagcagtgggaggagggcactgccaagcatgctgcttgggattatgggtgtccacagagctgcagtttctccaaaggtgttttttgtttgtttttgagacagggtcacactctgtcacccaggatggagtgcagtggcccgatcctagctcactgcaaccttgaactactaggctcgagggatcctccaacctcagcctcccaagtagctaggactacaggtgcgtgccaccatgcctggctaatttttaaaattttttgtagggatgggatctcactatgttgttcaggctggtgttgaactcttggcttcaaatgatcctcctgcctcagcctcccaaagtgttgggattacagccgtgagccaccatgttcagcctctccaaagttgtgttcaataagcaataccaagtggcagtgatgctgggaacctgggcaaatatagacaggagrgaattggacaggtggctcagaaaacaactgaaacctcagattggcattggggcaggtgacccgggggttccctgggccccatgttgcccaaaagagccagcagctggcctgggtgaatacccttaaatgccttgtgtgtgttggaaggtgccatgagaccagctgggctctcctgccctggacccacctgctgccacagtggcccttgttaggacagacctcaaagggctgggcatgcccattagttcctggggtatgtctatggggtgtggacggygaaagcagggttttcagtgggttttgctgacgggggttctgtggcattagcatctggcttctttccttctgccaccctgtccccttgtactgccagccacccagccaggtgaaggcggcatctagctcattaccatgactatcaacaacatgactgttatgcagacagtggctctggggtcagatggccttgggttcaagtctgaccccctcacttacgatgtggtccaagagcattctcccagcctctccccacctctctgagcagctgtcattgggaggtcgtgaggatgagaatgacaccaatggcatgctcatggtagaccaggcactattctgggcacttttcatatgctattccatggaatgtgggcaaaacccctcggagctgggaggtattaccaaggcccagagagggtcatagcttgctcaaggtcacagaactgcaagatggatagctgggatttgatcccaggaccctctggctccagagtccctgctcccctctccactacacacactggttggaacgcaaggacagacgtctcagctggcttttgagcatttgtggtttgtcaggcggctttgtggtcagtgtaggatgcttgtccagggatcatggcagttgttttctggcttggctgggtgggcccttagaattcatccagtttgacatcattgcattactgatgggaaagtggtgccagaggaggggaagggacttgcccaagatcacggagccagctggggcagaggcaggactagcttcaggacttccagcacaaggctgctgcctcgttgcctgaaggggtgtgtggctggggggccggagcccagttaggggcttgccgttctttcccactcacctctcaagtcctstyrrstcaccacagagagcccagagaccagctagctgccctgcaaagggccccttggtcaccaggaaacaagtggggggaatgtcaggtgaggggaatgtcaggtgggggaatgtgatgaccccacacagctcatcccccctgcctggcgatgggactcactttcacctccttgctgggaaaactccttagcaactcgatttcagtgctgcctctctcagttgctcctgggtccccagagggccaggacaggttggagaagtgtccttgctgagggggcccagactttcacccacccatttgcccctccctcccccaggtgggtagagccagggtgacaccggtgaagagcatgggcatcatctgtcaagggcatctgtgtgcctcacttgagcctgctctcytgatccatccatgagccctacaaggtgggattgctatccccgttttacagaagtggagactgaggctcctagcttgaggtagrcaggccctcaggggatcacacagaggcagatgactttctcagctcacctgcccttccttctgcagaattgcctacaacctttgactctctaaggcctgcggggctcgtggcaagccctcaggaactgtttatggaatgaatgagtgaggggcaaacgaatgaatgcatgctcccacaccacgctgctgcttcttctgggagagggcacccagcgggtgtctgctgttgagtgcaggctgtcagagccctgatggcacccaggataactccggatggagttggtatccctgaggctgtcaccacttctggactccaaggaagggccctatccagggcgtgcaaataacactgcaaatgtcatgtcccgagggattttgggagatcctattatagatggggagactgaggcccagggcagagaagggacttgctcagggtcatgcagcaaattagcaacgcagccagggcatgaaccaggacctcctgcttcctagcccagtacccgctcttccacagggaacttccctatggatgtcagacccctctgcctctcccctgagcagccttgcgcagacctggcacgctgggatccctggaggaggctgccgtttctggttgaaagcagctctgtgtgtctgtgtgggtggcagtgttctgggggcacacttgattagtggcttctcaaacctggcccccatcctcagtgtacagcctgtgctccgtcctgctcaggccattactgcccgcctgtaatggaatcggctgccctggttaagtgttcacattaaattaatacctcctccgtggagacaatcagttggcatttaatttgtctttccttccgagagctggagagtacagctgggcagccgggctctgatgggcacgtctgcgagacagcctttccttgggatcaggggctccatggagatgggagccgggaggccacaagaggtggtgccaggtgtccccagggggtggggcttggggcaggcaggagggggcctctttcatgcgcaggggctagagcttattggctgtccattttcgggggagaagacgggcttgcagcgtgccatgtgggagagaaagtcaggaggcaaggcatccacacgtgcatcagtgctgagctgcccaggaggtgagccctgtgttagcagtggtggcgggatttccacattgtattcccagccctgccccactcccactcccttatcggattttctttctgccttaaatatgaattgtctgtggtattcgagggggatggtgtgcaaggaggaagttgactcggttgtggttttcaggttctctagaagggctcagaagaagcaagtggaggctgttgggggcacgcagccctgaccccaccggggagcctgctctggtcttcccaatccatcagcttctgcaaaactgcatttgcagaaagggctcccctggtctaccactgtgcctgcagcctcttcttccagctcagatattattttagagaagaacagctgattggggcccccaggcttggccctggctctgctgtgaggatgcctctgtgcatctgcaggtgggcaaacacaggagctagggcagcgcagagctgaggggcattggctgggccaaatctgtggtttgagcagccgggctccagcacagctccctggccacctgcatccagccctgctgcagtggggtgagctccccgaggccagggtggagctgagaaggtgccagccctccacccgccgggaaggaagctgctctctgcccccacctgccctctgccagaggccaggcccacgcttggcccagaatgaagtcttccactgagggctccagcccagcctcacctgagckcatttcccttcacctgagtgagtcggcctaggcgtgccggccgctcgccttcccgcaaggtgkgggccatttccacacctccctcccaactctggaggtgggaggcagccatgcgctgtgccgttgacgtggagctgctgaacacccatggtctgctggatgccagggtgcttttacccacaccatccccttcctgtagttctcacagccaccttcgaaagggggtggctggtttcccaactcacagaggggacaactgaggcccagagagggtaactgacttgctcaagatcacgcaactgggaagtgatggggcaggatttgaacccgtctcttgctgccctggtgtcttgggatgctcactccaggagccccaggttcgtccctggagggcttcattgttttgctgggcctgcacctactttcctcctgagcgggagcctcgagcctctttttctgactgcacaggaagtgaaaaatctgtgagtcagcccctctgctggtgacttcagcttgggtttccgcccctctgtagggcaggcttgtcggtccctttcctgcgggtctgtgtgtcatcttgagctgacgggagagggggaggcactggccctgagtggggtgggggtggggactggcatagaatctgcccaccccttttccccagaggccagcagagacttctcgtccctcacgtggttccagtggtggctcctcaggaatgcggagagaccacatctggctggggtggtgctgccacctctccctcctggccaccagcctcagagagtgcttgttctgctaagatggtggccgaggcccctgatctcagctgctttgtgcttttgtggagtcatttcctctccctgcactctttgttctgacatccctgcctcccctccctggcccagggctgtgggaagtgggaaagggaaggtttctccttctcctgcctgcttcctgccctggccatccctccccctggcctggcctggcctctcccaggagaggctctggagccgaatggatgaagctgagtgcaggggctatgctgggaatttgcctcctgtgagcccctgggctgggatgttcagtctaaggatgctctgggggaaaggagttctgtctggaggcgagggccatcagggcactgaggagtaagtgcagctttggatccatccatccatccatccatccaaccaatccatctatccatccaaccaatccatccatccatccatccatccaaccaatccattcgataaatgtctgactccttagcaagtgcccagccagtttgaggtgcagggaatacagtagcaagcacaggaatgatcatcataaccagctctctgggcctgcagaaggactggacccccgacctgagacccggctcctgtgcctgttttcccacctagaccagggaacttgcytcttgcttcctctttgccccatctctgtgcctgagacctcccgagatgagtgccagcccccggtggcggtggggaaggtggaagtggcggtgaccacacaatggagccatcactggccctggcgtcacgggactggctcctttgggcaagagctgtgtgccgtgggatcccacaaccatgccactggggaagaggagatcctggggcctccactgctttaagctgtggggcaaacaatggaagtggatgtgaggcttggggaagagatgacatttgagacaagcctgggagaatggctagggtttcaggaggctgaggaggagasaggaagaggggaaatgagttacctgacctctgagcctcatctgcaacatggggatgatccccaggggagggctcagcgggattttatagagggaagtatgagtgcctaatgtggtggataccaccgagaaggtaatcaataaatgtcccttctctcatccagcgctagaaaagagaaggatttggaagttttatgagctgttgggtcagggtgggcaggggcggctctcagtgattcaggccgtgtcagccgtggctggagttgtccataggccctgggtcttcattttcccacttgtaaagtggggacagggtagctttccagcccagtgcatgtgcagtatgatggaggggatctatggaaaggccctgcagagagcactgggatgtgtttgtcacctcattttctgccagtggcaggcctgtcaatattctggagtcttcaaaagaccagaaaggacccctccccagccaacagaacagctcctggactgctgagggagactcgaggaaaatggcctttgtgccccaaaagtgatctctttatgttcactccagccttccttcccctttcagccttaaagggcccgggcgtaggattctgtcagacctgggttcgaatccaggcgctgccacttcctaggcagtctttgggcaagtcgtttgctcagccatgggctggggctgggagaggggatggtgcaggctgaaaggaaacgatgtctgcaaaccgctgatccaaagtaggtgcacccgcctcttggtggcagacagcgcctggcctgtcccttcctgctgccctctttgtttctgttggtccctctgcctgaaacaccctccccactgaaaccttactcttgtgggcagacccagggaagagggagggttgtgcttgggaagctggtgttgaaatctctgtgccagcaacttggttcaccagttctcagttaagctgagtgctccctggctctgggtgggtgggcagggaatacaggtgtctggagtgccgtaagaaacacatcgcccacctggcccttcatgccagtcctcagaacgatccaaggacagagcttttctgcattgtcaacactggagctggcggagccaggttttctccaccaccgccgggagggatgtcagggcgggcgacaggctcttcagtcaagccagctgctgtccacatgcggggtctgtcctcaacctcctgggagcaggccagccggctgcctcccccgtctggctttggaaataaaaagcccgtgaaatcatttgtgcaagctcatcctgggggtgtggtatgtgcagtcaggaaacacgattgagatgtggggttgggagggtgcagaactcggggcaggaagggagaggtgaggtggaggggctgggttgtgtggtcttcagagcctggccactcagtgccatctgtagcccagcatcactggggagctgtctgccccmgccctcgcctgcggaaccagcttctgcatgttaataagatgcccaggtgattggtatgcacattctaggctgagacaygctgctttagagactggactagctttgagtcccagctccctgcttgctagctctgtgaccttagacaagttactttacctctttgaacctcagctccctcatctgcaagatgggcttagttagaaattctttccccaagagggttaataattcacattcaagccagtgatgtgtgtgtccaaggcagtgagccgggtgtgtggggcccagaacgtaccccccagttaatggttgctggtgctgttgctgttattgtgtctggaaagccaaagatctgggctcctgctgtcaccttgggtggatttggggcaagtctcattccctctctggtcctcgttttctccgtctgtacaagggttctattggcccctgcctcgccttcctcatgagatggttgctcaaaggagaagtgaggggtgctgggcctcattcccaagggcccctctggggaatggggagtgtcggggaggtgcccctgggtgcctgcgtccaagggaggagccatgccattctttattttttgtgcccttctttgctactcctgctcttgctgcaagatgtgttagcaggttcgctctagactccaggctgcagccagaggcttgccggggctcrcccttgcacctgccctgctcagcggctttggaattgagtcgccttccccrctctgagccgtgtggccaggagagatgattcagctcgggacctgtgctccagcctttaccccccagagaagccccagatgccctgtgctcctgggcagggatggggtggcctgggaactttccccccattgtgattcctgtccccaacatggggcctgctcttctcggtgagaggtggcctgggaccggactcctagccttgctcctgatatactgggtgatstgggcaaatggcttgaccactcggsttcagttgccccatctgtacaatgaggggaggttcagtgagatggtcctggctggattaggcccttaggttccctccctgccccctcttagctttctctgtgccctccagccctggaaggaatcccagccccttgccctccaggtccggrccygggagcccacgcagatctcagcctarcagctaatgctggggctgggaaaggctggagaaaagggggagagggaragagtgtgtgtcctccaggagccctggctgggctgtctcctgtgggagagaggaggaattttcctctgtgtgtgcaaacagtatccgttttctcttgtttccaaaagccggtgacgtaaccggctctccacccctccctcccctctggcctatttttagctggcccygacagcatcctaaaagggttccagactgccctgctccgaggccatgtagggagggwagcagtggggtgaggaaggaragaaactcctctgtctgtcccaggatggacagacatccgaggagggaaagaacctgcccccagcttcctccagggagggaggaactctgttggaggagctgggttagggcctttaggctttgacagttcctgggtctatgaggagctccgcaaggggattctgagcaaccagtctggagcgtccccacctgggtttcagtcctagttccacactatctcaccctggccttgggttcagcttgtgcctctgggccttgctttctgcacctggggataatgacggtgcctacgtcataggttgttacgaggattgaattaacttcatgtagaacagtgcctggtacaaagtaagtcccagtgaaggtggttctggaattggtaatatcatccagtcccagggaactgctcccaccccttcctgcagttaagggcgggggtccactgaaccctcctttgccttctcccctcccgcccrcgtttcctattcarcttcgggcagtactcgtgtcaaagtagtggtgtggaagcccttggaacaacagggcttggcacatagtaaacgctaaatcagtgggaactgtatttattgagttttgtttcaatgtaataaaacagccccacctgctgactcgctgtgtgtctttgggttagatgtttatttaacctctccgagcctcagtttccacttctgtaaaatggaatgataacacctacgtaggagagatctgtgttggtttgggtaggctgtcgggcatcgcaatgcttagcacaataaaagtttgtttcttgtgggtgcaaagaacagcctgagagtggagctggctgcagcctggctcctaaggactggctttgctactgcatcttgcagcaacaacaggagcagcagtgcttgcacagcactttacagtttgcatgcaggcagggtggtggtccctcccacctctgtcttcacgaagtgctgggctcataccttaacgtggcacttgtcaccaccacctgatactctggttatatgtcagcctggctgtcytctcacaccacctcccctaggctgggagctcccagagggcaggcagggatggatgccccaatgcaccttccttgcccagctcaagatagtccctgggtgggtgttggggttgtgtctgagggctggactggcacagggaactcaccttctgaccacctgttcctcttggcttttgcaggtgggaggaggagctcgccaagcgcatgaaccttcagaccatggtggacacgctgcaggaggtaagagccctccgatatcccgaccaggagaggcacgccagagagycatgtggccaaggggcacagtcttcatgcggcaaagccaggaaattcttgcacagcccctactctgttacctcctaccacctcagtctctcctttatggagccaagagatcccttccacttcctctgcttggaagctaggaatggaccagcacagtgttgcacaagagctctgatgcaggggttgagaagcctgggtccaggtcccggggtgcaagtcccagctgctgtatgacctgggaccagcgacccttctcacccgtcactgtctccccacctgaggcttggactaggtggtttgtaagcccccaagcaagaagggtgccctcggttggggctgaaggccttggagagggcaggtgggcacgtcgcaggtgggctcccagcctgagcaggctctctgtggtgggcatttgggaacattccccttgctgctctagctggaatctctgcattctgggctctgcaactcccccacctgcggtgtaacctgggcagcaaacttcatcttctcagcctctattttcctctctgacaagtgggagcaagagtagcaaccccatgagaaggcatgaaaagttcttccaaaaatgtctagaaattgcgttctgatactgaaagcatttgtcgtctaagacagttagagacagattaagataattgtcaatgcgtagaaggaaaaggttgaatatctccctttcttttataatgaaagggcttttttctttataaatttaacgggttcatcgtcaaatatgtggaaactatagaaaagcccaaaaataaaaattatttccagttcctccttccacagttgaaaaactggcgtgtgaccttccgatcttgtctgtgtggacacacacccacgctcttcagacgcatgttaggtcgacacacatgacattgtcatttttgaaagcagagatggcccaatactggcagtttcacacggattgatctcatatttttaacgtaataggattgcttgttaattaacctgctcttttaataccttccatggattttcccacgtaatagataacgctttgaaaagtgttttaagcagtcaacagtgttcagtgggaagtcaggctgggatgaggtccttggtgccccttccctggctgcaggtgcccagctggggtggacatcgggtgcctagggctctggactcaggtgtccagaccctcctatccccagaggacccggcccctctgaagcctccccatctccgtccccgcaggcagcacaggaggctgatgccatccaggaggagatgaatgagaagatcgagcggctcaaggccgagctggtggtgtttaaggggcttatgagtgacgtaagtgccgcccgccgcccctgggtgtcatgacctcccccacacccatcatgcaaaatgcttcattccctccgaggctccggggctcggcttctagttagaatcctggctggctgtgtttgaccatgaggatgacggatgcattggatgcatcggagaccaggcaccctcctccygccccctccccacttctgcttccctcggtctgagtagagatgcattaatctgccgcttaacctatcccgccctcccccgggctcccctgatggtctgtgtgtgtttgctcccactccttcccagctcrccttgatgaggrcaggcctcggtgtctgggcgtagcagggcgtctgkcaggttggsccaggtsccgtctggtctgtgcgggcctgagagactcgcaggcccagcggcctttggcagggttgctccatgaggtcaggaaaggccagtgcgcgtgtctttttgacaatctggggcccctctaagtatctgtgggtggggggagctgttggcagcaaagggctccttgctgctggggacccaggtctcctccccttcaaacagtgggcagtacagggggagaccccaccagaaggcagaaggggccagaacgtgggtgactgagcctggcatggctcctggtgtggagggacgtgaagctgggtgtggttggtagaagcctcccaggaccctagttggaggccactgggctccctctcacttgtgtccaaggggatcaaccctgtggtcctcagtgactcccactgccggccttgggaggcatccaggagagagagctgcctgtgtgggggacaggtggggtgtgccggtgggaaaagaagggctgtctttctccagcgggagttgtcttttttcttcgctctaacaaagtgaacacggaccctgtgtctgctgggaggatgccttccagcccttagggagagcagcacacacggcgtcacactggcccctgactcccaaggccccaaccccatcccaccctgaccagtgccgccgcagccctccactccacggaaaagcccaaggcaccctcggactctggaggcctccccgcaccacccctgctgacacctaggggtctccccacctctctgccaagccccccaggcttgctccatccctcgctcatgtaaaccctgctgtcctccctgcagcccatgacagacctggacacaaagatccaagaaaaggccatgaaggtggacatggacatctgccgccgaatcgatatcacggccaagctgtgcgatgtcgcacagcagcggaactcagaagacgtgtccaagatcttccaggtgactagggctgccctgctcaccagccaaccccccactctcccagagcagccctggcctccacccctgcccggccaacccgtttgcctccacatcccactcactccctccccttccccgagaggtagcactacctgaccctgtggcctccccaggaaaacgtagaatcaggcacccrtggactcataggctcgtctgactgcttcatcctatggctggggagaccgaggcccagagggtgatgtgctgtgctcacggaaggaagtggcagaaatcagtctcctgcccctccagggcttggttcaccagcccacactgtacccattgtcccgcttcctgccccttcctctgggtgccagaactgggcatcatcccyacggttggggaaccctggccaggttatggggagaagtgggggagctggcctgagctctggtagaggggcctcagagttcagaagaggagctgttggcctttgactatttttcattccaccccaaagaggctctcgatacccccccgacctaacgtgcaagtgtgggtgcccccragagacggcgatcaggttagcgccagtgaggctgtcttccagagagggcttggggggccagtccagccgaatgaggcacatgtcattctccgaaggctgcttcttgagtttcgggttgtggtttggcttttgcttgagcccagggcaatacggtgtgttgtcgctctgtgtgtgtgactttgacgtcgctgggccagatctgggcctccctggggccctctctccacctccatgccttcttgctgtccctctgccgggaagcaggggaggccaacgcagccttcgtttgctcgtggcttgtctgcttggagtggaagctttcggtgaaccttgggccgtctgtcctttgcctttgcatgtgagcaggagggctctggtcagcatggggccgtatagcctttgtcaggggttctccatctctctggctggctctgagatatcccaggcaactctgtgtcccggtctggcctgctcctctccccaaactgtggggctgcttctgtggtaaaagggcgagccgagccggcgcacccaccaggccgcccagggcagggaagagtccaggccgtctgtgtccccctgcatgtctcccacctcgcgcttcctgctaacgccgcctgcttcttagaggacctgcacctttcctggcactggccggccccagtcacgctcatcatcctgtgagatgccggctcccttcccarttcacccctaccytccatcctagccgagccccccagttaccttgattgcttcctttccggttcaggtggtccccaaaaagaaagagcgtaaggtggcttccgatgatgacatctctgagcaggacggggaggtgaaccggttctcggacgatgagrtcggctccatgaacatcaccgatgagatgaagcgcatgtttaaccagctgtgagtatcccsgtggcccgcacactctccgtttccccggattgcttgcacaggggcggtgaatgggaggcttgggctgagagtagcctgcagcactggaagaatttgaattcatttcctttttttttttgagacagggtctcactttgtcacccaggctggaggctggagtgcggcggcatggtcacagctcactgcagcctcaacctcttgggtttagggatcctttcatctcagcctcccaagtagttgggagcacaggcatgtgccaccatgcccagctaatttttaaatttttttgtagagacagggtctcactgtgttgcccaggctggtctcaaattcctgagctcaagcgatgcttctgccttggcctcccaaagtgctgggattacaggcgtgaaccactgcacacagccaagactcattttcaacatttgtaatttgggaaatttcatatgttcagcctctcttggaagctcgaggaggtcaggcattgctgagcctggggcacagttgacagggctggatggcagctgctgaatctggacaggcgcatactcttccattcgccagcatcctttatgttccctgtctgccattctcctgcctttccttcgaaagcttcctccaaaaaagcggtgggagaaggggtgttcttgcccatgagatacaggggctgggctgtcctctctctggacatgtctgtgtctgaggatgtcatgaacccagaaggggcaatggcagatgtggtcttatttgtaggctatttttttttttgagacagtctcactctgtcacccagactggagtatagcggccagatctcggctcactgcaacctctgcctcccgggttccagtgtttctcctgcctcagcctcccaagtagctggaatcacaggcatgcamcatgatgccyggctaatttttgcatgtttagtagaggcagggttttaccacgttggccaggctggtctcgaactcctgacctccagtgatctgcctacctctgcctcccaaagtgctgggattactggcatgagctacmattcctagcctgtgggccgttcttgagcagaccttaaccagacccacctgcactagtttcccttggtgggctggctgtgttgaccgcacggcttgcagaaatggctcctgatgttcgcttggagggggcttcacaaatgtcactttgctcactccagacgcccatcctaggagatggggtatcactccccttttgtagacagggaaactgagactctgagaggagaagggacttgggtaacaccactcagctagtatgtggctgagctgggattcagagccaggctgcctcccacgctagtacgctgtcagtaggaaacactgcttggggtggtggcagggtctgggctgggtatgatcagtggtgggcgagcctgctggygccagctcttagaagctgctatacccactccaggctcagtgatgtcatattagtaccttaaaatttgccattgcaggaaatcagcaaatgctaccaatcagagctctgggaggctctgccayctcccggaasccccccagagagggcatgctccttctagcagatgcctttgacatcatttgtttcaaaagcccagggcacgggctctcctaacctccctgcagagctctgaggctggctcagaattccatagtccagagctcactctgccyagccacttcattgtacaaatgagagaatggactcagaggggcacacagagccaggcccccaactcttggtccagtgctttgtcccccacgccatgcctggaagagaattctctcttctgtccctmttctaggctgacttttaaggtagacaggaggcagaggcagggttggaactgggtggggacaggaactcttttgcctgatacttcctggacctgccattcccttgaaacagaactgggatcggagctgtattttgggggtttgctatttaagggtgataaggagacccctagattcttgattcctcttttgataccccccatctcatattctcatcttttgctgcctgccaagaggggcttttttttttttttttttgagatggagccttgttctgttgcccaggctggagtgtggtggtgcgatctcagctcactgcagcttccacctcctgggttcargcaattctcctgcctcagtctccgaagtagctgagactacaggcacacaccaccacacccagctaatttttttttgtatttttttagtagagactgggttttaccgtgttgcccaggctagtctcaaactcctgtcctaaagtgatccgcccaccttggcctcccgaagtcctggaattacaggcatgagccactgcacctggccaataggggcttttggaaagaagcagtggttgggtctaggttttctgaacgttgccctgggcacttctgagccctaagacaggattgtatgtcccggagatcccaggctgggtccatgtggttaaattaaaggacttatctgaagaaattgttgtccctgcttttataaagtccccagggcattgttaagctgaccagcaatggagtgagctaaaaaggagacagatcagagtggaagccagggggccccatgggcaaaggctccagtgtgtagaaagagcattcagatccaagtcaggcgagactggctgcaggagtgggcgcctctgtgttgatagagctaaaktgggwtcagtatggaattcgatttagctggttgtaaagttacctaagttaaaacaaacaggcygggygcggtggctcacgcctgtaatcccagcactttgggaggccgaggcaggcggatcacgaggtcaggagatcgagaccrtcctggctaacacrgtgaaacgctgtctctactaaaaatacaaaaaattagcygggcgtggtggcgggcgcctgtagtcccagctacgcaggaggctgaggcaggagaatggcgtgaaccccagggggcggagcctgcagtgagccgagatcgcaccactgcactccagcctgggcgacagcgagactccgtctcaaacaaacaaacaaacaaacaaaamaacaacaacaacaacaaacaacgaaacctctgatcactttgatcaccccccacccccattctgcagttctgtgtgggccgccctgaccccaccccaggcggggccctgggcctttcccatggacrtctccaccagctgtgggcaggaccctagccaggctgcccctggccagatctgatgaagtgtttgaataatgcagccgtgttacagttgtgttttgttttgatccaagtcggttgtttgggcttcagaccaaggagaagagggggaacgtgtgggtctcccccgctggggccaaggctcctcctcagccccactccgcagatttgtgaagtggaggcctcttccgagtcccttctcttgcccgtctttctgtcctttccagcttcctgtccctcggctggggtttccttcagatcccagaygctgggaaggaagtgaagtcaggaattgagtgtgtgatgcagtgaccactggaccctggcggctccgggccacacggccctctccagcacccaccccctaccagctcaggaccctggactcggggagccacctatgggctcctgtgggaatggcttttggaggggagccggcccggcctgactccagggggcgctcgaggcagctttttaccagacggccttcttgggaccggcccagtccccaacccagtccattgggaacactcattgttgctctggaggatccaggaaggagttgagggagggcaggcaatggggagagccctgggatggcagcctggagacagggtccacattgtcctgtgctaccgatgcactgrgtcaagtgatttcactcctacagactcagccttccccttggaaataggggtatgttggatgagctgatctttaggtctcctccagttggggtaaccaakgcatcttgggaaccccttagtcccaggcaaacctgcctggttggtcaacctacttctagttctagccaatagggaggtcttgacatctcccaggctttgaattcaaatctcatttccagcatgtattggtctagaaggccactgaatccctctgagcctctgtttcctcacctgcaaawtgggaacgatagttatgcttacctcataggattgttttgagggtggaattgttttgagggcgttgcattttgctgcatgcttagtggctggtccagtgcccagcacctaatgggtgcttggggagtgtcttgatggggaggaaaaarctgtaggaaacagaaacattcggcattctagcctatttctgctacatgctagctgtgtggctttagacagttgagttatcctttctgagccaccatttcttcatctgtaaaataggtataataccaacctttccaaattgcagagaaratgatattatattgaacatctcactcaaactagaggctcaagaaatagctgttaaatgaatgaggaaaattgcaagattggacttggaggaaaatatctttagtcccaattaattaaagcctgacattamaaaaaaaatacacatttttaattgtacaagcaatacataaatacattctgcattttaaaagagttaaactccttttggataaggcgaatgtcccctttggcttactacccctgtctttcctgaggacagccttgaagctgtgtacctgctgggcagctgcccctttctgtcccctgtatgggtccctggagcctgccttctgttcagtcatgccctctggtgtcacccccacaggcgggagacstttgactttgacgacgactgtgacagcctgacgtgggargagaatgaagacacgctgctgctctgggaggatttcaccaactgcaatccgaccatcgacctgcagggcgaggtaagcccagcgcctggcttcccaaaggccaggactaggggtctgggggacaccgcctttcaatggtccctcatccctgttatttttctacagcccccaccacacagctaaactgtcccctttgggccaggcgcagtggctcatgcctgtaatcccagcactttgggaggcygaggtgggcggatcacctgaggttgggagttcgagaccagcctggccaatatggcgaaatctcatctctactaaaaatataaaaattagccaggcctggtggtgggcacctgtaatcccagctattcgggaggctgaggcaggagaatcgcttgaattcaggaggcagaggttgtagtgagccgagatcatacctctgcactccagcctgggtgacagagcgagactccgtctcaagaataaataaataaataaataaataaataaataaataaataaawaaaataaactgtcccgtttgttctatttccccagcaagaggaaaacttgggcaacttgatccatgagaccgaatccttcttcaagacgagagacaaggagtaccaggaaacgataggtcagatcgaggtgagggctcgggacgtggagcccactcgtgaggctctcctgaggtccacatggttgagatcctggygatcaaacacccatgtgtcatgggcaggggctggtagagtggggcaggcgcaggatcgggagtcaggaggcctcggggcgagtaatgtctttcttagggcctcagtttcctaatctgtcaaatgggggtggtgatccttgcctgcctcagagaattagaaagaatatatgtagctgagatgatcccataataaccacagagctgacattcgagtgatagtgagtgacacaaggtgctgagtatgcccggtatccttacctgtgccctatgcagtaggcaccgtgcaccccttttacagaggaggagatgaggctggaaaggaccaagtgacttgcccaaggccttgcggccaggaagcagcattgaagtataattctctctggctccagaggctgtgcatgtgatcacttctataaacgatagtyattgctattatgcaggagaaagggaagcccagctccttccctagaggaagtatcacttgatagaggacaagagtcagaaacatgaaaaagccttcaggatttttrtaatcrggtctggataaaggaacccaaagatgttgagttctcagaaccgggtggggtgcatcagagccaggctgctgctggggttgctaagcaaccattcccctttggccagaaggagttctaggggaagtggacccatgtgcagagagcagagggtgagggaggttgatgtcyggaggcagggtcctgatggcatggtgtccaatggtggccttgatggcaccatccctgaggaatccaggaggagaggttgccgaggcttctgycacgaggatgacttgccctcacccttattcctcattggttcctcccagctcgagctggccacagccaaaagtgacatgaaccgacacctgcacgagtacatggagatgtgcagcatgaagcgaggcctggacgtgcagatggagacctgccgccggctcatcaaaggctcygcagacaggtacccrcccatcctcccaggggattcagctatggcatccttggaggggaattcccaaggctgcaactcggccatgtgtcatgctcccaacctgtctctctgtccgtccatctgtccgtccgtccgtccatccatccatccatccatccatccagtgactattagcacacctatgtgccagatgccttacatatctaacctcatgcaagtcccaccaccaccctgccctttgttgattcaatagatacttgscaaaggcctgctctgtgcaagacggtggggccagtaagtatagcccctgccctcaaggagcttaagccccattttctgctgaaatggggagcagaggtggacagggcatgctcccatttgctcacaggaagtgatttcccttcctttcccatctgttagtctgttctcatggtgctataaagaattgcctgaggctgggcgtggtggctcacacctgtaatcccagcactttgggaggctgaggtgggaggattgcttgagcccaggagttcacagctagcttgggcaacatagcaagaccccgtctcaaaaaaaaagaaatgcctgagactgggtaatttataaaggaaagaggtttcgttgactcaccgttccacatggctgaggaggcctcaggaaacttatagtcatggcagaaggcacctcttcacagggcggcaggggagagaatgagtgcctagcaaaggggaaacccccccttataaaaccatcagatctcgtgagaactaactccctatcacaagaacaggatgggggaaaccgcccccacgattcaattatctctaactggtccctctcatgacacgtggggattatgggagctacaattccagatgcaatttgggtgggaacacagccaaaccatagcatcctcttccaacccagggcctgtccccaggagactgacaagtgtcaggcatggcacataaagcagagcccctgccttcaaagacacacagccttatcgggggacagccacgctgagaatgagctaatatgaggagaatgcctgccacacagcacaaatacgttgtcactgttttcctcgttttgctgcattactgtacgagagggagggacagctctgtgggggccagatctgtgtgcagggccgtagccttgcctttcagacctttaactcctcaaacccccagaacccagtgtggttatctccattatccagacagaagagcagaygctcaggcaggttaaacggtttgcccaagttcccccacccccagctcatccgagatagaatcagaactgcaccccagtgatgttaaccrtatcccgcatggcctccttttgagctctgagtcattcaggttttacttagcacctactatatgcccagacatgggttaggtgcttggagagtaacagccaaacttgatccacggtccagctcccaaggggctttcttcctagagaagccaacacagccagaccaagtaggggctggtgcagggggttacctcgtgagcttaaaggatcttaaggatagctgagtgaggcaggagctcaggaccaggcccctctgagagtagatcttatagaagtggcagctcagccttcccactccttgacccttcagaggcccagggctgctctctgaatttccccactctcttgtgcttctcaggaattcaccgtcccccagctccrtggccagcagcgactcaggaagtacagatgagatccaggatgagttcgagcgcgaggcggatgtggagcccatggtcagctgatgactgaggccctgcgagcctggtggtcttggtgatggggccctgccacctctcctcatggggccaggaaggcccctcggagtggggttcgaagccacaccacacagactttctctgccctcccttctctggaggcccygagggactgctgcttccttccttccttccacaccaccaacgggtgccccgtctccatcccccacccacccaaggaatggtgctgtcaatttctattgttctccacattacaaatgcagacttctgtgcggactttgcagtgttaactgtgccttctcccttaagctgagccactttgagctccaaagaattattcctagcaggtgtttttatacagaactctaagctgagggccgggccaaccggccgtggtgtaatgtggtttctgccgtccgtcccacctgctcctctgattggccatgggctatgccctcccttcctcctgagccagcccagactcggcctggagcttggggtgctctgccaacccccaggaaggagccgcttgcctctgtgagctttctaggcctgggtagggaccaccccaattttctcactccctgaaggagagaaaggtggaaggaagggaaggaggacacattttaattttttggggggatcgagtggcaaagttgaagggacaaggcactgtgaggggaaggcagagsctcactgtgtttaaactactatgcaaaaaacaaaacaaacaacaaaagcagcttgccttatatcattgtggaaggcaggacctctcctgggctcctggcttccccctggagctgggagagaggccggggttagggtgatctgtgtggcagcactgactgggtagtgtgggtttggccgaggttggtcatgaggcyggggttcccgcaaggcactggcctccctgaccgcttgctyccttccggacctctgggttcagggcgggggyggagggatccttgatttccctgataacttgatgttcttccctccctcgccagccaacaatagaggcttagagatctgtaatttctctgtgagaaagtctgaaggggccaggcctggtctctgctcccttctacccgccttgggttaggactgtccggcagttgcctgcttttggctgctggcaggagagaagcagggtgggctgctggcagtgcaggagctggagtgagggccatcctctttctgctcctcgacacacgcaagccgctctcagcagttccctcgactggccagtcggggtattgatctgagccagcatcccccaagacttgaatggcttgagtgggactgcrttgaagggcactgtgtggcccccttccaaatctcagcttggagccagctgagcaggctttgctttattattattttttaagcctactgcagtgggtctgttgccaattttaattttttattgtcccaggagctccctctagtggtcaaggtagcaaaatgtgcccaaggactagaacttgggtccctctgccttgcctggaggcagaaggagggggctctgggtttgactgggattgtggtccccaggggtccgtggcctttaaggctcttctctcttttctgtttccsccacctgtgttacagtcttaaaaatactgtacataaaagatatatgtagagagagagagagagcgtgagaatgtgttagtgactatgtgtgatgtaatttatcacgatttggtggccttcgtcatgagttttttcctttgttttcttttgctgggggcacctcccacgggtcccctgtggcagtctggctgtgacacttccatagtcagcatctcttgttagccaaacagttccctttgacaggtacttggagggacaatggttttggaagagagacggcccttctctctcctcactcacccttgttctaaaggttacagggttcaaacatacctgattcttgttgttattgttgttgaatttttattttaaccaaaggttatcagagccagttgggcttggacctcagctgctaaaaagattttccgtttcctcgagggcaggaaaacatccaccctcgtgggtctcctccgtccagggccgagggaggcattggayaatgtggtatgggagtttcgtgggcagcgtggaagccggccctgggttgttccccaaggtggtgggagggtgacagatatatctttagacttaagactgtaaggcagcagtgttagcatgggagtaactaaggttactgtggttatcggtgtccggcggtattatttttactttcctccttgtatacataggtcatttgtctttgaggactagggtactctagggagtttgaaaactgcaggagccagaaagagatcctggcctgagagtcccytcyggctggcttttaatatctgctctcctcttgggagtgaggacttggggcaggtgggtaggagagggaaagccagagtgtgatgggcctgcctcctgggctggttcctgggtccggcctgcctgcctgcctgcctgcctctccaccacatgcttttttcagttaatgtcagtgggccctgcttgtcccctcaccatgagcccacagcttgccaagaaagaccccaacgctcgctggggcagcaccagtcctagctgggacgaattggtccatcctytgtaaagctgtaaatrcttaattttgactttctatttctaagcccagtgtcatattgacactggtattttagaattttctcagatgggctctcctgcgctgccctctgtctcctgtttttgggggttttatacaaacagaggattggggagggataggaagactagcatccttttggctccctggttggttgtgaaatacacacacacacacacacacacacacacacactcgcactcctctgagactccgaacagagaaaaaaattattggcaaatcaacacatttttctttctcgtcttgagaaaatgtcttgaggtccctgaagggccaaatccatcgtggactaactctgtgggtagagctcagatgacctagggagaattaaaccacttamgcttggagtgggaggagagggggtggggtgggggagaatataagatgtaacttaagctaaatgtaatctatttataaagcaagagactctcatctatttttatgaaaggaagggttttttaatctagggtaggcagttgtggtagcccagcattttcctgtggacgagacatggtgcatgttgttgctggattgaatggaacccattcctgtccccyggcctcgtcttctgtcctcacttttggtcatccacacccatgagcagcttcagcagagtgtaggtcccacttcaccccattctcctctcctctgacccctcagctccttggaagtcttggggtggggatctgagggggtgggtgggctgcaggaaattcagaaatgtggtgggtgggggaagggacaaggcgcattagggagggaacaagctgggctctggggataggctctgattaattagttactctgactctggtctgccgagatccatttccaacccagttgcgttgggagagggttgggaggcagcagagcatgggtracagtgggagcacacgacttccttggagcctgggcctttgcgggtcccaggtggtcaggcagctggagcaraagtggaaatggcttaagatgctcatagcccagccccggctgtgtctactccaggccaagcctgggctgcagtccttgctatgttccccccagggccctgrggggagggatcagggtgctgggggtttcctaggacaggggtcttcccccttgagacaccaagctctggctctagaagagctctctcctggagtggggagtctggaggggactgggtgggtgcaggtaaagccagattctctctggaagggaattttctakgaatggatgatttccaggctcagggtgggctgtgtgttagttctgagcaaatccctcaccaagacccttccctcccaagccctcaaagaaatgaggcaaagcccttccctgcaagaccccttgtggaygtttttgcatctacctgatttttagccccacccagggagactttataccccatgatcctgccccaccgttgctgttgtctgccagctgggtctagcatcacagggaagggggggatttatactcayggaaagactactgatcctaccggaaaccaacctgtttactgtactgttgtaaatatcatgccctttatatcctgtatattggcttcttttaaataaagtgaaatgtcttagaactgatggtgcttttttttgtttttgtttttaaacagaagatgaatctggtgttgggggaggggtaggaggacggaaggccacagaaaccctcaaactcattagttaattagccataaaataggggatttcatatcacctgttacatttgtagctcacaataaaagctttggaagatgacaaagcaggaatcattacacacattttactgaaggggaagagaggacatgagacatcacaggctcagtaactggcttggcctggtttggaactgatgtccttttaaccacaaagcccccatttttccaggctctccaacgtgcccacaggaggtcaccttcccaggctctggatttgacagtaaccaatgttctagtttttcttgtcaatgggcatgttcagggcaacattgcccaaatgtgaactgagcccacctgtctagggttttctccaaaggtgaagacaaatagccgccaccaattccaatttgctttttgccattcctaatacttggcayttaggtaatctccctctcctactcttcatttaaatgtttacattctcccaaagtacctcaaatggtgtaatctggagaaaaataagtggcttaagatcacgggggctttgtgagttgggtactattacttccgttttacagatgaggaaactgaggcccggaaaggatatgtagtctgcctagtgccctgcttgaggaaccaaaatcagcatgggaactgactcctaagcaggtgcgcggttcatgctgctggaagaaatataaacaaattagaacagagagtaaggaaacgtaacattactttaggaatagattgggtccctgagacctcgtcatcagagaagacttcagaatccaagttttaaatagcattctagtgtttaccaagcacacaacattttgcaaagaaagctraawtttttacttgggggtaaaaggctcaggaacaactggttttgcggccaaaggctttaaatgaaaagctaagcgttggccagctcaggttttatcttgcattgatcgtaatctgcaaggaagctaagaagctggccggccccgcgcctggagggtaggtggagagcggctgggtcctggccaagaagctggaaggcaggctcattccaggggccgcagcccccgggaagaagcagggggctggccgcgctgtggccctgcggggtcgaggagtctggtagcggacaggtttccagccttgtacaagccaccggcagcccgagagaagtcagtcggactcccaycgaacccggggcscacgccagagggccggrcgcagcgagtccttctgccccgcttcagcacgtgtcccatttcggttatctcattggctctattcagcccctctctgctccgctttggaaggctgccgcaggaccgccccgctgattggttcagaagctttggtgtgtcactctgactggtcgacagagttcacgccctctctcccgggtcataccataaagagaggaggggaaaacgcatgcatttcaggacttcgctttcgggttcccttgtcctgtgttgtgtaatgcccccgttatggcactagaaatattttttattagccgaagctaaatatagtgggactttggctgatcccgagctcggaggacagccggggtgatccgtttccccccgaggatcgaggtggtgcgctctggacggggttgtgcattctcgccgcgcccgggcggacgatccagcgaacagccccgcttctarccmgagatgctgctgccggcgcccgcgctccgccgcgccctgctgtcccgcccctggaccggggccgggtgagtgagcacggggcccggggcggcccgagcgcgcgcctggggcccgggagcctgagagtcactgggcgtcccccgcgccgcactccctccctgccggacccccaagctgcctcggtcaacgccgggttcctcaggggctcccctccgwcccccacccaggcctttctcccactgagatcccttagcctcctccctcaggtagtcaccttcctttagcgaggggacccctcttcccgaatcctgcgaccgagtagggtgcctcggtggccctgccggttcccacgctcggaaagtagcctctgtagtcactcacctcactcctaatactggatcttcgcaatttgctggcttcccctgaggggcccttctatttttagcacaccacacatctcacttccccaccctcgtctcacgttcagtgtccccatcccgccccggattccccgagtcctctccttctaccaggatttctacctctctcttttccgctccccacacaccccgccgcccgtttttttttttttttttcaagttaaatgttggacagaaaaaaggattcctttcttcttgtaggtggaataatcatatttatagagtgcttataatgaaccaaatgctggccgggca

SEQ ID NO: 9992 - DNA, 50326 bp, Homo sapiens
  misc_feature (29886)..(29886): n is a, c, g, or t
  misc_feature (33489)..(33489): n is a, c, g, or t
aagggtcagtttcctcatctgtagaaggaaataatagtgctatttacatcacagagttatgaagagtacatgagaggatacgtatcaaatatttagcatagcacgtagcacaaaatacagatacagttcattcagtacttactggtggcatcatcatcaccatcttcatccttgcccctcattctggagacagttggggttatcttggtacgtttctttctgttggttttctgtgcagtttgttgtagttgagatcactctgtatgtgcaactttgctaccatgttttcatttcacattatatcagatgctttccctcatgccattaactctttatagacatgatttttagcagctccataatagtccatcatgtgaatgtaacataatttattgaaccatttccctgatgtttagacatacagattatttctaggcttttgctgttataaataattctgcagtatacaccttgcatacatctgggtccccatctctgattatgtccccaatatggattcctagaaatggaattattaagtcagatgggaggaatgtttttaagattattgatggatgttgtcaaattactttcctgaaaagtacagtcaatccatggcagatttaatgagtaatcrcacggcgatgcagtttggagcagatcgcctgtccctcccgttaagggtagaggagagggctcctcgagtctcttcccagccctgagaggtggcagagagcccactgtccctgctgccttccctggggcacttcaccggcagcactggtgacagtccctgcgtcaggcaggaggacattcccaggggagctaaggcacgtggtttctcaggccctgtgtttccatctgaccccttggtgaactctgatttggacttcccccctggctcagcacatcctacagggtcactcacctgtgccatcagttcccagcctgaagggcactaggtgagtgggcgaccccaggcagaggaggggattcaggagaccacaccttgttctcctgtgttcattaatgatgtccctggctattctctggcctgaatgatcatttcactaatttattttttttttaatattattattttttgagacagggtctcactttgtcacccaggctagagtgcagcggcacaagcacagctcactgcagcctcgacctcctgggctcaagcgatcctctcatctcagccccccaaatagctgggactacaggtgtgtgctaccacacccggctaattattttgtatattttgtagagacagggttttgctatgttgcccaggatggtctcgaactcctgagctcaagcaatccacctacctcagcctcccaaagtgctaggattacaggygtaagccaccacactagcccagttcactaatttatggcatatgtgtatagtaaagttacacaaagcttttttacatatattttgcccccacgctaactggagggtagtccatccatccaataatgatttattgttgagcctcctgctctgagccaaggcagtgcccgggtactaggagaggcccctggcactcacggagcttctcggctgtgccctttccttccttcggaggtgagagctgcccaggcagaccaaggctgggagagtggtgatgcttgctgtcttttccccaggtctggtctctgatccagctggcgcgcagatacctgcagaagggctacaccacgctgctgttccrggagggggatttctactgctcctacttcctgtggttcgagaatgacatggtaggtgaggctgagtccctgggccaggacgggccacacacacttcccgctctgtaactcttggattcctttcttctgaattgttgtctgtctgtctcatcttctcttcttgttgctggtaagcccagcaggttgggagccagagttcagaggtcacattttcacatgggcgtttaactgctttgtgatccctctgcccagctgtctggcaaactcttgccattgtccacgtggcatccaggcacacatgtgagcagaaaggcacatgccccactgtgagaaatgcgactcagaccacacactttgtcgctagtgcttccatgtcgccagcgtcacatgccaagtgtggcacatggtcatccctgtggcataggcccctgaactcaagagcataggcccctgcttgaagcagtgagccaggctgcctgaggagacactggtggtgtggctcggggccctggcctccaggccctgcactgcttcttctgggcctcactgttactgcagagtagggtccagtggggggarcttactatcattgtgtctccatccatacaacggggtcagggatccctgccccagccactgcacagggctgtgaggggtgcagtggctgggactcctctcctcctgtctctccctcctctctgtcttttccctttcttcgctttcctcctgtttctcttttatttgcatctcgcttgtcaccataagtggttgttccagctctcaggagtggttgttccagctctcaggagtgttcctcctccctcgcagcccttggtctctgggtccctgcactcctgtgccttcccctgcccccaccctgcactctttgttcactgagggtgacagccatccctttccatagggcagggcggttactggggctctccaccactgttctctcagttaccccctcacagccctgtaaagtggctggggcagggattcctgaccccgttgtacggatggagacacaatgatccggagatcagacgccatggccagggccaccgaggctgtaagtgaggaagccggagcccaagctctgctcccccggsctgcaggctcccagctttcctcygtgccctcagaagtgcccaggacgtgtgtacaacagaagtgctagaaaattcctgtgacctttaccttcacttctagggagggacaggagtctgtgtgcttgggtggccccgtggggtgataaagtgaggcagagctgtgggctggagaggccaggtttgaatgccagccacacagcccagccggtgccgtgggggcagccctgcacactagggagtccactccccctgcagggcaggccacggtgcccaggcaagcatcagctaagtgccatgttcatgcctggcacacacggcacgtccagcagatcttaattcccttccccaccttatcccaccctgggaattcccaattctttcagagcagaggcttgggccttttgtgaatgctctgctcttcaagacctgtatgacagccctgcagggtgccctcctgagcgtgtgtttgtggcctgtacaggtccaggtattgacggtaatgagagctaccctgccggcccttgaagctttgtatactttttctctaatgttcataaggtgactgttgtcattctgacttcaaagatgaaaaaacaaggtccaggcattttcccaagcacccagcgcacatgacagagccaagccaggccgcaagcccggtgcgtctgactcaggcccttgcactacccccacacccactgcctccctgtcctccctcctcaggggtacaaactccagatgatcgaggtgcccgtcctctccgacgactcagtgcctatcggcatgctgggaggagactactacaggtgacgctgcgttgggagccactggggacagatgcccccatttgggtgataagtgctcgcctctgccgggagcagcttctgcttcagcagtgccctacctcagacccagaaatccacgctgggaacaccttcccggctggccctgtgtgcagcgagggaggacgggtgtggagggtacatctgtgttcctaccaccttcctgctggcatggtcttggcagcacggggaacgtctgtgcccggcccagaacatccccactgctacctcgtagccaggatgccactgttaggtcagtgaggaaccggagcggttgtcaaggcccacatgcaggggcctagtgagatgaccgagggcatgggcatttgcttgcgagggcccagagaggcctctggcgctggaggagtgccacagcctcactcctgaatcccatcctccccttcctccccaggaagctcctgcgctactacagcaagaaccgcccaaccgaggctgtcaggtgctackagctgctggccctgcacctgtctgtcatccccactgacctgctggtgcagcaggccggccagctggccyggcgcctctgggaggcctcccgtatccccctgctctaggccaaggtggccgcagtctgcctttgcatcctgtcctccagccacccttgcttgccactgttccccatgacgagagcctcctgtctgcagtggccatcctgaggatagggcagagtgcccagggtggccccagggcttctaaaaccccacctagaccaccctccatgtcaggtactgagcaaggccccagatccttctctctggaggaagagggaagcccaggggtcctgtttgtaaaacaacggtggcaacagctcctcttmcagagctgyctctgcctttatcctgggagatggggaggaagccccatctctgctgttcccygcgtggaggaagcccacccagcaagctctctcctaccccaggtaaaaggtgctcctttgcctgggtttgaattccagcgctgccacttcctctctgcacctcctggcaagtttcttctattccccacrtttaaagcgatggcacctccrtcccagggtggtgtgaggattacccagtgtggtaggtgctcaataaatgttggtcattgttatcactgaagcccaacatgctagtgcttctagacccttctgtcagtgctgataagcccttgctaagtcccagccccttcatgcttggctggcgtctgccctagggctggggttctcaagcccctggccctggcccagagatttggattcccttggcggcygtggagcccagsctttgatgtctttcaaagcttctgtggtgcgccctggattgagaaccaccacccgaggggtacagcccctctcttccaaccgagaagttcctgtcccagaatggacccagggacaagagaccctgagagccctgggactgggagtgtctgctcctctgaggccaggaggccggtgctgggccagagaggacggcgtggcgaaagtcagcgtccactgcagcacaggatcagatggccgtgtgctgtgcrtgcaggagcctcgccttctgtgtcttyagtcttgagccaaaatttgctcaaagactgatctcttccttgcagggaacagctttggggctgggggaactagaacccacatgttggtctaaaccctgagaaggtggcagtgaggaagtatcccctcaggtgactggatctgtgttcctccttaacatcatctgatggaatggcaatgaaaagcrtggattgtggaaaatacagaaaaacataaaggaaaaaactccaatccycygagcccaccactgttcaggacccctgcttttgtcacctactatttccctttagtttttagcagcggctggatgtgatatgtctagtttaaccagtccccttgatctttctatataataaataacacaggagtgaacatcctgaatcagatcttagcagagatgctcacatgcggggtaactgtccatggtgtgtggaggggtcctcggaaccccctcttaggatcatctccacatactctcccagttctgagattcgttaccaatagcaggtttccgtcacactgcgatatcagagcagtgcaggaactctccgctccaaggggttttttcctcctaggggaacactctgctaagtaatgggcagagaacaaaggggctcctaattcaaggcaggcctaagggagggtcagaaagaactttagctggaggtatttacagatgtgacctcraatccttggggattcttggaaaatgggcaaggtgccaaaagaggagaactggccaggccttcaaaactaaaayaccagagaattacagacagcgaacttgcccctaagccctcgttgwgggtktgtgtttgagcatttaggagaggactccagtgctcctcagcgacagacacagcygcctctgcggtgtctgaaggccctggtcgtggtgacgctagatggccgccctgggcgcctcctgtgggcgtagaggcatcaccactctgcactggcagactcagcatggagttggagcagagtctgacacgagcacttgccatcccaggcgtttcagttctgactgagaaggtagatgcacaggggaggagagggccctttyragctccrctctgcctccaccactcattccctaaccccgcagcctcagcgccctcayctgtaaaatggggagttttgcctacagggttcagcacaatgccagcctgacataggaaccccagtggattgtcagttttgccattatcccctgcatcctggaggtgacaccgcctggttaataggcaacactcccracggcccagcacagccccaggrcagcaggaggctggcctgtggccaagaatgcatggtggagggggcctggagggggactgcagctcctcctcttcctgcttcctccctgctccaccccgtgcctagggcagcacaaaagccaatcgctagcaaactcsctgcctagcaaggcccagcctggggcagaaatggctgcaagtggccgaggtctctgcaaggctgtggccgcctctcccttcccggcgtggagacgagataacayggaagccaggggaggtctgaagcctgagtatgatgcggtggtgataggagcaggtaaagtggtaaagcaggccgggccagagctgaggggcgggaagrcagccctgctcagagcttggtggggagggggagggggagccaagccccactgctctctcctctggcataacccagccagaagtttatacsctagcaggggctgcaatggaaagcccttccatctggcaggcaggcacctgggattccggtgctggctctkctgtgtggcctggggcaaatgcttgccttctctgggcttggatcttcccatggagaatgacaggaagactaggtgagctcaggggtttccctatatctcttgcaaagtgacctagtttccaccacattctcagcctatggtttgtaagggttggaaagagccctgggccaacagacaagtgaaatccagcaccccgccccctcagtgccctgagttctggtcaccactaccttaccactgaggccacccctcgtcacaagaaactgcagtcatttcataaaggccagttaggataaaacagaactgagtcccagagttcctactgcgtgtctgcagagggagatggaccccattgccttgcagctctgggacatttggggatctgcagtgatctgccacactttgccaacccctgggctcagagtatcacagtctactgggtgctaggggaagaggcaggcccaggaccaggtggtctttccttagtgccttcctttcacacttgcagagggccccaaatgcatgattgccaactgggtctatacagagataatgacgggaccgaaagcagacggcactcaacatgcagctttgagggcatgccttcattttcatatgtactagagcagttgcgagctggtagatactcaacactcacctctccagggaaaaatgtgtgatgtatgtgtgtgtgtacatgtatatatatgtatatatacacacatatatgtgtatatatatgtatatgtgttacrtacatatatatacacatatacacatgcttattttaartattgaaataaaagatacactgcacacaattttacaaataaagatacaatactctcaatttaaatgcagtctacccgagtgattcttaccaaaggctttctttgatttttgccaaactcagtagccaacctatagttgcaaatgacaaatgagggtagctccaaagagaacggtgctccatattttctstaaagagtaggatgatcgtgaaacaaatgaaacaacaaagatttatgtcccaaccttactcctttattttttaaaatttatttttattttatttatttattcatttattgagatggagtcttgctctgttgcccaggctggagtgcagcggygcaatctcggctcactgcaacctccgcctcctgggttcaagcgattctcttgcctcagcctcccgagtagctgggactacaggcgcccaccaccacgccyggctaatttttgtatttttagtagagacggggtttcaccatgttggcgaggctgatctcaaactcctggccttgtgwtccacctgcctcagcctcccaaagggctgggattacaggtgtgagccactgcgcccggcctccttctttaaatgacaggaatgatgttactcaaataagataatattgttctaatactagaatatttccttcaatttttgtgctatttattcatgctataacagctaacactgttaggtttaatctgcattattagcattttcccatcactttcttaagcctgaccacaaaaaataaattcagcccttctgtgtaatatttgctgatgacagtggtgtaaatactcccaccatagccttttctgttaccaagatgaggttgctcaatgtgatttaggagagatacccagtagcacatcattgtatagtgtgtccaccatgcagatatgtacatagaggccagtgactgccagggcatgggcaacagtcaaatgtagtaaaacaaataggaggtagygtgttttgagtatttattacctttgtttttaatttatttaattgtaagcttatataatttagtttatatcaatggctgtttgacagccggctcacaaactccccgggctggtgggagccatctccagcacctcacttagcctcagagaagccccctgcctccttccgtgctcagccacagctcaccctgctgtctcctaatggggaaggttgactttaggtcaccagctgccttggtgacttgcctacaagtgcgagtgagtctcagtgtgtgagcttttccttgacatgatttctttagttgctaaacataccayaaagcctggtttaaaggcatcttgggcctcagtgaggaacagaacggcatcttctgagacaagggttacctctgagtccctgaaggcacactggcacctggccgccaccttgaagatgaatctcatttagtcatttgactaaatgtgcctgagagtgactgagggggcttgttaaaatggagattcctggccccatacctggtgacgagcattctgagggcgggagrtgtctcccagaggtcagcacatccacccaaccaacactgcctgatgcaggcagctgcagagcccacgcccagagcagctcctcaagggcccaggcrcctgctatggggcccctgaggcaggtctggggattagcagagcccrcagctgaagtcctcttcaagggaacagaggtgtcaccagaagccaaggagggctcagccaggacttgagggtggkcactgggagsgggtcttgtgctttggatccttgaccttactcatttgaggtctgccatgattgaactggacccagttgcctggaagactatgagttttccaagatcgatcatcagcaccaattaaaagacaaatagctcccatttatctcatccttgccacactgcagggtccctggcaccctctgttccccatgtgaagaaactcaaggctcagggcagctgatgactctctgaggtcatgccctggcaaatagcagaggctgggctgagcccaggactgtctgcctttagtttgctgcatgtctttgagagacagattccatctgttcatgagtcccactggcggattgtttaaactttcttatgaacattttcaaaagcccatacaaataaagagtatgtcaaccagcactttttaagatgaactgtaaccaactagcttctcacatgcttctcatatggyaagagttaattttagctcatgaaacttttggttctgtgaaacacctgctgaacagactcctgggaagggggtctgtgggagtcgacatttatacaacctyccaggtgattctgagcttatcagagctggaraggcacttgctacccaggggcttggtgtggaacgtgagatgccaaagccaaattcaggcctctcagctsaaggcaccctgaagcacagctagtcactccagcacatgttgaagctgtgcatgtttacttcatgttgaactgttcatgttttatttttggaacactggggattggcaaaaaaaaaaaaaacccatgtgaataaagccttctagggcaccactgtgccgattgtgaaccacacrtggacaaaacaagccgcgcttgayagcaactacctacatgaccagcactcccctggatgctgatgctgccatgcgagacgggacgttggcgcascagcatgccagccacccattgcttctcctgcttgccaactcaaccgtgctgctccctcagacaccatcacttgcgyctcccaagcaatggaagccctggcgatgctctcatgagcccctcactccagcagagcccctgrccaagccaggggagcaggacttttccagccaaggcaagaaccagggttttctgactccttgaagatctgrtgtttcatggagttgaactagatgctgttccaacatctgagtgcgggaaggggaggggagggtcaccaaggatcttcatggcatggggacgggcagyggggagcacattcctcaaggactstctgtctgcccrcccgctgaccagtgatgttttccttccctgtcccgttttgttgcaggacacaacggactggtggctgtgagtacctccccacttgatcccacttcactggccctgggcgtgtggctctcagcagcctgggaaggagtgtgaagaagcaggtgggataagggccttgagagagaaggaaaaggcagcctagtcgatgctctctgctctcmagtgctgactgggggctgggtcgaatgctcatctgcagccagctgwggacatcacaggctcctttcctccccttcccctaatggggaaaggtggtttccccatggcctgtgagggagtcagggagcttccagaaacaagctgacaaggtgrggaagcatgtaaccaacayagcatgagagcaggtgggaaccaggggattgggcacctggggcggggtgggggcccttgactccagatcataggcagcccttgtgtctagagccctgtgttcccagccaggtccaggccaggtaccaccttggagtacatagctgctatgtggccaaagtgtgccctggagacrttgaggagctcagtctagcagaagggcctgtgccctgtccccaacacaactgacttcaagatcccaaactgagctggatatcccagagctatccttagcttatgcttctgtaacctgagtccagatacctccaggaggccacagaaggcattcaaggccacaaaacaaatgyggaacatcttcttgaagcagcagcagctctagaacatcaatatagggggaaacygtggctgtgctaacggactgatgttaaaccttratactttgcctgatgtctaagttttacttgaacattttacgtgsggcattttgtaactcaatggatcagtaatttaaaacatttattttattttattttattttaattttttttgagrcggagttttgctcttgtcacccaggctggagtgcaatggcatgatctcggctcgctgcaacctctacttcccgggttcaagcaattctcctgcctcaatctcctgagtagctgggattgcaggcagccgccatcatgcctggctaayttttgtatttttagtagagacggggtttcgccatgttggccaggctgatctcgaactcctgatctcaggtgacccgcctgcctcagcctctgaaagtgctgagattacaggcgtgaaccaccacgcccggcctgattttatattaatataaacaaagattcatctcccagctctgccactttgtgaaggttaaggtgtcacttagcctctccragtcacrgtaaaatggaacaatggcacctgccctcacagagctgctgtgaaggtaatagatcatttgctgctaggacctggcacatgcagccttgcccaaatggtggctgttattactggaagtttccaggccaaggaaggctggcatccacagcccttcacccaaagcccaccaggaacacacttgtagttagtctagtttggtttcttgctctttgcagcgagggaactcacatcaggggaacctcgggttgcctcagtaggaaggtgttagaaagaacctagcacaggatttgagctttggtgatttgagggaaggcctacgaaaataggggttgccacagattagatactgtcaggaaggagggacagccctgcaactgggcagctcaagaaatctgatctgtagggaggagagacragtgtgcagagagcagtaattgataaagargtvgcagtcactcatttcagccaagaggggtgttcggtattttctggatggcacagagacattgcttttgtttgtgcttgcctcattttatcatagtctcatagaaaccttatttgaggttgtcaatctgtgagatcgttcctgtgtaataggagaatgacgcagctcaccttgcgtgccaggcctcagccactgagtgacagctgctgtttctttctcagtaggttatgataggaggttatgttaggaggatagatgctggtttcacgctgtctggtttcaattcccaacacctctactcatcagctctgtgagcctgaggcaagctgttaacctcattgggcctcagtcttctcatctgtaaaatgggagaatcatagtacctaccymttggctggtgggaaraattaaacaagacaatgtactcactgcttctggcacataatagctgccaagtgagctttttgaaaagtccgacttttgcatggcaccattcctgtggtcacagggccagcattttakatcggtagattcatgaccagtttggttcaacaaatatttattgatttttccactaagtgctagaaaaaaattaatagaaatccttgcatcatttgttctcccaaaataaagctctgctatgaaccgyttcatttactgagtacattctctgtgccagggaccacttaaaccctgtctaggaaccagctcagttaatcttcacagcagccttatgaagtgggtaaagccgggactactttcatcagccccayttttgcatgtgaacaaactgaggccagayggatcaggtactgaggctgcagcagcagagagagaacgagggactgaacctgggtggaagggtcagcattcacaagttccacctcactgtgctgcgcttgtaggagaaatgaggctkgctccctgcctggaggagagcgacatcccagggcagggtggcaggaagcagcgtgagtccccgaggcaccaggcctctaaggagggaagaccactttcagytgggaagtggaggggcgggagcaggcctgtcggatcttagaggacatctagaaaaggcgagggtggaaagggaagcacagggaagggcattcccagaggcaggaacagcatgagcggggcagggaggccatggggtgtggsccatactggcctatagtgaggaccttagtctgcgggtcagcccgagggagccctgacatttcagagggataaagggagggccctgtgtgctgccccactycccaggcagcgtacctgcasagactgggggtgaacaccgccgtcttcgagaggcgccatgtgatcgggggtgcagctgtcactgaggagatcatcccaggtgagctctgatgtggcatgggggagtggagggcagtgactcagggtgacagtctccatccctgctgaccccgggtgacrgtctycatccctgctgaccccgggtgacggtctccatccctgctgacccctggtgayggtctccatccctgctgacccctrgtgayggtcctcatccctgstgacccctggtgacrgtcttcatcggattcggtttcagggtttaagttctcccgygcgtcctacctgctcagcctgctgaggccgcagatttacactgatctggagctgaaggtagggcccccccgccrgcccgattgcacggagggaggaggcagttccatcttcccaacctgkgtggggggtccctgttctgtgcccgaggtgatgcccrccsctgagggctccctcttccacccaagtcttgtgtatcccacgtggtctccctgctgcattcccacagatgggttttgtctcgtccatgtagtgtcttgaaaagtgggaaatttcatccaaaaatcagacttcttttgaagaatgagctttttcaccctcaggcccacgtgggacacctatctgaagccttgggcgcctgagcttacagctgccttgggacawgagcccgatttctgccctcattgaacttgagagctgcttccctctcttggcagctggagcaggaagtggggcctggggacttttctggctcccgggctttttggaaggttcctgggagtctcatctggcgctgtttgcctctcttagtctgctgacctttgtccacaacctggcccaaccctgccccccaccctttcaccttccttcacccccactgtcttataaaccgcgtcaccacattcttgaggctgattggcttctacctgcttartgccactgtcaytcaccactcagagaaaagggttcttggtgctatctgcagctgccactcacgttggtgccatctttttttttttttttttttttgggacggagtctggctctgtcgcccaggctggagtacggtggcgcgatctcagctcactgcaagctcctcctcccgggttcatgccattctcctgcctcagcctcctgagtagctgggactataggcgctaccaccacgccakgcaaattttttgtgtttttagtagagaagggctttcaccgtgttagccgggatggtcttgatctcctgatctcgtgatccacctgcctcagcctctcaaagtgctgggattaacaggcgtgagccaccgcacccggccacgttggtgccatctttgctctaaattcaaaattttaaactagtaagatgtccagctgttgttcacagctctttggctgctctaactggttcatgtagagagttcttcaagccactgaaacagagtatgtgcatcctggtaccaggactggatgaaatctagccaggcctggggatgggtcgctggtctccagtccagagcagaccatagcagcaggcagtttataaatgcaccacttattcatagtggcagatgttggggagcagggaccctccttttggcaaacctgatttaagagactaagaatcacagaatggacattttcacttgattattctctttctttaaaaaacgttacttatttgaaatggtatttgtcatagtgttccttgaactagaagctcccaagtgaactgagtagatgctttaacctctgccttgggctgcagtaataggagtatggagctcagagcagggagaaagcagtcctgttgtgtgatacgcaggactcaccccatctggagcaccttgttttaacaggacattgacagcctggagggcattgacaggaggacaactaaactccttccaggaatattgtctttccaaaactataatggagagcgtttattttaccagcatcacatcttgggctatgaccttaatgttctatctcaattgatccttacctgtaagtcaagagccatgttataatcagggaactaaagttcaggggttaaattcacacagctagaaagtgatggagaattcaagccaaggcctgactgtctcctactccttgttcttgagctatgatgcgctcaggcctcttggtaccaataccgcccagactcacacgtctctggctcttkgtactttgcggtgaacgtggtgatagagtgcccctggcagctccagcgcagtgtgcacagaggctgagactggagctgctggaaaccggccggctgcgtctgcctccctgctccacagctcaccagctgcgtgatttcaccacgtggtgccttcttttcctcatctgtaagagggaatagtaacagcagctgcctcctaaggccacatcagcacagtgcctggtgcacagagggctcagtacttgtygctattattattacccccatttggcacttgagaaaactgaggctccagaaagacccatggctggagactactcacccaccctgccacttataaggctgtatccaattagagtgagccctcaactaaagtgagaggcttggctttggcaccactgcccctcctcccctccttgagccaaagcaccctccactgacccgctgtggtccccaccagggcctgcctccccttcctgggtgttagtttccacagctgtcaatgcragcactgacttggatcacctcccggttccatccacctagtaaatgagtttgcttttgcagcggccctgcgctggatgatggaatccaggctggaagggcagagcctttgcactggtggagaagggggtgtggaggggggcttttcatccccttcagccataagccaccttccccatctccccctgggccagccttgacctcactgccagaggcaatcccatcctccctcccctccctcactgaccttctgggtctcactcagccttattcattttgctcttgcttttctcctggaaatctctctaaggtagggctctaatttgcagggccacaaagtatgacctgggaaactgctggggaaactgctggggaaaccccaggggttcttgctcacgagtctgattctgtggcagtggtrgggcccagaaacggtcgtttttatggcattctcaggtcattctgaaagaggaggcccccagaacataactttgagaaccacaccctttaaatctcttgtatctctggtcctttagacacacacacagayrcacccttcacacacacacaccctttccaacaatttccacccaggatgactgtgcatgctgagaactctcatggggtaaataaaagaagggtttgctttcattttgtttttttgggktttttttctgttttttaagaaaaaagcttcataatccgaacaaatcttgtggatataatctgatggttatttaacattccccttctcattcagactccacataattaaamctattgttaaaagaaaaaccttcactaaattaaatttaatagagtttaattgggcaaagaatgattcataaatgaatcaggctcccgagctggagtatgctcacagtctccagcacagctccatggtagaagaagatttatagacagaaagtgaaaagtgatgtacagaaaatggaattgaggtacagaaacagctggattggttacagctcagtgtttgccttatttgaacgcagtttaaacagttggtcccctttgattggccaaaactcggcgattgacacagragtaggttacagtctgtttacgcctccttctaggttatagttcactaggaacagagaaacctttaggttgagcttaaagtatttaaggaggcagctttaagctaaatttgatttaacrccattaagaatgacagagcctccatttagaagagcctccatttaggtttcattatgaatcaaatgaaaagtgattcatagtcaattagttatacttaaaataacttttggattcctcttaggtccctgatttggagggtttattcgttcattcagtccatgtttctgagcacctgctatgtgccaggcactgagagaagcccttgggtgtacrgcagtgaactaggaaggcaaggacactgctcttaggcagagaacttcagggagagtgccaagaagaaaagaaaagaaggcagcattagagaaagagagtggagattccagcctagatggtgaccaggaaggacatcttcctcaaggaggtgacatttgagctggtattcaggtaccaagaggtcaccagcagcagccatgtggacatctaagcagtctccagtcagagggaagaagagaaggacccacccaggcaggcgtgagcagagggcaggtcagtgtggacagagcagacaggcagagagcaccagatgggggtgggaggggcaggactgcattttatccaagtgcagcgagaagccagtgaggtgtgtgatcaggaagttcactgctaggatttgtgactttacaaaggtcagcccacctgctggctggtgaggactcggaggaaacaggagggggtcgcatgtggagcackaggccgccgctgcagcggttcccaaaatggcggcttggagagacgcgcacagattctggaggcagcggatgggatgtcaaggatgaccaggagagagactaaggatgcctcctgggtatgagtgagtttactacattaagaagaacgaagctggaagtttctctagcttagaataaagaatgtctccatcttagggataggagggaccccagccgtctcctggccccggcccccgccagcatcggaaatctcctccacagagtgtccagagctgcggcgagcctgcccgcctggagcatctccagtgtggagcaactccagcggtaattgttggaaaagcctgtttttggtttcctygtgcttttctaaaacgtctactctccgatctcatttctctcctctggggccataccttgtctgcaacctagcattcatttattcagagtcgacggaatgcttattaactacactgtgtctacacgcggagggtacagcggtgaacaaaacagacaatgcccctgacttcacagggcttacattctacttggggagacaatgaaaacactaaatatgtgattagccatgtgctgacaagtgctttggagaaaaatattgcagggtgagggggcagggagtgcgggggaggcctggctgataaggtggcattccagccaagacctcgagtcgtgaggttgcaggccacggatctggagaaggaagcctctcgacagcagaaactggaggcggcacaggccccttttgttttatctgtgcctgctttgaagaagtggatgtgctcttggaaaattctgtgtgctaatcaaatatttgtaaatcaaatcatattttaaatgcatcaaagaaacttccatttaaagtgaccctggagtaaatgagtctgcaaagtaaataaaatgttctgatgtgaataatttatctaccttgtaagtatagattttcacataaccattgcttgattgtgtctttctaaatttaattatttatttctgaagtggggcagttacagaccggtgctgagagctggggctttgcagttacagagctgtggttttgaaacccagacctacctcctaaagtgacctgggacaaattatttaactcctatgagcctctcgtgttgcttttgtacaatgaggataataagacagccatgtgccaccatgttggtcaacgatagactatatacagtggtggtcccataagcttacaatggagctgaaaaaattcccgtcccctagcgatgccatagttgcactgcaacatattattcatgtgtttgtggtgataagcctactgtgtggccagttgtcaaaaagtctagtacatataattatatacagtacataatacttgatagtaaatgactttgtcactggctaatgtatttattatactatacttttattattattttagagagtattccttttccttatttaaaaaattcactgtcaaacagcctcaggcaggtctgtcaggaggtatccagcaaaaggcattgctctctaggagatgacagtgccacgtgttactgtccctgaagaccctgcagtggggcaggatgtagaggtggaagtcagtgacattgatgatcctgaccccgtgtaggcctaggctgatgtgtgtgtttgcattttactttttagcgaaaaaaggttataaagtaaaaaataaaaataaaaaattttaaaaacagaaaaaagcttatagaatgaggatataaagaaaatattttatatagctgtacaatgtttgtgttttaagccaagtgtctttttaagagaatcaaaaaggttttaaaaattaaaatgtttataaagtttaaaagtttgcagtaagctaacctactgaagaaaattttttaataaatgtagtgtagcctacgtgtactatatttataaagtgtgcagtagtgtacagcaatgtgctgggccttcagtcactcaccactcactcgcccagagcaacttccagtcctgtaggctccattcatcatgagggctctatacagtatcatttttcttaccttttatgccatattcttaatgtaccttttctatgtttgtttttttttktttttttttttttgagacagagtctygctttgtcacccaggctggagtgcagtggcggcaatcttgcctcactgcaacctctgccttccaggttcgagcaattctcctgcctcagccttccgagtagttgggactacaggtgcgtgccaccatgcccggctaatttttgtattcttastagagacggggtttcaccatattggccaggctggtctcgaactcctgacctcgctgatctgcccgccttggactcccaaagtgctgggattacagtcaygagccactgtgcccagcctagacatgtttagatacccaaataccattggattacagttgcctccagtattcagtgcagtaacattctgtgcaggtttgcagcaacaggctacaccccacagcctatgtgtggtaggctatcagatctagttttgtgtaggtacactctgtgatgctcaaactgtgatgaaattgtctagcaatgcatttctcagaacatatccccatcgttaagtgatgcaagactgtacttacaaagttattgtgaggtaaccattgtaaaccctagtacagtccctggcatggaatgagtgtgtcatgctgtgatgtggtatgacatggcatggcrtagtgtggtgtgatatggcatggtatggtatcacatggtgtggtagggtgtggtatgacatggtgtgtgtggtgtgatgtgatgtagtgtggtatggtatgatgtggcatggcatggcgtggtgtatggcatggtatgtgtggtatgtatggtatggtgtagaatggtatagtgtactgcgatgtgatacagtatcgtctaccatagggtacttgggcaagagggctttttataaacttatatttaaaaaacagacaccaggaccatacacttgggaacctacacacaggtacctaaatggtcacacaaacacaatcggagaaagatgatgggcagagaccacagagccattaatatgtggcccatgctatttgtgttttgcagaaacatgggctgaggcttcatcttcgaaacccctactccttcacccccatgctggaagagggtgcaggcagcaaggtgcccaggtgccttctgctgggcacagacatggcagaaaaccagaagcagatcgcccagttctcccagaaggatgcccaggtagggaaggcgaccagtgactgagctcctgctccctcagcagcctagagatgggcctggttggattgtcctagaacaattgttcaaaggccatggacactgcgccaggccaccccacgttcctaggagggctccagttggtggcagctcttgatctcaggcactgcgaagagaagcgggtggaggatgctgattaagaccagtggactgggaggcctgctcacctgcgtgtgttcagtatggggccactgtcagaggggctgtgcctgctgagttcaagaggaaatgcactggcacgttcttacactggcgtgtgcttcatgcccctccagctttcaggcagagttccaggtgtttgtccacattaaagcacatgaaagccaaaaaggaggatgagggaagatcagagaaaattaaggataaataaactgaatcaggaacttaggacaggagagttctaaatatttattcagtgtggcatcccaaggctccctcctggctgcccaaggcaacaaagtgtccatgatggtgtgcaggtctggtgacaggatgaacacatgtcggatggagaatgcacttttttcccttggaactgcattctaggaacctgctgggtggccttgtctagatgagccactgagttccrtaagggccctgccacagttggttctgtggatatagaaagattatttgaatggccattttgtaccaagcctggatatwagctgagatgtagcattaaatcatatctcagtggagacatttttataagaagaacctaggttaatagaacccatgtacattgcttttgttgtgttaatctattgctgggtaaaacttagagaaccacagacacacagcctacatgtctcttccaccagcagttttcaaacctggctgatgatcagaatcacctgaggagcttagccttttattwtgttattttattttatttgtttttgagacagggtctcactctgttgcccaggctagagtgcagtggtgcgatcttggctcactgtaacctctgcctcccgggttcaagcaatcctcctgcctcagccacctgagtagctgggattacaggcattcaccaccatgcccggctatgttatttttaatttttttgtagagacaaaagtctcactatgttgcccaggctggtctggaactcttgagctcaagcaatcctcccacctccacctcccaaggtgctaggattacaggcatgaaccaccacacccggcctraggagcttagcttttttaaaagtgcttctttggtggttcttttgtgcagcagattggagaccaccacctgcatcctctcgtccaaatcctacccatctcagaggcacttgaggggattctgcacaaggccaggtccccrggcctgcaggacactagctgtggccctacatgccagcgaccacacacgctggaggcaagtgcccatttcccatcgtggaaagtgaggagcttgatttctggttttgtctttccatgctgtcatattaaaggcctgcttagagaaagctgtttaacttcatttttaataagacttctcgaatgtattttaacatggaacttttctttatgtaacacttattaaaatgccatgggtatatccatgggtagagatggaccaaaattcaaagtccagggctaagaagagtcaggtagggcctccagtagcacaggcttctatcactgctcctgtgccctccagggaaaggagggtgggtgtcagaaaccaggctttcgaaagtggattctgacatgggagcttgtggggtgagaggaggcaggcttctgtgactgcaggtgatgagacggcatgggagacgacctacagaccggaaaagaatacaggcaaagaggtctaacttctaccaataatataggaaaggacagaaggacaggccagcgtggcggctcacgcctgtaatcccagcactttgagaggccgaggcaggcggatcacttgaggtcagaagttcttgaccagcctggccaacatggtgaaactccgtctctactaaaaatacaaaaattagccgggcgtggtggcaggtgcctataatcccagctactcaggaggctgaggcaggagaatcacttgaacctgggaggsagaggttgcagtgagccgacatcgcaccactgccctccagcctgggtcacagagcaagactccatctcaaaaaaaaaaaaaaaaaaaaaagaagaaaggacagaaggaagaaacttctaagtggtttcatgrtttatcgcagagaccacaccctaggattgttgccagttttctgtgggtgacacttcgtgttagccagcattagctccttgtccctgtcaccactcccagtgattctcctattgcccagggtctcctgaccaccaccaccccaccccatgcactcttcctggtgttgatgttaacccagagacctggaactgggggagctcaacagagccaagctgggccacagcrgggaatgaggcctgaggaaccgtcaagctgtgggggggtgacaggccatctggggacagcatggagggcagggatgtggacagtggggccttaatgcagagctctgttccaggtctttcccaaatatgaggagttcatgcatcgcttggcattagccattgaccctctgctggatgcggcccccgtggacatggcggccttccagcatggctccttgctgcaaaggatgaggtcgctctccaccctcaagcccctgctgaaggcaggtaagtccaagtgcaggcaccagggcatgatgagtgaccttcaaggaggtgagcccattgtctcgatgcctagacacaagcctgaacctccatggcagcctgccagctgggwtcagttaacatgctgcgatcaattaggggcagcctggagcactttgttgagagcatcttaggctgatatgcctttaaaatagagcctgagaccaaggcttatgcgtgggtagttcatttggaagggtgaccccaagrcacaaaaatagcagaaagttggggtgaaagtggacagagaaagagtcaataccagagtgtgtgatcgcactagccagcactgtgggtgacaagatgctggacctgtgtgggccctctgggaagccttatgaaaagcatttgaggaaccttctcgggagatggaaagggaaatatttatccattgggttctatctcccattggccaagggttgcctcacagggcattgactcccacacttctgggctgtgcatctgtgggtgccaagtaggttcccatgagtgccctgccctggtgccagagaagccctagggaagaagtagagaggctcacttttcaggactgaagtgagttgctgtggagttgcctgtgtgaagctgatcaaagcctgcttggagctcagcatcatggctgtggctagaataagatataggggccaagagatttgaagagctgcccccatacaggaagaatgctagatttgggctcagcaaggagaagttctgtgatcaattagtaatgtctgccatgagtatgcgaatggaaggctcattaagtgtgctattattttctaccctccttgagggtatacagaccagtttaacctctatatcctagaaaaaaaatyatttgtttcccacatgtcttcgtggttcagctgattccagctggctcagctgatctggtttggtctcaggcatgtgtttgtgtctgcagcagctcagtggaggcagctctgctccaggtacctctcgtcctccttgtagaagcacatgctgacctgggtgtggacttttcacatcagtggcacaagcacagagggcatgmcccaatgtacaggcctgtttcagttctgggtttgtgtcacatcggcaaacattscactggctgrccaaatcacatggatgagcccagagccaaggagcmrggcaggttaaccaagttgtggtgggttgrgaggcactgcagacttatacattgcaaagagtatggagccagtggaatctattacaaatgcaaaaagtagacactgcctctctctcarataaccagtccaaggagctctgtgtgaaaaacaggcaaaaaacatttattgagcaactactatgtgycagacactaagctaggcccaggggctgtaaggctagagaccatgatttctaccctgaaggccttaaagcctagtttctttctgaaatggtctgaatcaggktcataggaatggatcagccatgccagccwtctcccaggatatgggccttccagagttcgaaataagggaataaggtacaagtttaaaattttccaaaaataatgctaactgcttaaatgtattaagtacccatgaacttgcaaatgctttacctagctcatttaatcctcaccgtagcccttggggtgtaaaataggattcccattttacaggtaaagaagcaggttcagagatgttaaaaatgtgtcccaggcactgcagctagtgagaggtgtggccaggactcaagctggatctgtccctgcattggctgtgctataccacctcctggcaggaagtctcagcmtcctccatgcttttatcccccaggccaggtcggagggtttccctgtcacctgtttcaacttctgttttgtggatcttctcttgtaggccgcatcctgggagcccagcttccccgatattatgaggtcctcacagctcccattaccaaggtgagtggttccccagcctcaggcccgaccaggcagtgagagggccctcctcccatccaggctyctaagcccttctctctgctgttgtgctgtccaggtgctggatcagtggttcgagtctgagcctttaaaagccactctagccacagatgcagtgattggagccatgacaagtccccacactccggggagtgggtgagtgaggggggtgaggtgggacacaggagtggggcatgttccccaacaggagtgaggacaacagtggcagtggcagcaacaacagctgccacttaacagagctcacccagtgagccaggaaccgagccaggcacatcacacacgatccacttaaccctcagagcaacatctgagaactgyggttcagagaagggagtgtcttgcccaaagccactcagctggtaagtggcaaggctgatttccagcttgaggtgtctgactccccaaaatcttcctttttagtgactgtgccctactgcttcactaagaaaagcctctctcccacctcccgcttgatagctcaamattaatatcttcttttctctcctcttcccttccctcttcyacctctccactccygcaaaygcccattctcccttctctctcactgttccttcccctgggctctggtacacactcacacagacacctcaggatggacaggaagctgcctttttctttatgagtgagggtttgtgctgacagcccaatccgagaggtggcagtcagacacagcaaagcctgcagtgtggtctgacttaatgagcccccgcagaagcaggaatggaaggctgtgtgtgtgtgtgtgtgtgtgtgtgtgtgtgtgtgttgggatggagaatgcagccaagggttgggccgtttccagtgcaccagaagatasagctagaagctagaagctagaaggcgtcgacgtggcttttctctmaagggatgagcacaccctcggaagtggtttttcaacacatattaagccggccccaaattcccccagggcgatggagatgggggcttggcagcagttgccacacatyggccaagctgtgatctaccagccaatctggatcttccagctggggcctcctgcccttttctcttcggatccctgggaggcttaaccagtgctccgtttgtgatctttaagtaatctgttccatcattaattcttccaacaaatatggatgagcgcttrcctgtgctaggtgctggggatacggtagtgagcrgagcagatgtcctgatgggtgagagacacagagcgagtgatgatgatgaagtggcgtgagtgtgatgctaggaggagcagccgggacacagcctggtctagggtcagagaagcctctacatggaagaggtgtttgatctgagacccaaaggacaaagaggagttaacaaaacataagatgagggagggaggggcttcaggccgacagaacagcagrggaaatgctggggttgagagaacktgtgatccacccaggaaatcgagaggttctgttagttaggaggatgggatatggakagggggamaggatgagggatgaggctggagtgcctgctagaagactggccattatcctaagagcagtgccaagccggggaggcttggaatggtgataagtgagtggcaggagcagagctgggctttaagatagggctccaggatatatgtggacaagacctgcaggagagaaagtgtgggagagggggtccaatgaggggcactactgcagcagcataaggaagagaagagaggctgagaggtgggatgaccttgaaagccctttggaggctgagttggtgttgctttgtggatgtagatggggaaggatggtagcggtcaaggctgacacctggatttctgtcggaaacagaacctcctgttgaaaggtgccgttcactgggatgggaaagattgaaggggaagcagctggagaatggggaaaaggtggtgggtttaagatgctgccaagaaagggtccaaagggagatatctgtgggtagctggacaccggagctggagctcaggagagggctggagctgcaggtttgggcatcgttgccttctttgtggtaataagctatgcacatagacacacttgttagggagagggtgtagagaaggcaaagggctcttacaagaacttgagctcattgaaggctgctgggagarggctggatggtggcagggaagggctgaagatcaagatggaaaggaatagttgcacctggaactctggggagatgagatcccacctccaggatctgagtcggatggtctgtccacaggtatgtgctgctgcaccatgtgatggggggcctggagggaatgcagggggcctggggctacgtccaggggggcatgggtgccctctctgatgcgatcgcaagctcagccaccacacatggagcaagcatcttcactgaaaaggtgaacggcccctctaccccaccccaattattagtaaggatcccaggacagaacaaagtctcagatttggaaggtcccttgttttaccaatgaacagaggggccatgaggggatgggttgcagaatcaagagattaaggtcatgcagtctgttagtggctaaccacccccttggaattccctggtcactgaactgagactgagtgtttcatggagaagctgaggcttcatggagaagctgcagaacttggtgggatgggtttgggatgaagaagttgtgaatgcctaggagcagcacagaccatggaaatccyggaagatctaacmtggatttcccttccygcggtttctggggccttgttctggtgggctctagacagtggcgaaggtgcaggtgaacagtgaaggctgtgttcaaggagttgtgctggaagatggcacagaggtgagaagcaaaatggtgctgtccaacacatcaccgcagatcaccttcctgaagctgacgccacaggtgaggctgtgrgcaggagggtggagcttagatgtctgccaaaacaggggttagaaatcgtggggattgagggagccaggattgcatcagggtgtgagatgcaaaagccaagtctctgcatttgggaaacaggsgggtaagggcaggtagcaaacggggaagaagcctcacaggtggggagaaggggccagagaggtgaagtgaccaagattccggccattggcagagccagagctagaacccaggtctgactttcaatctagagttatttccacaactttcctactttcctgatttctcccctctcacygctctaattccattgtctttgtcaatgatctgttrtattatccatgattattaattaatcaattaacaaagagccacaawacttctgggcatacaacaagaaatactggcacccagaactggagacttcagttgatcttggtggatttcagctgcttaaggcttgctcatgcgtctgcagttggctgtgggtcagcttgccggctgctgatcttggcnggactccttcatgtgcctgggagctggctggtggtggctggtccaggaccgtttctgctgggatgaccrggtgggggactcggctatgctccatgtgtctgtcctcctccagcacggtagtccaggcatgttctcaaggtctggcaaagggcaaaagcaggcaagctcaagcatgcatgcaagcatcacatggtttgatctctttgcatcctgtttgctagcattggccagaccaagtctcatggccaagcctagagtcagagtgtgagagcactgcaaggttacacggaagtgggtgtgcaaacagggaggggtgagctttgggggcagtttttgcaattgacttaccctgtgcycaaaagatatgataacatgtatacgcacatgaagctccyagccattcttgggggcaattcttaggggcaaagcactactttttctgagtgattccattactaaaattcaacaaacrtcagtaaaaagaaacttgttaaggcaattctgagatcgtcgaggcttccaagagcttacagaccagtagtgaaaagaggcctgcaaaccactgacccctttgcaagcagggagaggtgcggactatttcacagtcagaactgctggccaagcgcggaggaggaagtggttagagctgagtgggaggggatctaggaaggcttcacaggggaggtggttttggctgagctttgaaggatgaagaggatttcyggagggagcgactgagggatcttcctgagcaaagaaagaaggcagcttccttggggccttggacatctgaggcctttcatggagccttctccttccaggagtggcttcctgaggagttcctggagagaatctctcagctggacacccggtcgcctgtcaccaagatcaatggtaagaggcacascacattgcagcactgtctcctttgacccatctgagtgagaaacctccaggctgggggcagctgaactcagtcatcatctccattcccggacctccagcctgtgtccccctgcagcctggtcagaaggtgaaacacttgctcatactttcctactcccgtccgccactgagggtagcagggtgctggctgtagagggaggaccttgtggggctaagacctgaccctcctctttggtccctcagtggccgtagacaggctgcccagcttcctggcggcccccaatgctcccaggggccagccgctgccccatcaccaatgctccatccacctgaactgtgaagacaccctcctccttcatcaggcctttgaagatgccatggatggcctgccttcccacaggtaggggccctggactttatgttccctgatgttcttccacatgggcctgggaggcggggctgtccatgccacccacagcagggatcaggcctggtgttcaaccttcacagtgacttaggatctgccaaaatccatactcctaaggacaggaagtgcatcccaggtgaaaaatctgaggatgagggcaggtaaggggtgaagagcggstcaggttagcagaaggggcagaggggcagagcactgcccaggaaagtgctggggctggggaagaagaggagaaaatgtgttctgggagagcaaaggaagttctctcattcagagcccgtcagagagcacgcactcaccgagtcccctgctccgtagcctttctttttctgataatctgccttcttgcaaaacttctaaaagcatttcccacctcccactgcagctgtatttccattcttctggaacaggcaggggcgctataggagcaagtgcctttccatcctgtccgctgtccagcacacactgttgaaaacctactcagtgctggactctgtactgggtatgggctgggagaattagcggggcaggggcatgaaactgacacaaagcttatgataggacaggtacacaaatatttatagcatgtggtaaagaagatgtgcgcctggaaagaagggtatagggcaaagttcattcatccatttataaatattctggggtctctattctgtgccaggcttggttcagtgagtgggcacagatcagcaagcaaagccaagaaagtctcaggtcgttgactctctatccatgagaggaagacaatcaacaagtaagcactgatgatgagcactgtggagaaaaataggcagggaaggggaggaaaggcttctctaataacgtggcacttgagcggagaccggaaggaagtgagaatacagatcttatgggtatctggggaaaaaacgtccagacagagggaaggtcaggtgcaaaggccctggggcaggagtgtgctgctgtrtaggaggcacagggacgaggccagagtggctggagagagagcacctgggaatgaagggtctcggatggtgctgggtcttgtcaagtgccctggctcttactccaggaaagtttgtgcagagcctgccttatgctttaaaaagaccaacctggacactgtatgcagaaaaagttaaggcatctgttgcaatgggttactgttgcagaatccaagggagagaggacagtggcttggacaagggtgggggcaggggaagtgatgagaagtgttggaagactgggtatgttttgaaggtgaagccaacaggactttctgttggatagggagtgggatgtgggtcaaaaaaaggagcgactgtgaaatgatgcctccatttactgaaaagaggaagaggyggtgggggtggagcagattttagagrctaatcaggcattggggtttgaacaggggatgtttgagatccctggtggacatccgagttcagcgagaacattgcagctgagggacgcagggagaaggggcatttcccgtggccttgaaggagactcatatttggagatcagagggagaacatgctccaggtagaaaaggtgtggcaggcaaaggtggtggggtgggaagcaggtcacagctctgctggggctcggggcagccctagcagctctgtcttccattggtctgctctggaaaagrcagtcaggccactaaagcctggctgaaatctggctgcttgggcgcctgctgtcttaggcctggcccctttccacactcccactgtctgtgtggaccttcgagacatttgcrtttgggagctgtggttagagcacagcgtgtgatgaaggcaggcaaggacaggccatgcattcgggggtctggggtcaggcgagctcctcacaggtgctctggaccacgctagcagccgctaagcccrtgcaggtggacaaccactgtggctgtagagcgacaatcgcccagaattggtgtcatctcagsgcctccactgtgtcccaagtcatctcggatgccctaccctccgcmctgctgctctttagacctgccgtctcctccctgcccgcacaggcctgtgattgagctctgcatcccttcctcgctggaccccaccctggctccccctggctgccatgtagtctccctcttcactcagtacaygccctatacgctggctggaggcaaggcctgggacgagcaggagagagacgcttatgcagacagaggtaaagacagctgcacgttctgcctccagagccacagccgggcatgcgacccnactgggcctgctcctcctcactgccccattcaggatygacaactgcaggtgccrttccaaagggaggaaatagtcaagggaacctcaagtcaacatagttgactgcaggggtcaggaactgggctaagaaagtcaagaagacacagttcctgccctccagttgctcacagtctagcaagggatggaggagactaattaagaaaccttttattacagcacagctgactgcacgaaccaaaggagamgcatgagccagagagacaaggaaggctttcaaaggaagggatggtcaagctgggtttccaaggatgaytaggagctggccaggcagcaaagggcattccaagcaagagaaacagcttgatcaggccaggcgtgggggctcatgcctgtaattccagcacttcgggaggccgaggcaggcggatcacccgaggtcaggagttcaagaccagcctgaccaacatggtgaaaccccgtagytactaaaaacataaaaaaattagcagggtgtggtggcacatgcctgtaatcttagctgctcaggaggctgaggcaggagaatcgtttgaacccagaggcggaggttgcagtgagctgagattgcgccactgcactccagcctgggtgacagagygagactccgtctcaaaaaaaaaaaaaaaaaaaaaaaaaacagcttgagaaaagtgaagaggtgaaaaaagctgcatatgcaaaaggagatcagcagcttcgtgtttaaggttggggtagggaagtggggaaaactggggactggactggcctacccatgcatctttgggatgaattaatcatttgcttgtggactgatttttgtttttcacctattgaggtataatttgcatatgataaaataagcccatttctgtgtgtaatttaatgactgttagtaaatttgccaagttgtacacccatagtgcctcctcttcttcctaayaccatctcatttctctgtttttggcaccccagtgttygattgcatcgaggtctatgcccctggcttcaaggactctgtggttggcagagacatcctcacaccaccagatttggagagaatcttcgggcttcctggaggggtatgtataagcctagggggtctctcaccatagccttccctctgcaccctcacttcctggctrtgacctctctgctttatcttgtccctccatactcagctttcatcaggaagggaggacagtggcagggaccccggctgagagagggcagagaagcggtcaaaccgagggaatgggggatccctastgggggctcagaaacacaggcaggacagcccccactgagaaggtcaccaggattgtggccctctgccttgacaactatgctggctctgccatctgactttcttgagagagagcacccccttctcaaggcagcagcayatcctcagacttgtcaatttatcaaaaactagagattggagacagggagaccagataggaggccaggttcaatcgcctcattgcagctactgagcacttgaaagatcagagaccaccctaggcaacgtagtgagaccccatctctacaaaaacaaaaaccccgccaggtgtggtggtgcgtacctgtggttccagctacccaggaagctgaaacaggatgatcgcttgagcccaggagtttgagactgcagtgagctgtgatgcgtcattacacttcagcctgggcaacagaatgagaccctatctctagaaagaaaatttaaaaaaaaagcaaaagaaagatctgaggccaaagtgagatgtgctgcaagtgtagaatgcacacagtatagaaaaaaatgtaaaatatctcatcaataagttatatattgattacatgttgaaattataatattttggatatattgggctaaataaaatatattattgacattagtttcatcagcttgcccttccttccttccttccttccttccttccttccttcctycctyccttccttgtttcctccctccctccctccctctcttccttctagagataggtcctgttctatcacccaggctggagtgcagtagtgcaatcacggctcactgcagcctckacctctggggctgaagccatccatcctcccacctcagcctcctgagtagctgggccyacaggcatgcaccaccacacctggctaatttttttttttttttgtagagatgagtctccctgtgttgtctaggctggtctcaaactctggggctcaagtgatcctcccaccttggcctcccaaagtgctgggattgcaggcatgggccaccacaaccggctctgcttttactttttaaatgtagctactaataaatcaaaaactacatatgtagctcccattacatgttcactgaacagcactggtccaggtatagaggaaagaaggccaggcagcgggaaggaagggaatggctgggtacagcaggcatggggcgggcagacttgagaagccttggtgacagtgtgcacataggagtcagggtggaggtgatgtgaagggtaggcacagaggccagggggaggaaggtggtgtcattcacttatgcaggaggatggggaggagcagactcgagggaagaggatggcctcagtttggggaaaggtgaagagggcagtgggggagcactcctgtgaggatgcccaacagacgtcaggcttcttgtccagacctgccccctgagtctgaccttcgcttgtcccatgctgcctcccttctcagcctggggctggtctcacccaagccaggggggcagaaccgtgctcgggctccgttgccccttgtctgccattcacagtgatcctgctggagcttggacaccggggtccgggctcaggtggatgccttggccagagaagggagttctcgcagagacgcatgccaacagccacaataagtcagacaattctgtttttccaacagagggagagggatgcagagtagagagcaaaaccctcttttccttcccgttcagttcgtgttccccaccctgctttcttcctcaaaaagcctctggaaaacttcactcccagccccagggcatgtgcccattccgtctcatctccttccctttctgcattttaaaacccaagaaaatatcctggaaggagaagaacatttgctgaagaacaggggaggggaagaaacccagccagagcaggaaaggctgtaactctcctgtgctgrtgactgtggccctgcctctgcagaacatattccactgcgccatgtccctggaccagctctacttcrcccgccccgtgcccctgcattctggctaccgctgccctctccagggcctgtatctctgtggaagtggggctcatcctggtgagtgacctggagtcccactaccctgtggggactgggagggctcactggaggccagagacttggagaaggaggaagttaagcaatgaaggtggcagagagggaggggagcagggaactcccaacataagctgccctgtgttcagaattatccatgcacaggtgagcacacagccgctgcctccaccaggctgaccacagcccacagttgagctcacacctccccttcaggaggcctggggatgcatcctggtggaggcatctcaccacattccaatgtggggttgtgagagacccatgtccctaaattccccatccgtatatrtatttagacagggcttcacgctatcgcctaggctggaggtgcagtggtatgatcacagctcactgcagcctcaacctcctgggctcaagtgatcctcctgcctcggcctctggagtaggtgggactacaggtgtgtgccaccatgcctggctaattttttattcttttgtggagatgrgttttgttaggttgcccgggctggtctcgaactcccgcgctgaagtgatcctctccactcagcttcccaaagtgctgggattagaggcctccatccatattttagaccaggaaggatggataaagttaacttcttcaactttacaattctttcttgtgcgcattccaagcctaacggagctggctgaggckatttgctatgcacactttctctcagctgtgtagacttggtaccctggaaagagtctgggcttacacatcttccccctccccccagccccttattctgaaattttaacttcacttactaagcgtgtgcccatccagcacgtccaccctcagccgttgagactgtgggctgtggacctggcccctccccagacctttggtgcaggaagcctggagggagccagaatctattgagcrgctgtcttaggtgattccagtgcccatgcccccggacccctctaaccagccccactctgctttgttgctggatctctgtaagccctgtccccacccccaccctggcaggtttttgagcggagctttggttcataggagattcccttccaggaggaggtgtgatgggagctgctgggcgaaatgcagcacatgtggcctttagggacctcaagagcatgtgaccctgaaccagctctgacccaggaagaagactccacccctgaattccaagtgctccattggatcagcttcccaggaagttcagcttcgggttagtacataaggccaccacaatgctcaagaaattattttagaaaaaacgtacgagttacatttagtgcaagttgaccttatgcccatgcctccatacatggactggttctgttttattaaaactaatatttcatacagattattttgcttgtattttttctctgtgttagttggtgggatagacttctctggggtactcataattcttacatcagctaagaagcagtccatttaaaggccaggcatggtgactcatgcctgtaatcccagsacttcgggaagttcaggcaggcaaatcactttgaggtcaggaattcaagaccagcctggccaacatggtgaaacctcatctctactaaaagtacaaaaattagacaggcatggtggcgggcgcctgtaatcccagctgcttgggaggctgaggcaagagaatcacttgaacccaggaggtagaggttgcagtgagccgagattgtgccactgcactccagcctgggcgacagagactccatctcaaaacaaaacaaaacaaaaaacagtccatctaaccagtggaagagtctgatccaagcatcccctgtccttgcctgggacccccactaccaacaattggaggactgcccaggtggggcccagtcaaccgctgtcacattcctggcaagctataaraatggacccaatttccccatgatccacagagtcaccctcaaaggccacggtcctgaacaatgctgggcatctcaagccacagaatcctccagtcaggcaaaaagcagccaagggtgactgcaaagtggattccactgaggccgtctgggagcccggtcttcctgattccagagcattcaggcttctgcctcccatgagctaagtctgttgcatcaccaacacctttcaatataaacctctagaattctaaagagagttgaattgtcacccttgtccaggaaaatccatccagagttcccgtggtaatgcagccctcccagccagcttctccagttccagcagccaaggccacagtccaagccgtcccatctgcagataaggcaggatcttccctgggaaagcttcccttcctccatttcctgggcaaatttatacaggatcaaatagatccacctcattacttaatgttggtaaactcagatttctcagctgtaaaagagttgttttaaagctcacatcaaacaatagatcatgtttccatccagtatctagcacatgataagcattcagtacatggtggagctgctgctgtggcttttattgatgaaatcgtttttgtcgtttttgtcatttttgtattctgcagaaggtgatcttttctatatactttttaacctggcacccagaattgaaactagccccctagaagcattgtgaccaggacagygcagaacaatgtttggatccccaagctttttcgaaagtagccaagccccctccctcattcagcatcaggaccatcaacttcttgatcttgttgaaaatttgtttttggtcaatattgctggttttctggaaggaaagaaggaagacagggagagagggaggaagaatgagagaaaaaaagggagggagggaggaagaaagaggaaaaagagaagaaggaacaaagaaagtgagggaaggaaggagaaaggaagggagggagggagggagggagaaatgaacatagaaaatcttcaaaggcctggggcagctcacatcagacttggtctttaaaaataataacgatttttagccgggcgcagtggctcacgtcagtaatcccagcactttgggaggctgrggtgggcggattatgaggtcaggggatcaagaccatcctggctcacacggtgaaaccctgtctctactaaaaatacaaaaaaaaaaaaaattagcckggtatggtggcacacgcctgtaatctcagctgctctggaggctgaggcaggagarttgcttgaacccgggaggtggaggttgcagtaagctgagatcgcgccactgcactccagcctgggcaacaaaaagagactctgtctcaaaaaaacaaaaaataaaaaacaaacaaaaaaactttatttatttattttggtaaacaaaggttacaaatgcctaatgtaggaaattttaaaaatataataagagagaaacataaaatgcacacataatttttcctgcagagataattgcagttcccattttacaatatttccaggtagtctttcaggtcattggtattccgtgttctgtatgtgggctttacatctttccttcatttcacttcatgtcataagcagttttcagtgccataaaaattctttgaaaacattatttttaatagctgcctaatattctcttgtaaggatgtgtcataatttattatgggacattgggttcagctttggccttgattgctaattagtataagccaaaggcccgaaarcttcttttatcactgctgttcctgttttaatggttccctgtcatttctgggatcacaagggtgcagctgttctccaggcaaatgttccctgtaaaggaggaggaacttggaggaggccagggagagaggggaaaaagcacctttagcaccaagaggaagaatttcccactgtttggtgacttcccatcctgtgtctcatgtctctgaaagataacatttagtccagaccgagagacaagataaggcctcagcactacagggtgccttggttcctccaagcccccagcacatgccgaccctgctgagcaaggcgggctggtcttaccaaagtgctgactctgcaaatcagccatgaactggacaaatgtgtcccttgctggccctaatatgtaaaacttttagaaggataaataagtcagggcctcattgttacctgatttacaattgcctgtttccccagagcagcagggaacacttccttcgaggcatagtcctgtaaaaccctgaagtgcactggaacctcagctgcttaagtagttaccagcaggccctcctgatctcacagcccctgggtgatggtgtccagagactcagtgagatgtgaggtttacagctctgggaggaatttggccttcctggtgggaggaatgacagatgtggctgaccaagccggctgtgggcttgtgagcgtgcatctttctaacatatgttcaatttgcaaggcaggtgacaattaccaagttattctgtgggaccttygtaatactcctgccctgatgtctggaatgargggaaaagagacctgctgagcacaggatgtcattctgtgagsgagtggagacacatgaaatgagaaaaagkaatgcaaaatgcaaagcaaggagaaacgcaaatggacagcaaacctgaaaaaaatatttaaactcacaaggaatccgttaaatgcaatgaaaaccaaacaatcatgctttacctataaaattgagaaaaaatatttgtatagaaaattactggtgtgggcaaaaaagacactcttctatgctgttgacagcggcataaatttgtatttgatcatgagactcaaaagccaacatccgtgtgctttgtgggttattctgcatcttatcacttagcctaaggaaaatatcagaaatgtccctgaggatttaggtagaaggatattcatgcagtattatttgcaatggcaaaatactggaaacagcctaaatgtcccaaaatagagaattagttaaattaatcatggtaacggcacgtgatagaatatcaaacaataactttaaaagttacatttttgaatgtacttttcttttatcacatggaaaaaatatgctaataaaaagtaagatataatgggacctraattttgttgatagttgatagatgggtagacagatctctcatatatatgtaaatatacattacatatactaactataaaaaacatacttacccacacagagaaagacagagacagagagaaagacagagatggagagatagaaacagagagacaaatgggaaagaacaaagtataccccaaagtacagtctgctagcagtagcctgaagtctttctgaccacttggcagcagcttggaaaatgttcctcactaccttcatggaacctatcatagcataagaaccagcccaaagtaaatggatgggactttgaatttttgtttaaaaatgatggcttgtgcctggtcaaaatggtgtgtgaatggcttatgcattgatatatatcgattggcataagtcagagcgcttcagacctggtctcggtctaagagatcctcagtggagacgtggcgtctttggtcatctaaggtccctgcagcatcacaaagggaaagggcggcatcttctagtgtttacacagcccaacagaaatcctgtgttcttgtaaggaggtgaccaaggtggacctgaacctggattttgtctggttttatctgaaactaggcaatgctgttatgtaggttgtcagaccagcagctctgcagctggctatatgtgtctttgastaataagagaatcactagaggaattaaatgagactaaccaaaggacatttgattggtatgcagaagtcttcaaaacaatgtgtctcttaagaaaaaaaaaaaagaaggttgtcaatagtgaaaagataggtgaaacctacactttctgcactgcacctgtcggccttccttcctgtctgatctttcaggacccatggagaaagtgtaggtctgacccagaaggctgttgtgtataaagaggatgatgttgcctcccatagagggatgtgaggattgtatatacataaacacagctcaaaaaatatgcacactgtgtgactcagcacacccactcccagatatacccagcagaaatgcttactggtgttcaccaaaagatacatactrggctgctcctagcagcactacttgtaatacctccaaccagaaagctaccccaatgcccattgaaagtagaacggataagtaaattgcggcaccttcgcatgatgggctactattcagcaatgagaatgaacaatctagaaccacatgcaacaaaactattttgagtcaaagaaaccagaaatgaaataatacatgttgtaggattctgcttataatttatacagaaacagtctaaattaatagttcctatactgttaaaagttcacctttggttgggcacagtggctcacacttgtaatcccagcactttgggaggctgaggtgggaggattgcttaaggcaaggagttcaagaccagcttgggcaatgtagcaagacctcatttctaaaaaaaaaaaatagccaggcatggtagtgcatgcatgtagtcctagctacttgggaggctgaggagggaggatcacttgagcccaggggttggaggctacagtgagctatgctcataccactgcattccagcctgggcaacagaatgagacgctgtattgaaaaaaaaagttcaccattgagggtgttaaggcctagaaggaagcctgagaagggcttcagggtgctagcagtgtatcttcctgtttgatctatgtgatggttacataggcatgttcagtttctgaagaattcattggtttctatacttagggtgttgcagttttctgtatgtatattatacttcaatagaaagttaaaaaaactagtgcctggaatatagtgatgtcacttattaacatcattactctaaagctaatatttattggcaaagccctatgtctgaggctagacttgaaaggggaaatgaagaaagagggtaaggaaggagaagaggagaaagggaaagrgggatgtggtggacagacctgtagggtgccccctacccaggacccctgcttactggtgcccatggccttgtgtgctcccctcccctcaagggtggrtgaggtctatgaattgcttctaaccaacagaatatgacaaaggtgaaaggaggtatgtgattatatcacacacagcataatcgtgcaggaatttcagttcctggctggccgtgaggaggcaggtagccctgttgaaaaccccatgtggcaagtaactgcagtagcctccagctgactgaagctctcagacctactacctcagagaatggatgctgccaacacatgtgagcaaggaaatggatgcttccccagttgagcttccagatgagaacacagcctggccggcactgtgagtatagccttgtgacaccctgaacagggagtccagctgtgcctagattcctgaacagtggaaactgtgagataataaatgtgtgttgttcaaagccaccaagtttgtactaatttttcacacagcaatcaataactaatacaagggagaaggccacatagccatgcacatgatgggtgcaaaatacgatgatatgaattgaaattatgcccctagatttcaaagttttcccattcaaaatgaccctatgagttggacttcactcccatagtggctgggcgtccatctcccagcagggccaagcctggagtcactatgacagagggcatcaagtcagacacacctgtgtttggatcctggctctaccagcattggattttaggcatgttcctaatgcttccaagtctcaatttcttatgtgactcatggagatggtaatttttttttgtctggcacaaggcacacaacaaaaactagtttttttccttccttatacaacaacatgttactacatatactcagaagcacaggaatcagacagagtgagaggccttctggaacattctatgccaacctgaagcagagggatgaaattaaagccaccacaaaaagaaatggagcaagatttccctcgattaaggctttggacatcactcaattagagggctcccaatctaggagcttccatcctgggaccacagcacacacaaacacacacacacaaccctatacaataaactacaccaactcayacatgcagatcaatacgccagggcaagagagaaggaagcaggcagggcagtttgccaaaggcagaaatctgtgtgtgggatgttgagctgtatttctggtccagtaaatcaatctgccttgaaagggctcctccaacttcatgactgtaattggagctaccttcctcaggggttgtttgttacatttaaggtcaggtgacaagcactgtttttcagagtctgcacagtcactctgcatctgcctctgggaaaagttctagcaatatctggagaatcagctaaaaatgagtatgcctgaaggctgttgaaaagttgggagaaatgcaattgggttaacttctgatttctctccttgtcggatttccaaaactcacttcaacattctctccaggatgcctcccctaaaaccaggatctatctccattaatttgatgcttgttaagactcactgtagcagaggcaccagccccaaactaacccgataataataatggctgctatttagtgagccttgatttcatgccaggtactgcaccaagcaagaatttcccatgctttaaatctacaataaacctgggggccgattactgtacatctctgcttttacagaagaggaaacaaacacagttaggttaaatagtttcctgaggtcacagagctggtagttgacacagtcaagatttgaactgaggtccttctgacagcaaaaatcatgctytaagcaagaaacaacactctggacacacctagtggacaactggttgtagggtcatcaagttccatcaattgttggccacctgtgtaggkctatacatgaatgttaaggaatggttccttgttgcaaagcatttacagtctagtggaggacgacaaagaacactcatataagaattattaacaactctagctgcatgaatctgtgtgagcacactagtggaatttggagagacaagctgcctgttaattggtagggtcaggaagtatttctcacagcagaggggactgagctagagtggggtcaaggatgcactagacatgatgagtgaaaagaataaggtgggcattcagggtcttctgggcaccatgtgacaacggtgggatggagggatgggcagagagttcagagccacagtcggacgggatgaggattgtgaagagcaaaggcgagaataaggccggataagagggtcaagctgcagatgccatgccgggcagaaggtggccttcattctacagccaacatggagtttgctggaggaggtatggggattttacacacatgggaggacgtccagtctgttagcctgttaaagtggccacatttgcagtgttggcagaggccaggggacaaactcttgggcttcctcctccccacctcccctcgccctctcccaaggactcaaatgagcagttgagatatggacatgagttgggagtgggagcttctcacttggaggctagagccagatcttcagactactacacccctctgtctgccaagcccaggtgctcagtggagggccatgaacagaggccagcgtggctccttctcatctccataatacagccatgttctctgcagcctcaatgcaaacagctcctcattcacctytgccacagacagaagacggatcctggctgtggaacctggatctgggaagctttagtggcagcacctgtttttggmtggaggtgtttgtaacaccttgtaggtattgtcccctggggcagcatggacmcctytacctgctttgagactgtggatgacctgcatctcatcaaggaccgaggcagatggggacctgggcctggatttctastacagaagccagagactcatctgcacgctgcagaaactggagcagcccatatttggagttaggaagaagtttaataatagtacacaaacttccttggaaagggctagcctaaaggggaactggttattaggagaaaaaaaaaaccaccgctgtttttacagtaaccctcctcaktctataatgagcaaacctctcttctgtatagagcagcctcctaatgtgagtcactccaagacttggcttccaaccgctgccccttagcccaggaagcaggagcacaatggagcagccaggtgtcaattacaggagacggtcagggcaggaagcaaggtgagttataataggagagcaaattaatttcacataagtaggattagtagttaaataaatagaagtcccaccactaaccctgtctggaatgctgagtgtctgtcccccaccagaggacagaaaaagctcacagctgagcaggaatcaggtcaccacagggttacctacccactgttaaggacgaccccctggaaatgtaaagcaaggacatggtttagaaaagacactctgagccgggaaaaagagatggtatgtagggaaagatgcctcccactgatggcttagtcatctatgacagggccacgatgcagtgtgaagcagctgtacctaagaacagtctgagcagtggaggaggggtcacccaggatttgggrtaaattgcgggtggtgaattctaaggatgactccatcaggagcttccattccaggctgagtttgtgttggctttatttttaaattgtcaacctcttgtttgttcgtttgggctttttaaagcttctgtccctttcccagttttcaagtgacctttgttcaggtgagtggagtcctgggttccttgggacttcaggggctgagggagcatggaggggagaccagggctcgaggtgagccaggtcagggcagccgggttccagatctacaaagtagagtcagtcatacatcacagcattgctgtgaggactaaggtaaattaagtccaaagcaaaaagcccctaatgagagttctgacagctggagataagcttgaaaataagcagcagctttctgtcctcctctcctgccttcctgtcatgcaatggagccagagaagagaattcatagcggacactatgcaaaggaggctatacacaaaatcttcctagggcgggaggaactgcctgccggttagggaattctcagyaaggacctccggggaagcttctgagctrcttctgactctgcattggcttaggattttgagcacggtcagggtggatctgcagcctcaagctgtaagaggtagggcagtctaggagtccttaactcaggggttcctaaacttctttgactatatccacttgagtggggccaaaggacacaacgtctcaccagttccccctctctcctgagtttggtaattataggtgtggggcttatgggaaggagaagaggatcgcagaggaaccaaacagacatattgcactaaacctgctgagcaggcagtatacacggttcacttcctatttatgttaaagaaaaatctgccattgtacacttgattttatattataaatgaacgccccatgatctcaaaataaccctactaattttattatgctaaccttgattgcaagacgaaagtgatgaaaaaaaaatagcacaaattcaccggcaaggaagccaccaatgaagtgtccttctataatagggtgaccgaccgtgggagtttgctcaggattctcccagctttagcattgaaaattctacattccggcaaacctctcagtcctgggcaaaccaccatacaagcaaaatataaagggatcatgtatacacctcccttagcagtaggggtacatgagtgatgaattattcaactgcaattcatttacatataatgtctagaaattgcacaattttataataaaagccaaaaattatcaaagtaaatacttattactacccattctaggacaaccccaaactctcgccagactcaatggataatgagggcacaaaaccaatagtaacttataaatataaagtatgaataaaagcggttgaaaaccatgataactcaaaataactgctgaagagctaacgaaacagcgtttttccaaatcttggggaaattccaactatgtaaagtatagtgtagaataacaaattggagtcctcagtaaatcccaggaacactaattttagtttatgaataccaaatttttgtgggttaaaagctttacttgtacataagaagtaaagtctgggggccacctctgtgacccacctggaggaaccacaggaaagatttgcgtgcttgggtcayttcatagtcatcagaatgatactcaggtcccactttgagagtcactgcattagctcaattaataaatgagaaaacagaggccccgagaagtcaagtgacttttccaaagctacaggtgccatgggtcctccaaggaaggttctctgagggctggagaggtgtgttagggggcagaggtaggattttaaaatagtttgtctgtcttagtcactccctccacatacatctgacatagtgaaagagcactggtcctcttgaaccctcatagggcttgttagggtctaattgtgtcccccaaaaagacatgttgaagttttgaccctcagtaccaatcaacgtgaccttgttgggaaacagggtctttgcacatggagtcaagatgaagtcctaaggatgagccctaatcctatatgatcatgtccttataaaatgagggaagttgggmcacacacacacacacacacacacacacacacacacagtgccttatgaagacacagacacagggagaagacggctgtgtgaagtggaggtggagatgggcgggatgctgccacaagccaagggtgtctggggtgaccatggaagaggcaagaaaagatccccccgccaccccccaggaggtttcagaggaagtgtggctctcctaacacctcgagtgtggtcctctggcctccagaactgtgggataataaatttaaaccacccaatttgtggttctttgtcataatagcccagaagacaaatacagagactcgcagttgctccccgtgcctggcctgggtactctccttctcacactctctctgcagctggttgggagcaaaagcctcagggaaaagtacagatcctctggtttctctttgccatgtctcctccatgcctgccttagtagcatcagagagtgtgcccctgggaggggacrcaactcgggcatggagcgggtggcccagtatcagagaccgtgtcatgcaacaggagggcaggggagcccggctggcaccccttgtccctgagggtgctgggaggatgaatgcctcttcccggtcaagtgcttccagcagagacacttgacattttcctgtccacacaccatttggcaaggacgagagctccgatgggccatcctgacctttgctgtatttttctaggataaaagcaaa

SEQ ID NO: 9993 - DNA, 43936 bp, Homo sapiens
  misc_feature (24164)..(24164): n is a, c, g, or t
gggcgtggaggcatgggcctgtaatctcagctacttagtaggttgaggcacaagaatcacttgaaacccggaggtggaggttgaagtgagcagagattgtgtcagcacacttcagcctgggtgacaaagcaagacactgtctcaaaaaaaaaaaaaaaaaaaaaaaagcatatttatattctgtctgtatacactctgaaactgtttttataagactatttcttagtttcttaaatttcctcctgactattgctttagctttgtcatataaattttgataggccatattttaattatcatttagttccaaatattttctaattttcgtgtgtgtgtgtgtgtgtgtgkattttgagacaaggtctcactctgtcacccatgctagagtgcaggtggtgtgatctcggctcactgcaacatccacctcccagtttcaagcaattctcctgcctcagcctcctgagtagctgggactacaggtctgcaccaccatgtccagctaattttagtatttttttgtagagatagggtttcaccatgttggcccggcaggtcttaaactcttgaccccaagtcatctgcctgcctcagcctcccaaagtactgacattacaggtgagagtcaccacgcccagcctcagaatatccttgatactgatacttggcaaggacactacaggaatggaaaagtacacaccagtcttatgaacaaatatgcaaaaatcctaagcaacatattagcaaattgaaaaggacactacatcatgatcaactaagatttactctaggaatgtaagagtgatttaacattgaagaatcaatcattgtaactcattacattatcagaacaaagaagaaaaattatatactcatcttaatagatatataaagagcatttgataagattcaacacctattcatgatttaactacaacaaaaaaacacctctcaaaaaactaggaatagaaaaagacttttttttgttgtttttttaaagacagggtctcaaggtctcactctgttcaaagtgagagtgagaggcaggattgcaggagtacagtggctctcctgggcttaagcaatcctcccacctcggcctcccaagtagctgggactacaggacatggcaccacaactggctaacttttgtattttttgcaaaggtggtatttcaccatgttgcccagtctggtctcaaactcaagcagtcctcctgccttggcctctcaaagttctgggattgcaggtgtgagctactgcacctggcccaaagagactttcttaatctgataaaggtatctacaaaatatctctaggtaacagcatacttaatggtaaaatatagaattctttagaatgtttttctccctgagattgggaacaagaaaaaagatatccattmttttcactattcaatattgtactcaaggtcctagctagtccaataagagaaggaaacaaaaatattggaaaggaagaatcaatatgtaattactcacaaatgacataattatatacatataaaatccagaagaatctacaaatactagaattaagtgaattaaacaagttcactaaatgtaaggtccatacataaaaatttattatatttttatataccagcaataagcaattagaaaatggaattttataaaaataccatttacaatagcaccaagaaaaacccctaagaataaacctaatgaaagatgcacaagatctctatcctgaaaactataaaccacagttgagaaaaattaaataaaacttaaaatgaagagccataccatctccatggtttgaaatacacaatataataaagacgtcaatttttccaaaattgatctgtaaacttaatgcacycctataaaacccagatatttgtatgtgaaattgacaagctgcttttaaattttatattgaaatgcacctaatgtagccaaaatagtcttgaataaaaacaaatctggactgtttacactaccagataatcaaggtaaggatagtcacacagaccaatggaacaaggaacagaacagagagttcagaagcagacctgcacatctgtagtcacctcatgcacaacaaaagcacaactgtaattcagtaggggaaattatggtcttttcaataaatactctcaacttactggctatcacagaggaaaacaaaacaaaacaaaaaccttgaacctttcctcacaccatacacaaaaatattttgagatcaatcagtatacctaaatgttaaaggtcaagcagcaaggcttctagaatcatatattgtataatatcttcatgaatttgggaaagctgtcttawatatgacacaaaaacattatacataaaagattaaattggactgtactaaaattaaaaatctctattcatctaatgatactattaaggcaagctacaaactaggagaaaatattttcaatatatctttcaatacaaaagactcagtatccagaacatataaagaactcccataaatcaataagaaaagacaatttaattaaaaattgtgcaaaaaaaaaaacttgaagagatacttcacaaaagaccaatatgtatataaaaaggtctttaacaacattagycattagggaaaatgcaaatcaaaaccacagaacgatatgactacactcccaagaaaatggatagttagaaagactgacagtacaatgtactggtggaaatgtggaataacttgtacaaccacttgaaaagtatttgggagatcaacataatctagtatcaaagaaaaacttcatgcaaacacttgttaaagatggtaaggggtgggaggcatggtgataggtacaaggaccattgcaaggaggtcttgcagttggggagagaaagtagattaactccaactccaataaggacaagtgggaatttataaccaaggagaagggtggggtcagtggatgaaaaatgcctatgaggaaacatcaaggataaggaatgtctggctaaactgacttgatagggttattgctgaaggcaggccatggtggaaagatgctgagaatggtcagataccaaacgtggggattttccctaaactgacttagcaggattcttgctcaaactggattctgcaaggacagagagggaagcccaaggtcagacctagtcagagaagactcaggatcctgacttaagttttggtcaaaggagggagtctttgtcactagatagatgtataccctgtcacccagcaatgtcactctttgtatatttgcaactgaaatcaatgcttacatctatggcatcttcattcataatagtcccaaactggaaatagtccaaatgttcatcaagagtgggtggtaagtaaattgcagtattttttacagtggaatggaatggaaaaagaacatattactgctacattcaacaacttggctgaatctcatatagaaaatgttatgtcacaatagcgaaatgcaagagtacatacagcatatytctgtttatatgaagttcaaaaacaggcaaaattaacctrtgtggcatagaagtcagaatagcaattatcttttggggggatttactggaagggaatgcaaaggaaacttctagaatgctggaaatattctttggtgaaaggttgtcccttagggtgctaactccctgcatctctggtttctgttatttggcccatttgggctgcctctgacaaagccagatcccagtaccatggtgcagtgatttatctgagccaaaagcctccacacatccattcaatccagacttgggaacgggagagaatggaggagctgcccccacaatctgcacagtgaaggccatgctaaactaggccctcttcctggggaaagctaagaagaaacactggtattaggagatgtgtgaattttagcagcagccaggactctccactgagcaagcagccaagacccagcttgcagggaatgccaagcaaatttggagagcacttaaactgagtctgtcacaccagatgamctctgtcatagggaaatgcagcagctgcagccaacaagggcaggacaactaaagaccccactcagggatgaagggtgggattaccccaacaagagaacaaacaatacagatcaaccaaaatgctgagtaaaagtgagggaaataggtgataaaggagggagattataaaagccttgagaccagctgtaacagcaggcattgcaatttatttcaataaccytcttgccttatgcacttgagcagattgcaattgaccwccactttgaaggagattctgtaaatgattaaacttgtaccttctctcaggggaaaagtgagacagctagtgctcacacacacagaaacacaaatcctacattataatattggagcttgatatgatgaaagtactagagtgaatctgagcagctcagagtgaactgtatcagactcttcttattgaacctcctcagatttgcttggttccatctgtctaccgggcactcagtcatttgctccacctcagtcactatcyactccttgcaggtccaagcagttccactgcctgaggtcaagctgccacctcttgtaacccctggctcctcacataccacaaggcatgggggtctctctttctaagcgactgccgaaagggctggatgacacagccaggaagtctggggggagatgatcayctgtagaagawgagaaggagccaaacgcttttccttcctctctccaaagggctgctccaaggcgtggtttctttgcacagccccttaggagacaacccacacaggaaggcaagggcgcctgtgggctggcctgctgggtgtctccattgcagggcttagtaatgctcctcctttagttgcttcccagccttccctgactcatttccccattccctcattctcactgctctgggattaaactctcaaactcttagcacatatgcctgccttaggctctgttttttagggaacccaggcaaagacacatacatttggggtctgagatatcttggaatctacatttttaaattttgtatgaataataaatgtatatgtattttgatataaaagcatattttggatcatctggacaaccacattataattgagcatttccactctatttcagtgtttcccttttaactgcttaagattatgctagatataaagggtattcaattaggaaaagaggaagtcaaattgtccctgtttgcagatgacatgattgtatatctagaaaaccccattgtctcagcccaaaatctccttaagctgataagcaacttcagcaaagtctcaggatacaaaatcaatgtacaaaaatcacaagcattcttatacaccaacaacagacaaacagagagccaaatcatgagtgaactcccattcacaattgcttcaaagagaataaaatacctaggaatccaacttacaagggacgtgaaggacctcttcaaggagaactacaaaccactgctcaaggaaataaaagaggatacaaacaaatggaagaacatttcatgytcatggataggaagaatcaatatcgtgaaaatggccatactgcccaaggtaatttacagattcaatgccatctccatcaagctaccaatgcctttcttcacagaattggaaaaaactactttaaagttcatatggacaagatgaaattaatgcttatcaccatctgaagaccaaatgaatttatgaacgaagagatatttcaagtatttcaatacaagaaaatggggggcyaatttgaggttccacctgaggtttggcaaattgaaagaatatacacagccactgacagcccataattcatgttcctagggacatttagtttcagcaaaataatttaatgatgttaattggaattttattgactggtaggagctatgcaatagagaaagcagaaatctgatgaggaacttgragtatgctttgcaaagtaagatatacattttatctttactctccattataaaatagtcaataatatctacatcacttgctaatgcttttggtacaaatggatgtggaatataattgaatattttcttgtttaaggggagcatgaagaggtgttgaggttatgtcaaggtaaacaaaaccaccattgtggtaaagaccaccakgagggataactgaatatatggcttacaaaatgtttactgaataagcagaacagtctggattttcctgggcaggagggggttgggggctttgggtgggttggtgtccatggcttggtaaacatttccaagaagtaaacaaacctatcagcggccaagctgcttgtcacctgtgagtgcttccaaggaaccggatgtgggctcccccacccttaccccagcatctggcacagctgaaggcagatggaaatatttacaagtacgcaatttgagactaagatattgttatcattctcytattgaagacaagagcaatagtaaaacacatcaggtcagggggttaaagacctgtgataaaccacttccgataagttggaaacgtgtgtctatattttcatatctgtatatatataatggtaaagaaagacaccttcgtaaccygcattttccaaagagagraatcacagggagatgtacagcaatggggccatttaagagttctgtgttcatcttgattcttcaccttctagaaggggccctgagtaattcactcattcagctgaacaacaatggctatgaaggcattgtcgttgcaatcgaccccaatgtgccagaagatgaaacactcattcaacaaataaaggtaagttcatagtaattatccatacttttttaaaaatagcataatgttgtgatagagagaacatgagtgccctattccagctgcacgacackggcatgtatttttatgtctaagtctcagtttcttcatctgtaaaatggaaataataahaagttaaccattaggattcttgtgtcagataagataatgaatgcaatgcacataactcagagtgatataytgttggcaaytgataaatgataaattgatatgtactgctrtggattatgtcactgaaaattatttagttctatagtaaggcagrgtcagctacatttgacagatattgtgagatgcacagatcctttgcctgattttacccttggcacgagtcagactctccttttattctcctaataggaacccccttccctgtgatcctaaaaggagccccagatgcaaatctctgatataagaacaaccctgaccttctgatgrgagaaaaccttgcattttatcagtcccaattcaagggatcctttcagagattycttgctacctcttatgyagcagaagggaaaggaagaagacttcctgtcctggcaggggtatctataccattgaagaaggtcwtgtacaacaacaaacagctaaaactaagagggaaatgctttataaaagaccgccctggaatctggctgtaacacatccagaggcagtgctgtactagtaacagtattagtctgtaaaatgggaataataataataaatatctcccttatcagattttgtgaggatcaaagtttaaaatgcatgcatataaagggaagctgggtggagtatgtaagaatacggtgcaatactttgcatgtcttctgttcatctaaatttatctcagaactttaaaaaataactttaaaaatgcatgcatagtgcctggtacatagtaagagctcaataaatggtggatatagtcattggctctctctagatggaaaattaatagaacaagggcccagagggatttccccagagatccactgctctaagcagaggcaaatatagaaagataatgtttggaaagaaaaccatctctacagtgtgtggttagagaattgcagcagtaggggatagggatagggaacagagtggagggtgtcactcaccataaagcttacctacttaacccaaagaggatcaggctgtctgtggtaaaagggagattcagacctcttgaatctctcaatcatctaaaatgttgagtgrgtttttgattgtttctaaatttggaagtggcatcagcaaacatgtgaccagtgtgtttcagtctctggctagacagtggggttcagcaatatgccagaaggagaatgtagatgccgtattcatcttcagtgaccgtggtaatttgtatctacagtatatagtgactagagctttcaaagtgcttcyactycattgtccttggaggttttcctcccgagatacgtacttctcgctacaattattaaattgtctttccagtatggatcctaaagttgggggtgagataagttggcttccatcatttccttstctgtaacaagaacactttagtgaatagaatgctcaaagtccctaactccttcctatttgatgttccagatctgcagagttgagggacctcgttgagggcttggccacctttcccaaccattcctccctstactccaacaaccttmttgctgatgagagactctcccctggtgcccctgtggggacagaagcccctaactcagcttttaaaatatttgmttcagcaggacagtccccagatttccccacctacaagagcagttaatcgctctgcaccacttccatccactgcattcttgctaatattagcagggggagtacacgtcacaagatgaggaagggagagtcagagagaaactctctcttcccccgtcaaatatacatacacacacaccacacrcacaagytcgtgtgcacacacacacgcccatgcacacacgcagacatacacgcacacacgcacgtcagaaggtacacagtagggttattttggagtctctgcaatgctcagcaccccaggcactgtgcctgtcttggcagttctataccactttgccatttactaaacccactttatttatccatttgtttgtttattcattcaacaaatatttacagagcatctaaattatgtcaggtactagaagtccagtggtcaatatactgtccctgtcctgaaggaatttctagcccattctataaactgtcacccccaaccttctctcagcctaagagtctaaatatgtattaggatatgaggtcattttctgaaaatctgaaacagatgccaaaacaaagatcccttattattgtttctattacaatgtggaagacaagagcatttcatggtacttattcttcctgggagacattggaaattcacatttcacaagtcaaatggtaaaacaatactvtaatatatgaagttttatacctacttttcaagtttttggtgatcttggctcattttttaattttattttttaaagtgacataatattaaactctcctagtgagtgttaaaaatctgggagttttagaaggagaaaatgtaaatcattaagaacacttaaaaaaatagaggcaaccattattatcactatttgaaagggagaaattgaggctcagagargtaaaataagttctttaagtttaccscttaggargaggcacagcaggacttacccrtgcactaacacccaagtgctgcttccccataaaatggtgaagcatttctgctcctaacacgacccccactaggcaatggagtctagtcactctggtctgttccygcaaggactttgctcctgcaatgacccctttttcttttacatttttgtttttttttttcattagcatagaaatattttataatataatattaaaacaaacaaaactgtcttgtcctgaagtccacttccagctgctgcctatttctccattcccctttagttcacagaaaaacttctgaacctgttgttgtctgtatttactgtctccactgcctcacctcccactttcttgaaaccactcttacggagctgctgtatttattccactactagggctcaccatgctgccaagtccagtgatcagttcttagtcctcatatgaagtgatggctcagcagtgcttgacaccgatgatcacgccctcctccctatagctctctcatcccacagctcctcatttcctctgcaggcactgactgcccttctgaggcccctgtattggctcctcctctttctacctctgaatgctggggtcccccacattccctgggctcagtcttcagcctcttttttcctctgtctatgctcactttcgaagcaaatggttttcaktcctaacagatacactgccccctttctataacagtatcttctatcactctccctactctctcgtcatarcatatcacagggaatctgcagacacatttataatttaacgctgcagctatttcattttagagaagtaaaattaggtgtaatttgaaaatatataattatgctattttcttatatctcttagtaccacactgcacaaaaaataaatacttctatcagcacttggcaaagtttaaaaaaaagaaaaatgaatcaataaataaataataccacaacatttagtattacatttaatttgacttagtatataatcccaaaattattacaggagtcagcaggtgttaaaatcacattcactttttctcttcattactacttgctgtgagaccttgagaattatactaagtctcagtttcacccycaaagatttgtggattctcaaagaagcaagtgaaacgmatagctaatattttatacttgcttgtgygaagtaaacactgttcctagcacatcrtatgtttcactttgttcctcaccacaaccttatcagccagtcmctataatataatattccattttgttaatgggaaaactgaggctcagaattagaaattgccgaawgtcccacaaaaagtggtgcagccaggattagagtctgtctccagagtctgcattgttactgattactyggtgacacagaatatttggtaaatgctctcaaagcttagctattattattaaaaggtatttctatatttcttcttcccatcttaacaaataacaagtttttgaaaatgtgaaatccagatgtgaatttgaatgactgataatttaatttattttcagtcaattgttacgtatgttttctttttcttcccaggacatggtgacccaggcatctctgtatctgyttgaagctacaggaaagcgattttatttcaaaaatgttgccattttgattcctgaaacatggaagacaaaggctgactatgtgagaccaaaacttgagacctacaaaaatgtgagaatatcaagttcttctttaaaattccactttctcctgtaaccaagattttttaaaatcaaaatattctagaatcaaatgtgattgtttgaaacttactccagtacgaatatggttaattcatttgctgaaactttgtgatgataraaactttttcttaaatttcaggctgatgttctggttgctgagtctactcctccaggtaatgatgaaccctacactgagcagatgggcaactgtggagagaagggtgaaaggatccacctcactcctgatttcattgcaggaaaaaagttagctgaatatggaccacaaggtawgaaatattctaccatacttctcatacaatttaactattttatgttcaaagtgtatcaacactagcattatctttgtgagtaagcatgtataagccaaacaattagagataaaacatcatagcatttttcacttaaaatagaacatgcatttcacttagaatttccagcatttctcagctatgaatttaatttactttagatacatgtataaatacggtattttgaattctcgtaaattattattatagcatcatactataactgtaaaagaatttaatttgtattaagtttctatggatatgtaaggagacaacggaattaaatcttctacctgcaattcatacaatagccaccagatggcgtatatgtgcagtgctctcagacgtgcattcaaattatatatgaatcttgttaaaatgtggattctcctttaggaggccgaggcgggcrgatcacgaggtcaggagatcaagaccatcctggctaacacagtgaaaccccgtytytactaaaaatacaaaaaattagccgggcgtggtggcggacgcctgtagtcccagctatttgggaggctgaggcaggagaatggcgtgaacccgggaggcggaggttgtagtgagccaagatcgcgccactgcactccagcctgggcgacagarcgagactccgtatcaaaaaaaaaaaargggggggattctcattcattaggtgtgggatgggactcaagaatctgcatttttaacaagctcacaggagatgttgattctaccggtctgtggatcacactttgagtagcagacagaatacctttgcaattcatctctcaaaaacatgtaactaaagaaaaaactccaatgataaataaactttatcatttgtatatgaggtacatataacaattattggaggaaatattaaacaagtaatgacatatatataaaatgtactttccaagaatcaaatgtgactctttactaaataactagcattagatttctttacctcaaaaaagatttggatccmctagaaccagcttgattttttttaacatataaggcacagaaaacaagcaaacaaaagaacgctatccaagccccatccccaaacacactagagcgcttaaagacctggtcaaaaggatgtgtcaagcrtacctctttgttgttctacaacacatttcacctccataacaggaacagaacattctcaatgtatgactcaacaaataagtgttgaattgattgacctgactgccycatcccactcctgagcccactccagccatcatgatcatatataaaaccattycttaatagtgtttcctttctgtattgtgactccactccaactctctcacaatcatctttaaagagaccaccaatacctacagaataaagtcccaatccttagtgtgggatactgagtttccacagaatgccccacctcacataaccytccaaattcagccttccttggaatttacattccagaaaaactgagctgtacataagtcattcactcaagtttaacaaatatcactgaatgcctgctaagttctagacactatgtgcccagatatgacagtgaagaagtcatattgtcwgtcctcatggagacaattttctattgtgggagactggcaagtaagtagcaatgactgtttatcattgtaagtgcctaatgggagatggtgaaatgcaaacgcggagtactgggcctaagatgaggatttcagggcaggcttctaggcacatagaagcttgattttcaaagaagaataagarttatccagacaaagatgggaaggaagtattccaagctaaggaaacataggtaaaaaaagaccagagttgaacaagagcatgatatgacctaggaaaaaaaggagttcaggaattcatcctaattctagagtttgggaagkgagtggagaacagcaagaaataaggctgcagagaagagcaggcctgaggcatcagggaccttgtacaccatgttgagaagttggacttaccctgaaggatggagacatggaggccaatctggtgactattgcagcaattcaggagtaagtggcaatgggcctggaaaggtgagaatgaataaaaaagacagagatggagtaagcasaccttgaggtctgatgggataggagccatgagggaggagaattggttgaggatgctgccctggctgctgtakgaatgcctgggctcccatagccgcctttgctgacctctgtcatcatacctgtaccaccaggcattttagcttctaatcacacatgccctccactacaccaggagctatgtgaggatagggcagctgtttgtgtctgaataacggcttggcacttactaggtgcctgattaacatttgataagccaaaataagtatttatattttaagaaaacgtacagttatattagatctaaagaaatcaagtctttaatttaaaaaattaacacagcaaagcataaatattccaaacattgctttcttccagtgtgagaaggtaattttgccattcttattgtaatcagttttttaaaatactttctcacaggtarggcatttgtccatgagtgggctcatctacgatggggagtatttgacgagtacaataatgatgagaaattctacttatccaatggaagaatacaagcagtaaggtatgtatattttgatttaacttgttccaaactattttaaattgcaacctttttttcttgaattgattactttaaaaaatgtgtgtcctggcttattttctaattcaaattcattcttagtgccttctttttcagatttccacaaaactaccattttgtttactttacaagtgcttcagttaattgaattattcactctgcagctagaagtcatttgcctccttttttctttttttttaactgtaycaactataaaaaatctacagttgctgtgtttagtgtctccatcatcccataccagcatcagtgacgtaagcagagctaatgaggctcttcggtgccttcagggcagaataataatatcttctttttttgagaaagggtcttactctgtcacccaggctggagcgcagtgatgcaatcacagctcactccagcctcagcctcccgggctcaagcaatcctcccacctcagccccctgagtagccgggactacaggcacacattaccacatcagactaatttttatattttctgtagagatggagtctcaccatgttgccaggctgatcttaagttttcgtacaggcagggtgtccttatgttgcccaggctagtgttgaactcctggactcaagagatcctcccacttcgacctgccaaagtgctgggactacctcwgacatcatggtggcgtgagccaccatgcccggcccagaatggtatctgtgtggactctgtcagtatgaatgggcttgggagggactgtgaaacttatctgaaaaacaatccaaatatcaaagcaaaacagaaactcctcccagtttgaattaaaccttgcgcgatgtcagtagaaatcaagtacaacacttggaaagaacgcttggctgccatgaatttatgggctaattcttgcagccagcagtctcagtgcacaaaaactgctttagtgcaaacagaagtgatagggaacttcctaatttattttaaagagttagtacaactcagatactaaaacctgacaaatggaatgaaaaaattctgtagctacaggctctctaaaaagatagaggcaaagatttcaaataaaaggatagtaaattacatctggcaaaattaagggaaaaacaaacatattaaagccaagtaagaatgtcttccagaaatccaaaaatgttgtaatagtaagtaatgaatatagtatatgaagaaaagaagaaaataaatgattgttccaatagattctcaaaagaaacttgataaaaacgcacacttattcctgcatttaaaaacaacaccatctttttaagtagaagttggtacaacaccctctccatgtctgcttccggtcttgcttgcctgatggccctttaaggagatgcactcggctttgattcctaactgtcttgacctagtacaattttttcaaaaggggctcagaacacagatttggcttccatttctcgcacaggaccattactgctctttacttttctctttctttataacagtcagactctgtacacttggcccatttccattatattatgcctcattgttggatctcttcaggcataaagagacatcaagtgggccgggcatggtggctcacatctgtaatcccagtactttgggaggccgaggcaggatcacctgaggtcaggagttcaagaccagcctggccaacatggaaaactccrtctctactaaaaatacaaaaaaattggccatgtgtgatggcacacacctataatcccagctactcaggaggctgaggcaggagaattgcttgaacccgggaggcggaagttgcagtgagccgagatcacaccactgcactccagcctaggcaacagagcaagactccatccccccgaaaaaaaaaagagagagagagagacatcaagtgcactgctgcctcctagagccatgcacagccttcctgatgccttcggcctgtacactctgcactacatggaccacagcacagaggggcttctctgatgcaatcatacgttgctttgacttttcaaacccagtgggcaccattccaaacctgatatctctttcccagttctctttcctaagcttccagmcagttagacaccatatattgccttggcagwaagggtgattagtagtatttccttctagagatattctagaaatgagtacatatacaacacatttttctttcracagataagacatgatcgccatgtcctctttaaaacttttaatttcaatatattaataatatgtattgctcattatcttccaaatttttaaattatttttaaggcttagaagcaatcacacaaataacagcactgcccaggacaggaggttacttcattcatatgatacagaacatctgttcaaagctaacaatctacctcatatttaatagggaaacactagagacactgccaggactaagaatagccactattatcacaattattcaatcttgcttaggaaattgtggccaatgtaataaaactggggatgtaaaaagatggaaaggaagagagaaaatcattgttatgcagatgatctgtgatccacttagaaaacacaaggaaataaattgaaattaaaattgacaagggaagccaataaggtgaccaaatacaaaataaatattcaaattacttttccatatattagcaataaccagttcaaaaatataatagaacaatacttcaagacagcaatgaaaggtatrataaaagtagaaacaaygctaagaaatgtggaagatgtatttaaagaaaactataaaatccttctcaaggggttaaaagaaaaccaaggtaaattgggaaacattcaattcatggaagatataaacgcaaacaaaattcatatatagggtttatgaaacgctaatcaaaagtacatcaatttttacctcattaaaaaaatcyaagagttcgttgagtagatagtagctaagatcattttgggaacaagaaagtaataaagggaattcytacttttcaaattttaaatatgctataaaactacattaattaaaacaatgtgagccagggcacagtggctcacgtctgtaatcccagcactttaggaggccgaggcaggcagatcacaaggtcaggagatcgagaccatcctggctaacacagtgaaaccctgtctctactaaaaatacaaaaaattagccaggcgtggtggcgggtgcctgtagtcccagctacttgggaggctgaggcaggagaatggcatgaacccgggaggcggagcttgcagtgagccgagatcatgccactgcactccagcctgggcaacagagtgagactccatctcaaaaaacaaacaaasaaacaaacaaacaatgtgggcagacattacacatatgataatttagttattataggtagaattacaagtctgtgaagaaagataggatttcttgagatagacaattttttaactgtgtggggaaaaaattaacagactcttttccaattggatggactctttaaagataaaaagcagaatgataatgaaaactagaagaatgttaataagtatcaaatccctagataacaaaactctttcaatgcattcaatcattgaaaaatataactaagagaataataaatgtggctacatataaattaaaaatkttgttgcacacaaaccaaacataaactaaataaaaaggaaaaaacagaaaaagatatttgcaaaaacaraaaagaaagcctttagaagcttagtattgtagcacataaagagcttttgaaaaatcagtaaaacagtaacatccaaatagaaaaatagacaaaggagaagaatagataatttacaaaagaagaaattaaratgcccaggagtttgagaccagcctgggcaacatggtgaaaccccttctctacaaaaaatacaaaaattggcctggcatggtggcacatgcctgtggtcccagctacttgagaggctgaggtggaaggatcacctgagcctgggggtgaggttgaagctgcagtgagccatgatcacaccactgcattctagcctgggcaacaagagtaagaccctgtctcaagaaaaagaaaattaaagaaatgaaataaaaatgtccaataataaaaatgttcatacttactagtaatgagagatgtaaatttgatagggatgagattcatttattgtctagtaagttattgtcagcaggatgaaagctctcacagatggttgttagaggcataaattcatgcaacttttctggaaagcaatttgggtgacacatatcaaattaaaaaaagtcttgatcctgtgatttcatgtttaaaaatgcattgtaaggaaatgatagagcagctgtatcaacgggctttaaaatgttcaaacttttggatatagtaattactcagggaatcaatcacagggcaaacttggaaatacagtcaaaattggatatgaaattttgtttattcattgatgttttattttagtactgacaaattgggaggggaaactaagttcaacaagttagtctgaatacatatgatagtattaaaagatataaaattattaagatcacattttgaatttttttttctttttttttggagacagtcccaattgtgtctcccaggctggagtgcagtggcgcgatctcagctcactgcaacctctgcctctcaggttcaagcaattctcgtgccttagcttcccgagtagctgggattacaggtgcrcaacaccatgcccacctaattttcattgtattyctggtagagttgggtttcgccatgttgcccaggctggtctcaaatttctggcctcaagcaatccacccgcctcagcctcccaaagtgctgggattacaggtgtgagtcaccacacgcagccacattttgaaaaatattaaataataatattaaaaaattaaatatgctaagttttttttaaagcaggaaacaaagctatctgtgcagtgagtgttatgttgatatatacaaagtgaaaaatgcttcaacttggtaacagtagctcatttctgatggtgagacatgtttttttcttttcttcatgctttttgccattttccaaattttctataccggtcatgcatggktatatacttaaaaaatacaattaaacaataaggtgtagggggaaagcattccaactataatagcaacaaaagtcataaatacctaatacatggaaacatttaaaatacctatgaacataccagaactctacaaaaaccatgtgaaataaactaatcagaaaacaaacaaacaagaaatgtcagcaaatcttttgtgggaaataaaagagggctcttgacctgctagggatgaagggaatagattcaaaggtgcctgaggacttagtctgtattaatgctaacaacagccctaagccagacttggcttttctgctgcgtagaaatacattctgataccatttttgcaatcccctcagatactttctggcaaacagaaatgactctgatgacaatttaacamttttgctatgatgggatgtccttgtttcttggatcatgagaggaaaatcacagaaaggcaatctgtcagaaactgagcatagactctgaccctttgaaatgacgacatcacctaaacatctaaccttcctatattttcagatgttcagcaggtattactggtacaaatgtagtaaagaagtgtcagggaggcagctgttacaccaaaagatgcacattcaataaagtwacaggactctatgaaaaaggatgtgagtttgttctccaatcccgccagacggagaaggcttctataatgtttgcacaacatgttgattctgtaagtaccttgttctcaccccctcccccagattcttatgaatttagtgaggcttttactccaagtgctccaagggagaatcaaagtttagagaaatcatcagygagcagtggattatctctgggacaagctgggtgtgcaagtcaaggataaagtcctgtcttccttccccttaccctcctcgtgtccacgctttcttctccatcatctccctcccactagtttttagttcaagtgcttaggattactttaaatactcacaaaggcatacaagcacacacattcttacttaaataaggacttaacccagggggattaggcagttccttttattagttaataaagacatgatcagtaggctcttgatttaactttcagagagctcttttcagactgcatgtttgcttttggttgttaactgaaattttctatctttttaagagtgttggtwacattagggagtttacacatagtttaaatagctttaaatagttttaaaattcttaatktttttaatgaataactggtcatmaaatgaacttggccagttattgatattactgctaaatatataaatcagaaattttgygcaaaatgagattgaaggcatcagttaactgacttcagtgggaagtctctcttrtcttccagtctcatataaaattacattttccttytggaatagagggtgcaataaattgcaagagtctgttcaacwggaatggagcataagtttttaaaatgtgatgcaccatggctcaccaggcccatcgtccttcaatttggcattgcagtccattcccaggcctattcagaaacttccaggaggaggcccagattatatattttaaattagccacagagttaaataygatgcctagtcaggtgtggaagcctctgcctggggtttacacaaacgtttttcaggtctgcttcctaaaaagtatccatattgataacataaaaacattaccgaaacacatgacctgaaaaacgcacataaagagaaaaatgttgtacaactaatgattactttctaaattaatagcatcccagatattaggatttgtaattgcatgataatattgtaaagtcactgagaggaggaatcatgttacttttcttttgtatactatgccttaaaaaaaaaatcccccacaggcgagagatataaatactagcaagtgttatatgacataagaaaggtaaaggaaccatcatttattggctgtgttagtattgaccttagtgcatatattctcatttatttcctgcataataactatcactattttgtagatttaataattcaggtgcagagaggttaaggttactcaaaaaataacaaagtcatattgagtttttgttatgtgtcaggcactagggctaaattttgaggaagcaaaatttagtaagcaggtttctgtaatagatggtgtattaattcattttcacacctctataaactatatctaagactggataatttataaatgaaagaggtttcattgactcacagttccacatggctagggaggcctcaggaaacttaccatcatggtggaaggcgaaggagaagcaaggcacaccttacgaggtggcaggagagagagaatgcaagggaaattgccgcttacaaaatcatcagattacgtgggaactcactcaatatcacaagaacagcatggaggaaaccatctcgatgatccaatcacctcccaccagatccctccctcgacacgtggggattacaaatcaagatgagatttgggtgggacacagagccaaaccatatcagatggatttacagtccagtaagtgcactgcaatgttaaaggggccttattgaaatttctacaagataycgtgaagctataaagggtggaatggaaattctcaggaggaagagtagaaaatggagaaacatttcggaagtgactttttggctgaacatgaaggtagagtttacaacgtagaagacagaggaggagcaatagagatgccaaaggctggcaagtttgggaactgacaggctatagtggggtaaattagagacatggaatacacagccagaatgagaatggagaatgaagcaaagctccaagtcatagagtttgccattggtatatgaagagtggattgtaatgtatgaacaattaaagcagaggagtaagaggaaagactctcaggcagctgtgaggtggamcaaacagagaggaaacragatggaaaagtcacaaagtaaactgcaatcrtctgagggagggactgtgatggcttgggtgatggatatttcattggagatggagaaaagrtrawgaaattgagatatagtgaartgcactggtcttgggtactttttaggagggaaaaggtaggaaaacttccagtttcctaattttggtgatggggtgcatagtggtgacatcaagttaggaaatacctgaggaggaggagcagatgggagaaaagtgataaggtcaataatgaacatgtggagtttgaggcgcatgtgagacatccaagtggattttggagagagctggaacattgggagttgaaggttrgaatatagtgtgttggtaaatgagtgagaagtaaggaagtggagtttggtggtataagggtggagagataagatggttccaagagaggaatgctggagagggtgctatggagagagcagtgatggcttgaaatggtaaatttgaggagtaggaaggaaaccaaaaagaggaggtaaatggattgctgaggagcactaagggtccaatgagattgaaggcctggtttaaggtaggaaatctgcattattactgtgattttccccagcactgttccacagtgattgtgcaattgagccaaggttatgcattagcagagcagacaggtctaacaaattattaaatattctaccacatagtttaccattatctatataatttcattgacaatttcagatagttgaattctgtacagaacaaaaccacaacaaagaagctccaaacaagcaaaatcaaaaatgcaatctccgaagcacatgggaagtgatccgtgattctgaggactttaagaaaaccactcctatgacaacacagccaccaaatcccaccttctcattgctgcagattggacaaagaattgtgtgtttagtccttgacaaatctggaagcatggcggtatgttcaatgagtcttggtcttctggatgctggtcacagatatgcatgttctggaccctgactcggaactagttgcgaataaacataacccgagggccagaatagttataactgtaacattgtcttcagaaatgcccacttcaactttgttcaacaaaggttcagcatcaactatctcatttgccaaattgaattaattttcaatttatgaaccaagatctgatgaattatatgagcttaacatttttaatgtttcactgacaatatataagtctataggtccatagtcttatatattagtctgttctcatactgctataaagaaatacccaagactgagtaatttataaaggaaagaggtttaatcaactcacagttccacacggctggggaggcctcaggaaatttacaatcatggtggaaggggaggcaggcatgtcttacatggcagcaggagagagagagagagagagagagagtgcgcwatgtgggaagagccccttagccccttataaaaccatcagatctcgtcagaactcactcactgtaacgagaacatyctggaagaaaccacctccatgttcctcccacctcccaccaggtccctccctcgacatgtggggattatggggattacaatttgagatgagatttggttgaggacacagagccaaaccgtmtcacctgatacagaacttacctagaattattactaatgcattgaactttaatgattatgtaatctgtttttatcttttactatttatactctggccctaaaattctacccaaaggtgctgctaaatataaataagaaatttttccccataggatatgcctcaagtaagcttatggtcatttgctctacattaaggcagccacttccaaattccctatggccttttctgttattagtctttccatctaaacgtaacctgtttttcttttgcttctccatttagactggnaaccgcctcaatcgactgaatcaagcaggccagcttttcctgctgcagacagttgagctggggtcctgggttgggatggtgacatttgacagtgctgcccatgtacaaartgaactcatacagataaacagtggcagtgacagggacacactcgccaaaagattacctgcagcagcttcaggagggacgtccatctgcagcgggcttcgatcggcatttactgtgagatgtgtttktctattgtagtttggaatgtttgcaatttatgttgcttaacaaacttccatttccagtgtttccatacatgcctagggtccaactggatgagataaccaaggagcaatattccatatttacttggagactgtttagccacatgaaacagartaggaggttgaaaggggctggcaggcataaggtctcagaaccttgcagtgtcttaggcaggtttgccctaagcctgctatttgggcacatcacactcaatagtgctgttccagtttcccatgtggcagcaggaatatgtagtttccagctcacatggcctgatgtggacaatgggcttgaccatttcctcaagtgctttctgtctctctgaccattttggtccactttgaatatcagttccctgaaagtggtttctattgcatacacagtcagctatgaaacacttctccagatgcctgcgtgcatctgtgttttattacccctgtcacccacccaagctttgactaagggagcaaataagggaggaaaacagacaatgaaatcactgatgtgctgtaccaaacccttgctgtgcaagaccctaggggagatgactaatgccagatggcgtggtggtgaagagagaacctctgattctgcatcttccattcagatgagcgagagagagagagwgtgcagtacaccagtggaatttaggatgccccctggggtggagtctgggtgtggggtgggagaagctcatgtggcttcagggtgatgaggcaaaggaccwtggatcttatactgtgttcaagatccctgctagtccctgctgcaggccctggtcaggtctgccctgtgctccttgcagtggtgtctgctgtggccatattagtttggcttgttctcttggcttgctcagggcccagtagtcctcctccactgactcagccccaccctggctctccccgttggagcagagccctgagcaccaccctatcctccatccagmctctagccatactgtatactcctcagcctctgtggcaggattatccttctctcacctgccaacacccaactcagctgtcttctgtstcctctttaggatatgtggcaacatttgcctgttttccatgacacacagcagttatggggagtgcgacaagaaaatccaaattgggcctctctggcctgcagcttagtaaggccaaagccgtgatcacagctgacaggcttctgggctctgggctctttgacacagcaacagcaacagtcactgttctgttctcttctagggagtcaaggtagcctcctctaatagctgaaacagtgagtgaggcggaaacctcctctgccctcagctttcccttccaccttcagaggacrccttcttttctgagattctaggcctttggaagatgccttcttatctgagattctaggccasagatgcttaggcttgatttcttgtttcccctaattctgggtctctccttccactccgtttaggggaagagtggactcttgctttctcttcttaaatagatagcattattcttttatctaattttcctcccgtcctaatcttattcaacattggmagaaggagtatcctgtctataccatataaaaaamtaaataaataatccaaatataccaggagtagttgagacataggtgtcacagaacaactaggaactgagaattaatggaaatgaaatgttttgctttaatcagaaaggctgttaaaaatattgacaactcatgtgacctaggtaatgaccaatcagaaccaatgccagccakaaatagctggtattgtcagactggtgaatatcatataagttaaagtctgccctgggtctaatatccccccaatataatccccattaaatgagatggtttctgaaggcatcttggaagctctgaaagcctatcaaggagagaccaagtgaaggaaactaggaacacctyctttgctgtttccccagtgcygtccacccctagagttgccctgcatcccacaccrtccctctctgcagcagacyagccaaggggaaagacagcggtcaagttccatgaatgctgctgggttaagattgtatcatttcaagacagacagatatttggtcattcccagacaattttggttattccctctagaatytcttttctcctttcctgtaagcagaattttcataaacactttggccaccctaagtctgataactcgtgccctaaattctgtccttaggtgattaggaagaaatatccaactgatggatctgwaattgtgctgctgacggatggggaagacaacactataagtgggtgctttaacgaggtcaracawagtggtgccmtcatccacacagtygctttggggccctctgcagctcaagaactagaggagctgtccaaaatgacaggtgagggatgatttgctgagacccccggtattgtctctcctactggactgtgagctccagtgaactggggagtgggggaaagatgggatggagagagataggataacctaattggctaactagccacccttacccctgaatgactgtttaagtggactctgcccatttattttaaagctttgtgtmtaggactaaggcagcctggagaagatggaactagcacagcactctagtgaggactcaggaccttcttcccgggccaggaaccactcctttccagtggcagctggccaagagacctaggggagacagatgacaagccactaactacataacaccatggcataagtgctatattagcaacagaaagtacaataaagcacaaataagggaggctttaactttacctggagaaaaagcattcaagaaacaggagaagtagcagggaagagcaaagggcatgttaaacaaggcaaaagatcactcccaaaatggaatacaatgcagttcctccataaaaccttcacgtattgtgtgtctaaytcccatacacagacagatggttaaaatagattccatgtgtcaccagcttctttagcagagtaggtgaacacatatttttcttttttaacttagggataatattgtggatctcaattattatactgagttgccttctgaggccactaaaatgccagagctgtttattcctaatactacctgtcctaggctgggtttcttagaagcagagcctgagacagggatttgggtccatgcaatttataggagagagagctcttaggagaaaaggaaggaggaaaggatagggccagggaaggagctaagcactgatgcagacctagtcrgagtctagctgtgcccacaggggactctggaatggaaagtacatcacagacttgtctcaccttgagacaggagggyggccttttgcaccattgtgtctatcagtctttggctgtggactgtcagaacagggcagaggagaggggcatgttatttctctaggtagggtggccccttttggtaagataattccctggaagaggaggcagctataagccaatgcctagagcagctgggaagagatgcacttggctgggtaaggggatgtgcgtggggcatcmacagccttactgaaattatttccttaagttcagatggaattataatagttaaaaagtgctttcacatcaactaacttagtgacacctattctaaatagcccaggactgyctggcctggtgtaaaatcctgtttttataatatactattctgtaastgtccctttgtccactgttwtttcttgctgctgtcacatatgtgcctttcctcatttagaagaaaactctaaagccacgyttgttggaattatgtttcaaataagagtaaatcgatagtcctggagtacggcttaatgacttctctcatgtaaaagtgcaggacctttaatatgtagattttatgacatcaatttatatcataaattaatatcaaatcatatcagagattcatggctgctttgcagatagttgaagtagccaggtgactgagatgttgctgaagctattatttaytaagatttaaaaattagtggctgggtgtggtggctcactcctgtaatcccagaattttaggaggccaaggcaggtggattkattgagcccaggagttcaagaccagcctgagyaacatggcaaaacccatctctwaaaaaaaaaaaaaaaaaaaaaaatacaaaaattagacatgttggcatatgcytgtaatcccagctacttgggagctgaggtaggaagatcgcttgagcctggaaggtggaggttgcagtgagccaggatcatgccactgtactcyaccctgggcaacagagtgagagcctgtcttagaaaaaataaatargttaaaaaaatastatcaaattctgagttaatgtaggcacctatttgatgttgatctatttatactttaataacacaaagggatatttatattgtatgctctctaaacaacagctaaaatgttgcaaatagttgctttctggaaaataatttctgaaaatgtaattgcattttaggaggtttacagacatatgcttcagatcaagttcagaacaatggcctcattgatgcttttggggccctttcatcaggaaatggagctgtctctcagcgctccatccaggttggagttcttaatctttggtttttcatatttacacataatcatagccaagatggagaatttaatggctaaaagttttaagttttccactcttctggtactgaattaaaatgaaaatagaaggtccagcttgatattaaacattattcctaaaatgcaacactactcatttaaacaaggcaattagtgtctacttgtttggaagcaataccaagtgaattcctcacagaartcagcagataaaatgtcatatgtccaagaattcttttttaacatctctgaacaagcaactagagcaatataattggctcagaattttcttcagagtagatcatctcaattacaaattttctgggacaagtgtccagggattacttgctttatttttccattacatcaaatttctgttgtttgccaagatttacatataatggacagaaagwgctttgtactgtaaaaagccagtggtgtgagtccagacccctggatcttggtcctcggtctgccattaactatgtgacctaggcaaagaacttcacctctgtggaccttcatttctccaccaggtakagacagaaaacttccaatggcccatctggttctaaaatttcaagaaaaccaaattgccttttaaaagtcttgaaactattaagaaaaaagaaaaaatgtattttttcaatgctcttttttagtaattgcagaaattattcacattaatttttaaactagagagagtgaacaatcagcattcacactggtgkgaattataatttttatgatgaaagttcagataaagataaaggaaaactgtaatgtcaaagcctaataatgagagattttgaaaccataggctttctggcttaccaatggagyatttattcaatctaggaagacagcaattatacccatctgggttattctggttcagatttagaaaattaaatgcaagggcctgctttggaaaagggaggaatgtctcctagaaaagtaattaaagtgataaaaggacaagttcacatttaggaaatttctgcctatgatttttgtatttaagaaacctaacagagagagagagagagatggagaaatgagcaagactcattcaccagtgtgccacaagaaccagatctaatagcccttcgctttctccacwtgccagcttgtgatctacctgtgaaactaggaaatctggctctatgaccagcccactctgtcttctaataggtgctaactctgagacaataactacctaggagataatcctcaaaatcacattttctaaaaaagccttgttaatccttccttacctcactcccactctgcagctcccwcattctattccaaacaagctggccttggcttatgtcatttayctccacagggcctgcaatactacctgacttagcarttaggtaattcagmcaatccatgcgtgggtaaaaaataagtcmcagtgagtccccttaagggttcatagtctaataaataagatgagcttcatatmccaataaatatagggcgaagcacaatatgatgaatgtcgaaggattgatagaaataaaatcctataggagatcagaggaaggggagattttttacaactggtaaatragatggacagcagagaaaccttcatggagaaagtaatatttgaattttgaaggatgggtaaggcttagacaaacagagaagactaagaaggcttagataaatggagaagacaaatgtaaagccttctaggaaaactaaagagtacgataataaagtcaaagagtcagggattcacaaggaccttttggggagtggtcttgtttgggtggaggatggaaaattgtggaagctaaggctagaaaggtaacttagaactgcatcataattgctcctaacaccaaatcaaggattcaggcatcactgaagtctttttaatggcgcactggggagacaggggcagaagggaaaagaycatgtgatgggagctgtattctccagaaagtaagagctgtttttcttaacagcttgagagtaagggattaaccctccagaacagccagtggatgaatggcacagtgatcgtggacagcaccgtgggaaaggacactttgtttcttatcacctggacaaygcagcctccccaaatccttctctgggatcccagtggacagaagcaaggtggctttgtagtggacaaaaacaccaaaatggcctacctccaaatcccaggcattgctaaggtatggagtcagctttttttctttctcataattcaacaagataaaataaagtttttacagaataattgtagcattttaaatgttggtggttgctaaaaggagagtcagtattgaatcaaagagagaacgaggaaaaaaaatmtccatccaatgaaaatcactcagtatgtcagcaagtaaagacaaaggaaataggtgatattttgtccaggtactaaatggagaacctttaaattacatagtaatcaagatgcaaaatgatcctcgacattttgggatcataaaagttatttcctttatctcagagactcatctcttataaaaccaaggcaacaataagcatatagctttcagacctcaccatccccctcccacccgccgtggaattttcttgacaatgggaatgatatagttagttcaaacacactgaagctccccgtggctgacagagtatcaaacatgcacacctcttcttagatatgcttccaacatgcttatatcagagggttttccygtacgtgacattgaagtcaggtctgtgtcacctgaagttattcattggaaatgtttacatgtgttttggtcaggttggcacttggaaatacagtctgcaagcaagctcacaaaccttgaccctgactgtcacgtcccgtgcgtccaatgctaccctgcctccaattacagtgacttccaaaacgaacaaggacaccagcaaattccccagccctctggtagtttatgcaaatattcgccaaggagcctccccaattctcagggccagtgtcacagccctgattgaatcagtgaatggaaaaacagttaccttggaactactggataatggagcaggtaatcacccaagaaattggaagatatttatttctttttccaagaagcaaccagggaatgccaagagggcatggtctggtgagggcagttagacaggcaaggcagcacagcactgaggtctggttgggagagttctccatttccccacaattcctacatttcaaaatgctggaaaacatgagggcttctgcaaggyccaaaacacattaacagctcaagctcaatagattcagtctctggggagttgccatagggtrttccacaacccccaaaaaaggaaaagaggaaaattaataaccatattgtgttaggtgctttgtatatacacatacatacatacacacatatgagtgtgtgtgtgtatacacaaatacatatatacaaagatgtatataacctttgtttttataatatcttcactgaggctttcacatttagaaagcagcagagatagattcaagcacagtcctatatgattcctgtatctatgcagactctatattagcttgccccaaaagtgaaaattctgcccattattcttgtctttaagaagtctatcagggagagagagaaagagaattctacagtttaaaaaaaaaaaaaaaaacatgtctgcttactgtgaagcaagtaaccttaatagaatgaatcctgtgaatgaatttcccacctaaatctaccctggggagaagtgatgaattttattaaataatcatacaacatttttttcttccacatttgcatatagcagtttaatttagttcaacagatacttattgagtagttaccttgtgctacattgggtgtaacacagaaacgataccatcttagatttcaaaaagaaagtcaacaattcaagaagacagaatgtatacataaaaccacacacagtgataaaagaagtaagccttaccctcaacacaccaaaatcttaaggtctcttggagctaatgctgaatttcttgttgctttgaaaattcayagcctacatatgagttggaaatatacaaataccctccccgttacytatttattaattccttcattctttatcaaggtgctgatgctactaaggatgacggtgtctactcaaggyatttcacaacttatgacacgaatggtagrtacagtgtaaaagtgcgggctctgggaggagttaasgcagccagacggagagtgataccccagcagagtggagcactgtacatacctggctggattgagaatggtaagtaatttgtaataacatacctggcttgtgcaaaagcattggtttcaagaggaaactattaagcctgtggggcagaatggtgcatgattaaatcagggtttctcaaccttggcattattaagattttgagccagacaatcctttgttgtggagggctatcctgcacattgtggcatgtttagcagcatccttaacctctatccattatttgtcaatagcaattccctagtcatgacaaycaaaaatgtctccatatgtggtccactaacccttaggggggcaaactagcctccagctgaaaatcactggatagracatagcttttgactgccttacttcaaagcccagccctctatcaaatacagtattttgtgtaatctttttgtacttcactctcctctgttgtaaaataaggataataatggcagctacctcataggatggtcacacagaataaataactaaacacatctaacaaactgttactggtaaatagtgtttaataaaggttttatcattattttaaaaacacttctaatgaagttctttccattgaagcatttctaatttatcctaatgaatctgttccacagaataaaaaastaataatttagggtttgttatctacatcaatatcattatccaagtccactgtctgtctttcctcttttctcctcctgctcaggccagggagcatagtagatgaatttcatgtgggccagcacactgagcccacgtgtaagcaggtgggaaaattatgtccatgaaacagrcagtcccataccacttttggttacaaacacttgccctggactagagaaggaattgagaccaagtytgtgtcccaatgggttccaggactagttttccatcaatctccaccctgtcctgggcaggctttctcctgaggttggtgtgcgggaaggagaagagctcctttgagaaccttcccactgtcatctttacttgkgtgtgtgcttagtgaagagaggattcagagacacatggtgtcactcatgcaaaggtgataatagagggaaatgttttaaaagataycactgcattttttttttagacagtcttgctctrtcaccagtctggagtgcagtggcacaatctcagctcactgcaacctccacctcccgggtccaagtgattcccctgcctcagcctcccgagtagctgggactacaggcacgtgccaccatgcccagctaagttttgtatttttagtagagacagggtttcaccatgttggccaggatggtctcgatctcttgaccttgtgatctgcccgcctcggcctcccaaagtgctgggattacaggcgtaagccaccgtgcccagcccatgccactgctttttgagttaggggaaggaggcagaaggggmctggtttagtggctaggtctagccttatggcagcattttacttacagtaatatatttcattcttgtaagtatccctttttaaagatggggraacagaagctagagagcttatgggttcatataactaatagtgttagtgcctggcataacagtagaaggccatrttcttccctctatccctcgataagccttaatggcagtctctactggtgctttcaacatgaaccctgaacctgctagagcattcacttcatctttgccaagaccagattaatgggtatgaagattaaacggtctttaacagataaaaattctataaagaggtagagtttatgagaaaacaaattctaagtaatgccatgttaggatcttatgagatatttttattgaaaagaaaagagaacctgagaactctacagattgaacagaccagggtattttttaaattccaggattacttttatacatgtcttcaacaagaatgtgaatgaaattgggatcamtacaagaaytagattcccatgcattcactgagaaaatgagaagtctttcaaaagcacaaaattttggaamccyaacataaaacattttattaaaaactgaaatttaataagaaaaatgaaatacaaacatcgagaaagtgaaagaaatatgcataaacaatcaaggcattcttgaaggtccagttgattagttgccaaataaataggaaagataatgaaactcacactattatttaggaggaatacatttcttgaggcagtctgaggtttaaaacacttagtctttaggcccggcacagtggctcactcctgtaatcccagcactttgggaggctgaggcaggtggatcacckgaggttaggagttcgagaccaggctggccaacatggtgaaaccccatgtctactaaaaatacaaaaattagctcggtgtggtggcacatgcctgtaatcccagctactcaggaggctgaggcaggagaatcacctgaacccaggaggcagaggttgtagtgagccaagmtygcgccacrccagcctggatgacaagagcgaaactccwyctcaaaaacaaaaacaaagaaaggaaggaaggaaggaaggaaggaaggaaggawggawggaaggaaggaaggaaaaaacaratgtagtatttaaactgaccttgtggaaagacaagatcaggatgggcaaaaagatgggaaaataagcaattttaggacaaatgtcatgaaaataaattccaaaaggttattccactaaatatccaggaaatatctaagagataaaaaaaagaaactgtgattctctgttttctctkttccctctgatgaaaccgtatttgtggtcttgtctccaaatatttaaaattaattcgtgtgtggaaggaaagaagcagaagtggggaacaggaagagggtgatctgataagaaaacagacggaggtgtcaccatttagtgatgttgcttaccatattttgagtatttttttaatgcagatgaaatacaatggaatccaccaagacctgaaattaataaggatgatgttcaacacaagcaagtgtgtttcagcagaacatcctcgggaggctcatttgtggcttctgatgtcccaaatgctcccatacctgatctcttcccacctggccaaatcaccgacctgaakgcggaaattcacgggggcagtctcattaatctgacttggacagctcctggggatgattatgaccatggaacaggtaagctgaacctggtgtggaccctgtaaaagagtttaccagccaagtagaagagcagaagcrggtgaggcaggcagccgtgttctgatacttagggggcagaaggcaggagggatcttgcsggtcctttgaaatgagggataaatgtatttaaagaagagagatttaaaacctgaaaaactggtaaactttgggagtaagaggcttcagccaggaagggtaaacctcactttgtttctgaaatcttaccaaactgtcctttgacaaactccattttctgggtagcagtgactcctggggaagaactggaaatgkagcatagatgtctgcrgagcagagctcttttggaaggaacctcaggtcctaccagactttctctctcaaagtgtggtctgtggactgcagcatgtagataccatgaacacttgttagaaagtgttttcagatctgcattttcagatccctgggtgatttgtacacacattacagtttgagaagcattggtgcaaactgcctctataaataataaaacaataaacagttgttaaacagtctcttctttctgccgggcactatggctagaaatgctgaccaaggctttacgtcatgcccaatccagttttacgcttatcactgtgtcattatatacaaacaagaatgtaaaagagatagtaatccttgtaaacaggaccatcagttcatttatttgggaaccttatggggtgatgatayaatttctcatagacttttaaagctttttaaatattttttaaagctctactgcttaagaagtttctttaatatttcagaattaaagtcacattcttcttttttctttttagctcacaagtatatcattcgaataagtacaagtattcttgatctcagagacaagttcaatgaatctcttcaagtgaatactacygctctcatcccaaaggaagccaactctgaggaagtctttttgtttaaaccagaaaacattacttttgaaaatggcacagatcttttcattgctattcaggctgttgataaggtcgatctgaaatcagaaatatccaacattgcacgagtatctttgtttattcctccacagactccgccagagacacctagtccygatgaaacgtctgctccttgtcctaatattcatatcaacagcaccattcctggcattcacattttaaaaattatgtggaagtggataggagaactgcagctgtcaatagcctagggctgaatttttgtcagataaataaaataaatcattcatccttttttttgattataaaattttctaaaatgtattttagacttcctgtagggggcgatatactaaatgtatatagtacatttatactaaatgtattcctgtagggggcgatatactaaatgtattttagacttcctgtagggggcgataaaataaaatgctaaacaactgggtatacatgcataaaaactatccattcaaacccaaaaatttaataatcattgagtcttttattaatgaatttgaatactagaaagaaacagggcttgcatcaataaatggaagtatgtttttatttgttttaaggagctttgccagttaaaaacaacatgcaattgcagaaatctaacagagttgctaaaagttgtttgatttcttttggtgaagaaaagccaatctaaattatttaaatataaaagacatgacttgttttataggagtttyggaccagcatcactaggaatatgtcttattttctctaaatttgagcaatgatggtgcatttaaggaagagatggcwttgaagaaagaaagamcagcacaatgaaaattccctaggcacagaaatgaacgttatgtgcatgaaattacaagagttagtgatgctttaagccatggcagtggggataaggtgggaaaggtagcttcaggccaggtgtgaagggaaagtgattgagaaataaacatttattgtgtactttgtccaagggcccaactaatgccttatgtgcattagtttatttaatgtaattcagttctttcaacaaatgttcaccagctgcttatyattttccaggccaatgctaggttctaaggatagaaagatgagtaagcattggcctttttcctgtatactaaaaagagcatttgaggatttatttttgaaatcaggaggcagatatgctcagagatatgcttgagaagggagtctttaagaaccgcacgaagsccttaataagtgtgagaaagaccagcagcataacaaatgaaaggggaaggagaagaagaggaaaaagggttggaagtgtaggcctagcactatggcagtcctcgtgaaggactagtcacagattccagtgcctgyaggtgtagatagtcctgtgaaaattgtttcgagttcccagttattagtacaatgagttcaagatgtgggtggctctctttatgattgaaaacaaaatatctagcatatcatttctgcgtagacccaaaatttctttatttgtagacctttcttatttcaaaaccagatttgagccatcttagtgatacatgcaataaacataaaaataaagaaataaaatatataataaaaactrgaagaagtgctcaggtataaacctataaagaatacatgggggaaaaaaactagagggaaaaccaccacatcaaatgcataatataatgttctgtacaattgctacagccaagtcacatatttcactttgtgacaagtaggtaggacaaatgaagtgtatatagtaacaagattaacagagtytatagtgaaaagcaagccagaagcagctcaggagaagcatggcttttcctagtcgtgagacccacaagaagttttatctgtggatcctcagtttayyagggcactgtgatgttaagggccgcagccaaagcagcaaccgtatagtaatcataacaacaagtttaatatagggctaattacttccttcactgtaagccaaaggagtaacaccacagcattgttcaggaaaggcaattatacagggacccaaaaaatgcgggcctagcaattagctcttgagcttgccccagaggtaaaatttggagtgaatggattgcatgtccttcaggctgtttcctaggacccgtatttcttacatataaatttgttataaaaactgaacagtagagagttccaagactaggaagaccctgatgttcccaaagtcagtactgtttattgagggcacaaccagttgctttgccagccaaatgggcagagggttgttgggggtgcatggcaacaaattcaagcttgtatacaaagcatttgaggtcggggcatggaaaaagacggaggcactgtgtgtatgttatttgtgcatggaaatgtaactccttgaccctgaaaacaggacaaggagtggagtgtgtcatgaggaacgctgaaaacagcctcctgagaatgtggtttgaatgcttttagaaggccacaggtgtgtcacgacccgacctcaagaggccatctagtggatgtttgtagtttaacaagccctttcaataaatacttggcggatggattctggggtgayactctctcagaagagtggtccgccgctccgctcagctggaattgtctgagaactcattctgggcgttcactgsaagctataaactctacaagtggtgcgcccgaagtgatcgccttgaagttgcacgtgaaggaggaaaactccttaatttttggggaatcccagtaagggacagtcctgattgccattaggaggacgggacccacgcgtaaaataccaggggttgggtcatcatgggtcaggaaatgaccaaagaacagaaagtattttttaaaacagtgcaacagctacttaaggctatccagtgcactgtagagcctggagctctacacaagcttatgcttttaattcggcagggatgcccttggtttcctgatcaaggaaccttagatttagagttatgggagcaggtaggtcgctgcctgaaaagaggatatgagcaaatgttactattttgaccacctgggcgcgctggtacgctctgcgttgtatcctctttatctgccagattgcggtgagtcagacsgcccattatctccacctgaaaggaattcagaagatttaaagggagagattcctctcccctcttcattcccttctatggggaataaagaagagattttttccagtgaggaaaaacaggaaccagagcagcaggggggtgctcctctctctacttcattcccttccgtaggacatgagcaggatattttttctagtgaggataaggacggaccagagccttttcctccccctatagaaaagccattgccctcctttcttccacccttaaagggacctgcatttgttggccccgttcagccawcagcgcctcccatcccccttaaggagattggaaactgcccaagggacggttcttagataagacccccggtcagcgaacatctgtatgatcgggtgtccgcttctccttgacaaacttccctgctggaggggtgcctccaagagggaaggaaagtggctgagtatgattgtcttcctaatwcgcaagttctcatttcctacttccagcatcagcctttctggccttgtcggttttctgtttccctggagtataaggggaacttacatgctgcctcctgggttttatcctagatagctctggctttcttgctgcccrcagaggcctggggcaggagagttgctaagatgccatggagtgcccatttagtcacttgcagtctgggcaggttgcccctttctgggtttgtggtgatggaggggaggtcaagaggcacagaccgagtccccgggtggctgcaggcagctccagccgggtcctgaggatcctcctcaccatggtcacgtgccttagtaaccgtgcccgggaagtggcctgctgcttgctgtgctgctgcttttcctacttctgcccttccctgccacccctcgcatgtctcagttgacaagcaattccttgtcttycctggccccctagggaaagggctaagaaacagtccatgtgcacgccgaccttactagcctaaggtgggcaaagtagtgcggaggagcctagagtacggagccctgagggaggagcccgctaataagggacgctctccagtagccatatgctaaatgctaactaggctgaggtggatgagctctgccagctgctgtcatcgtcagaagataagacgcagcagtaaggaatgtttgtttcgcttttttataaaatgtttaaaaacactggggctaagaaacttcaaagcagacactgcgctgcctgtctgctcctcccctgagcctctctgcttgagggtggtaaaaataataaaaagcgcagtctattttcagtaccttacctaacagggttggcttcaggcgtaggtggcctaaaagataagcggagtggttttctcccagccggttaccttcttccctccagcctctgcgcttacacacgcacgttaccacccggtcattctttggcctcttactgccacttgtagtcttccttcctttctttcagagtaagggcagcaacaagtggcaagctgttaaaaacagaagctgcctaaggagcccagaccgaataaaagaaactggccacagccctactttcccaagctcacttctaagacattccatctaaaggctgatgcaggaaaatggccaacaccaaaggacattttaaaaagttttttggggttttttcttttttttttttttacatacttaagctaactcaatgcaggtttattatcctggcgacttgcagtcacattctaatgattttcaagggccaaaatatagtaataatcatttgaaatatccatcgcttccatgccttagtttaacaggtaggctttatcttttgccatttctgtattttacatctgttatgtacctgtctcataatccctctaaacatacacaaaagacaacagatttaatagcttctcttctcataaagggacgccaacgttgcgtccagctgtcaggatatgaccctgctactctttcctacctttaagcaaggaacaatttcatactctcttagctcgtgatcttgattggcaagtagcaatggctgactttattcgtaatatcagcttcaatttaccagcctctaagctcctgaactttttacaaactatgcctgtgaagtttgtatctattgttgtctctgagcctttacttcatgccatcactctctttacagatggttcaggaaaaactggaaaagcagctatagtgtggcaagatgccatgcaaaactggcagtacagaatccaggagcattttaaaaactacacaacaggcagagttaggtgccttgatattggccttacaaattttcctcaccaagacgtaaatatacttagtgattccacttatgcggtgtatagtattactcatttagatcttgcacatgtgaagggcattactaatgaacccctactagctttgtctcttgcagcgcaagactcctccttgccagtcatcaccctctttacatcacacatattcgctctcattctgggctatctggtcccttgtcagaaaggaatgcttgagctgatgctctggtaygaccacagatgtggtttgcagattctcctgcttttttgcgagctcaagctgatcatgctgtttttcatcagaacgcctgcagtcttaaacaacagtttcatttgacacttgcttaagctcacatgattattaaaactgtcctgattgccaacagcgttctctttcccctttttccttagggcttagtgccagcctacgaggtctggtgcctaacactatctggcaaactgatgttactcagtaaccatcctttggaagttttaaatttctccacgttaccatggacacttatacaggcctgacacatgctaccccccagaygggagaaaaaaactaaagatgcatttgctaatttgtttaactctattatgactctaagctttccacacactataataactgataatggaccttactatcttagtgctcaatttgcatatgcattgcaactttggtacatacaacacaaaactggtattccttctaactcagccagtcaggccattgttaaataagctcatcaaactcttaaaatatatcttaataaacaaaaaagggggaatatggggctctgttctcgagactaggacctgtcggagaatcaaccaataatgacaatgatgactcagaagtcacctaacattacctggggacagctaaagrgattggatcaacaggcatctatcctgcttgcagcygtggaagcccatgcaactgcagagaatcggtttcttatgtatctgtggcaactggggaaacttctgagaaagtaagacagacatggatgttggggtggctggtaattcttatactttgccaagtgggatcagctcaagaacatgtttattggagtcatgttctaaatcc

SEQ ID NO: 9994 - DNA, 205784 bp, Homo sapiens
cagcattacctataaaacctagtctattcagcaatcgtacttctgggtatatatccgaaagaactgaaaacaggattgggccgggcacaatggctcacgcctgtaatcccagcactgtgggaggctgaggcgggcggatcacctgaggtcaggagctccagacctgcctggccaacatggcgaaaccccgtctctattaaaaataaaaaaattagccggtcatggtggtgcgtgcctgtaatcccagctactcgagacagtgagataggagaatcgcttgaacccgggaggaggaggttgcagtgggccgagatcacaccattgcactctggcctgggcaacaagagcaaaactctgtctcaaaaaaaaaaaaaaaaaaaggaaatcctatcatgctctgcacagatgaaccttgaagacattatagaaagtgaaataaattagccacaaaaagtgaaatagtgtactacatgattccacttacatgmggtatctaaagtatgtagtcaaattcagaaacagaaagtggaatggtggctgtggtgcaaaggatacaggggagttgcagttgttgtttgataagtatagaatttcacatctgcaagatgaaaaagttctagatagctattgcacaaggtacatttaattgtacttgaggactaagctatgattttttttttttttttttttttttgagacggagtctcactctgtcgcccaggctggagtacaatggcactatctcggctcaccgcaacctccacctcccaggttcaagccattctcctgcctcagcctcccgagtagctgggattacaggtgcccgccaccacactcagctaatttttgtattttgagtagagacagggtttcaccatgttggccaggctggtcttgaactcctgacctcaagtaatctgcctgccttggcctcccaaagtgctgggattacaggcgtgagccaatgagcccaacctgatttttttattttacccaaattcctaactaaggggtctagggagtcatgccctacaaaccataaattctcatcaggggggttttatttgaaactatatattgtgatttatttttcaatctgactgtggcataacattatgagacaaggaagaaatatttaaccccaaaatatatttccttgccataccttaaaattgtcctgcaaagtctcttgtggttaaaatccatattctatagtgaatccccttccccctttgttttcctaccttccttcccaaatccagcagataatcaactaagagccagatacccttttaagtccgataaaaaacaatttacaacctgctctctctgaagtctgctatctaagagcttcctctgtacaataaaacttggtctccacaatcctttatctttaacctgagcattcctttctgtcaatcccaggtcttcaaacaacctcaaccaattgtcaaccagaaaatgtttaaatttacctatagcctggaagtccccactttgagttgtcccgcctttctaaaccaaaccaatgcatttcttaaatgtatttgattgatgtctcatgccttcctaaaatacataaaaccaagctgtaccccaaccaccttgggcacatgttctcaggacctcccgagggctgtgtcatgggccatggtcactcatatttggctcagcataaatctcctcatattttacagtttgactctttttgtcgacaatcatctggcacccacacatggggcctcagagaagactcagggtcacactatacatttaaaaatggttaagatgaccaggcacggtggctcacacctgtaatcccagcactttgggaggtgaggtgggtggatcactcgaggtcaggagttcgagaccagcctgggcaacatggtgaaaccccatctctattaaaaatacaaaagttagccaggcatgatggtgcatgcctataatcccagctactcaggaggctgagacaggagaatcacttgaacccagttggcagaggttgcagtgagccactgtactccagcctggaagacagagcaagactctgtcgcaaaataaaaaaagaaaaaaaaagatggttaagatgatatattgtgttatgcgtttttaacacaataaaaaataaattattaattgaaaacaatgcaaatatccatcagcagggaattggttatgctagagctatacaataaagtagctatcacaaatgataatactggtatctattcagccacaaccatagcccactgtkgcaagttttttcaatttaaaaaaagcaaagcattatatcattaaaacatgtgtccatacctgtaactaaagacagagatatgtgtaaacagtggcatctcttggtaatagaattgcagatgacctttactttcttttttacattttcccgtgtggactaagtattacgtacatggcaaaagatggcttacaagaggaagtgactgccaccattggctccagaatcctgggatggaattttgtttccctcatcattatgtgtctggcacacgttgaaggattaataaaaatttgaaaggcaagatgaatagtggttaagagttcaggaattagacaggcctggatatgaatctcaactcaaatttatttaataggggcctcagaccttaaagctcttttttttttttttgtggtttgtttgagacagagtctcctgtgttgccccaggctggagtgcagtggctcaatcacagctcattgcagctttgacctcctgggccccagcgattccctcacctcagcctcctgtgtagctggaccacagttgtgcaccactacgcccagctaatttttttattttttgtagagactgaaatttcctatgttgcccaggctggtctagaactgctagactcaagtgattctcttgccttgacatcttaaagtgctgggattacaggtatgagccaccaggtcagacctctacaagtcttatttaccttcattgagcctcactttcttcaaatataaaaatgtcaagaagacttacagtttgtcataaggaaaatgtacttatcacacataacatcatttctggctcagacgaaactcaataaaatgatggccatcattactatttagtgactagatttacactggaagaactcctgacacaaacaaataaaaaaaaaaactaagcatctacagtagactgcattgctaaattatcactgaatatcctaattgcattaaaaagcaagagacaacactttgcctggtagatctacaaaaatgtcttgctgcaaggtatggttacattcctatatctagcaggattacactataaaatttaccatcttactttgtatacaaacatcactcgttagtattggacacagattagtgctttagtaaaaacaatgcaaagaggaaaacgtgcttattttaatccaaaggtagaatgtaaagaagggaccaaataaacatacaaaatgtgactaaagaagacttgacttagagattgaaacagtaagtgacattacaattttgtttagcctctctcttcctcacaacttttggacaaggagcctgtctttttaggcactgctctacccaaagtctggtatagtacccaatacagtgttaagcgctcataccataaatacaacaggatttataagagaaaatctcagtaaaatcatggagtaaactgaattagaatttatctgagaaagtctcagtcaaaataataaagcaaagagtttaagaataaagggcacacgcatagggagggaaaaacccttttctgtaacttgtatcttctttattcaatcagttttcctgggtaccttaaatggaatgtccaaaagtatacatacagtcgcccttgaactctgaaggaggcataaatcagggccttacgtgctaagattattaggctgtgggctccatgtggccgatgaataaaggcatctttttagtgatgcctttattcatcggtgtattatagttggcaccctgtagtcacacgttttttgtttttgtttttgttttgagacggagtctcgctctgtcacccgaggctggagtgcagtggcgcgatctcgggtcactgtaaccacttccgaagttgaagcgattctcctgcctcagcctcccgtgtagctgggactacagatcctacagatctctgccaccacgtccggctaatgtgtgtgtgtgagtttttagcagacacaagatttcaccatgttgcccaggctggtctcgaactcctgacctcaagtaatcctcccgcctcggcctcccaaagtgctaggatkacaggtctgagccaccgcgcctgtctgccactcgtttaataaatggtcgttactcaaagagtggtgatggggccactcttgattatcaatccttcaaacagaaaagcccttttctgtgactcttttccttccaagctgactttagaagtgtgtttgtggccgggcgcggtggctcacgcctgtaatcccagcacttygggaggccaaggtgggcggatcacgaggtcaggagatcgagaccatcctggccaacatggtgaaaccccgtctctactaaaaatacaaaaaattagctgggctgagtggcgcgcgcctgtaatcccagctactccggaggctgagacaggagaatggcgtgaatcagtgagccaagatcccaccactgcactccagcctggggacagagcaagactccgtctcaaaaaaaaaaaaaaaaagtgtgtctgtaaatgtagttcagaacttcggagccctgtctttacagttcaaactgaccacgcgaagactaaaggcagtagaggtactttctacaaatttagccgtgcaatctaatagcgagcaggccgagacgcccgcgattgaaggccggggtggagaaagtaataagggccctggaaattacccccatcccatgtcacccactctttcttaaaatgccattaaattccgttcaactttttatctcccatgcaagaaactagcgacttgccagccacgccacttccagccagtcacacctggcgtattcgccgcagaatctccaactcccgccacaggtttgggacgtgtccgcccctaagcggaagtgacgttcaacgggacaacgtgaaagtagatgagtttaaatacgtactaataatttaaaacccctatggtattttgaggaaactcttccggctacccttcttccatcayttctctcccgttagggttgcgaaaagggctctgtacagcctcgcgacaactcgttctccgccctaatttcaagtcattcaaaactctgtcccttttcattggctgaagcggcggcatgggtacctctcargaactacaattccagccaagcaccgcgacaagtgaacggaggagaagttatgagtargggaaaagcatgttgggaatcgtagtccgctccaggccgaaaagagcaatcaccccgccctccgccactgaagctggagaaaccaggtgttcgtttcagaacccgttagcgctaaggggaggagccaaccccttaagcagcatgcctcacttcgccccacatggaggataattttcctttacccctaaaaagcactataaatacccactgaggagatctggttgtcttttaaatacctcgagtcagtaaaaactcacgaaactccgcacctcaggctccaactcgtgggaaaaggtagctcttttacaagtgggcaaaatggctgtcctcctagttttaccattggttggcttttgcgtccttcaagggcggttacttaccacggattggttctttttctcttgaggttggaggaagatttggcacggctctccgcggcctgggaggaggtaaaggggtggagagaagacagtttttttcaagcttgattgggcaaaactcatgtcactccggggacgtacaacctatgaatagtcggctgccgctcaaagagaacgaagaggcggggctagtgcgtggtgggaaggggcgggattctgccagccgcggctgccgctggagccggtgtccgggctggtgatggggttaattccctttcgtaagactcttacttgcacccacccagccccgccgtcgccccgccgcgccgcgctccaaccgcctcctcctcctcagtaacgcgggtaagagatgcccttccctcccccgtccagctccccgggaataacgcgccttgctcccctcccccgcccgccaaccggtagcgctaacggagaaggaggcaggcaggggagagatgtggtgtgtggaaaggtggccttccccgccgggtcgtcggcgcttcagccagggccttctgacgtcccgctgctgccagcccgccgttaggtcgggttccgagtgagccaggctcgcctggcccgcggctgcggctccggctgcagctgcagscactgccttgtgcccaccgcccccacccgggggccatgtgaaaagcaaacccctcgaggcctagcggaggaggcaggggaaaggtttccgagtccctgccatggctgctgctgctgcctccgcggctgctcttgcagccccagggactcgggagccagccacagcaggcctgccaagagcgtggtactgctctctcgtgtggctggcgccggtgccccgggctcccccggccgccccacggccgcatcccctggccttgcaccaagagaattttcagcttcgaccggttggtaaaatgtaggtacattttccctgtggtaccagaaaaagcacaatgggaatattaaaaagaaagttgaatgactgtcagtgccacggtcccccgggatcagatttacacacgttttgattcctgagccttaggctgccaacaaatctttgtgggctttgaagttttttggtgttttgttttcttttgttgctgtgactaggtgcaaagggtgactctgttgagcttgtttttataaagaaacttaaattattgggactatcatgctccgtgtgtaattgtcctgggatagttaagtaaaaggtgaagaagaggtgctttccaaattaggattagtgaacagcaaatggtttttctaataaaattttctaaatatatatatatatawcttcatggttatagtttacctaattgtaactgtaagaaaccttttttagcttaaatatcattgatgacaaaaacttttaaatgaaaagatgattaaagtcaaactgaaagtctacccatttataatatgtgaaacaagatcttctaagtaataggataccagtctgacaggaataattggacacgtctcaatttctaaaaatttggcatatttggctatttttagggcattctgttatgatttcttcatcacattttgatggagtacgctcgtcttttcaaataccactctgcttttatgcctggaagaatatgtctttaaatcatggattctatagtctgtagtagacataactgtgatcagagataaaattctaggcccatttctgaggtttacttgttagcagaataaacttgggttctgaggaaacatctgagttttgatcatttcttcagggtttgagaagactatggtggcttaatgatcttctgtattccataactagtacacctagwtacagaattgacatagatacattcaggtcctggaggaaatttgtggtatctattaaaaaaatgaaaattgccagtcatgtagtagtcacctgtagtccctgctactcaggagtgtgaggtgagaggatcacttgagcccaggagttcaaggccagcctaggcaatatagcagaacatggtctcaaaaaaataaagaaataaatacacagccttggaaggcaagtcccctgagatccccacagagttcctgtaacatatattgccagctgccagcatagtattttccagaacttaagagttaattgataaattatacaatcgatactttcagatcttgggtgatttatatagagaaagagctgttgaaaatttaggagtcttctacattttcttcctggctgttggatccctccatgaacctcagttcggtttcctcatctgtaaaatgaggatgataatgcttaacttagggagttatgaaaattagagataaatatataatagtggccgggcgcgttggcgcacctgtaatcccagcactttgggaggctgggcgggcggatcacctgaggtcgggagttggagaccagcctgaccaacatggagaaaccccgtctctactgaaaatacaaaaaattagtcgctcrtggtggcgggcacctgtaatctcagctactcgggaggctgagacaggagaatcgcttgaacctgggaggcagcggtgagccgagatcaggccattgaactccagtctgggcaacaagagcgaaactccatcttaaaaagaaagaaaacagaaaattagaggtaaagtatgtaaatcccctagcattgtgcctgacacagtttgtgcaataaatattaactgttattttcatgcatatttagagaatgggtttgttgttcatatgctgagggtgttgttgcagccttagaacacattctgttactgaagagtaccatgggtgtattaatttatatagtgacttaagcacagtttgcgactagttatttttgattagcttatggaagtttttttgactttgaattaaaatgcaagtgtctgtggaatacatttcaaatggattattgggaataaaaattagtgtactccatgtagtggttaactattgtaatatcttttaaattttatttagctgttaaatgtttcaagctctagtttatatacttgctatccatattcattgtgctaccagatgacatttgaactgtttaatacagagttaagattaagcaaatcatttgaaattgttacaaccatatgtgactacagttttgttgctgttctttttaattctccttatttatcaacacttgagtgtttcttttctgtgaaacaacttgtgagaggtgctattcctttctcttcagaggcatttctgaaaatttactgagtcttcacatataatagtgttcttggaatttgtatagttaaacaaatttaaggttagcatgaagacagttatattatgaagtctttctgacaggaatgtccagtcagggttcaagacaagctgcaccttatgcaaaataacgaggtgaggtatatatatggtgggcctccgaagtcattgaacctggtacaaatgggtgcttctccaaagaggtcttacatgacagtagcaatagaaaattatataaacttgaaataagctttgtcaaatattatgcagaagatgtgcattgccatgccttgcaagtaatagggttttttttcttcttttttgaactggtactttartatacctaattacatccatttgagttagtattaagttttaatttctcagaaataaagtagtgaaaattggtagcagttttgtttttcccattcttgagaatattacagtgataaacaaggcttgataggtttgtaaaatactattgctatttgaattaaaaaatttcactattgactttccatattctattgtaaataagttggggaattagtgtgtcaagggggtgtggtaacaaatggtaatgtaattttcaaattgctattgcagcaccaaaccacagaatcaatactctgtctttataaccacatttgcatatagggataataatttatttcttataacttaagataactaaaatgaagggccaggcggggtggctcacacctgtaatcccagcactttcggagaccgaggcaggcagatcacaaggtcagcagttcgagaccagcctggccagtatggtgaaaccctatctctactaaaaatacaaaaattagtagggcgtgttggcgggtgcctgtagtcccagctactcgggaggctgaggcaggacaatcacttgaactcaggaggtggaggttgcggtgagctgagattgcaccactgcactccagcctggcgacagagcaagactttgtctcaaaaataaataaataaataaataaataaataaataaataaataaatatgagatggctgttgtgaagagaaggaagtcagttttttctcagtataattgtaaactttaaaaaaaattaaatcatcttccacttaatccccgagacttcccataatgtttagtaatacggacatgtgcaaagaattaaatcrtataattaaacaaaattttgtcaagttaactttgcttctcaaataaggaagttatataattaaacacatttgcttgtacctaatgagacgttagcatcaacatgactgtatatcatttccagaatttaattcaattagttattggctgagggatgaaatagagatgaaactaaatcctggcctcaaactagttttgtaccttattttccagcaatttggtttttttatatctagattttatctttactattttccctcatcttacccattcttagtctccatacacacctattaactttaatttccttttctgagaattttgaaagccctatagtttatgatcttttttccctctttgccttgtgaattttatatttgtgagttttttccaaatttctacctgtcagctcacttctttaggcaaggtgtaaggtttttgagcccccttatttcattttttatttttttaagagacagggattcaccctgtcacccagactggagtgcagcgacaggatcatagctcaccacagccttgaactctgaggctcaagggagcttcccatcttatgctcccaagtaactacgactacaaacttgtcactaggactacaggcatatggctaattttttaatttagtagagacaggttcttactgtgttacccaggctggtctcccacctcctgggcgcaagcaatcctcctgccttagcctgccaaagtgctggaattacaggcataagccactgcacccagcctatttcataaatagtggattgcacagcatgtttaaatcatgtttgctttactaaagtttttatctacaactccctataacaacttcatctgcaaaagaaattaggtagagaaaataaactacatttgtttttattcttgaccattctcgagagggaataacttgatattgtctgatctaagcgtttaaaatagtgaatttgacttgtcacaacattagtttgatgaaagacaaatataaattacttttgtgggttagttgtacaattaactttgctaacctgtcctataaggcagaggtccccaacccttaggagctgggccacacagcaggaggtgtgcagtggaccggtgaacatcaccacctgagctctgcctcctgtcagatcagcggtggcattagattctcataggattgcaaaccttactgtgaactgcgcatgcaagggatctgggttgcgtgcttcttatgagaatctaatgcctgatgatctgaggtagaacagtttcatcccataaccatcctcctcaccgcctgcaccatctggggaaaaattattttccaccaaacaggtccctggtgccaaaaaggttggggactgctgctcttaggacagaaagaaagaagttccataactagagtaaaatatcaccttacagtatgaggtagcttaactgtggatttactttgttaccttgcccctcagtggggagagaagctctggaatttaaaaaaaaaaaaaaaaaaagtcttactgttgtgaagtcaaaattctttgtacgtgtatgcaacatgtatacaaaacaatagctaaagtgagcattagtctgtcttttttttttttttttttttttttttgagatgaagtcttgctctgtcacccaggctggagtgcagtggcgcaatctcggcctactgcaacctccacctcccaggttcaagtgattctccttcctcagcccccccaagtagctgggactatagtcacgagccatcatgccagctaatttttgtatttttagtagagacaggattttgccatattggccagggtggtcttgaactcccaacctcaagtgatctgcccacctcagcctcccaaagtgctgggattacaggcgtgagccaccatgcccagcctaggccttcattttagtgagcccttattttattttattttattttattttattttattttattttattttattttattttattttacttagagtctcactctgtcscccarggtggagtgcagtggtgcagtctcggctcactgcmacctccgccttctgagctcaagcaattctcctgccttagcctccctagtagctaggattacaggcatgagccaccgcacccagtgggttctcattttaaaaacgttcttgggaaagatgcttccttcatacagaactactgagtatctgtttgttttttactgggaacaacccaaatgtccttcgctgcgtgaattattgaactgtgatacatccataccatggaatactatgctgccttaaaaaaggaacaaactgcagtcacaccttgtttaacattagggataaattctgagaaatgtgtcattagagagttttgttgtgccaacatcatggagtgtgcttacacaaaactacatggtatatagccttatagatatctaagttatatgatatgtatggcctgttgctcctgggctacaaacctatacagtatgctactatactaaatactatagacaattctaacaccatggttaagtatctgtatatgtaaataaagacaaggtatggtaaaaataaggtgtaaaatatttttaaatggtatacctaaggcacttaccatgaatgtggcttgcagcactggaaattatggtaggtgagccagtgagtgaatgcaaaggcctcagacataattgtacaccattgtaaactttataaatgctgtatacttgggttccactaaatttataaaatatttttctatctaaaaaattaacttgtttgcagtaactttttactttatraattttaaaaaatttttaaagttttgacccttttttagtaacagcttaaaatagacatattatagctgtacaaaaatattttttctttatatccttgccctataagcatttttctattttaaaaggttttggagtttgtttttgagacggagttttgctctcgtcaccatcacccagactggagtgcagtggcacgatcttggctcactgcaacctccgcctcctggattcaagcgattcttctgcctcagcctcccaagtagctgggtctacaggtgcccaccaccatgcccggctaatttttgtatttttggtagagacggggtttcaccatgttggccaggctggtcttgaactcctgacctcaggtgatccacccacctcagcctcccaatgtgcttggattacagacgtgagccaccacgcctggcttaaaagtttttgttgttgttgttgttgttgttgtttttcctttaaaattttttgttaaaaaccaagatgtaaacacatgcattagcataggcctgcacagggtcagtatcatcagtatcattgtcttccatctttgtatcttgtcccaccggaaggtcttcagagacaattacacacatgactctgtcatcttgatgttaatgtctttttctggaatacctcttcaaggacctccctgagctgtttgacagttaacttctgattttttttttaaataagtagaaggaatacactctaaaataatgataagaagtgtagtaaatgcataaatcagtatcatagtcatttattaccattatcaagtattacgtgctgtacatatgtatgtgctatactttcatatagtcatatgcatatagcagtgcagtaggtttacaccagcatcaccataaacacgtgagtaatgtgttgtgttatgaaggctgtgataatccttaggtgctagkaatttttcaccaacatagtcttatgggaccactatcatttatgcagtccattgttgactgaaatgtcattatgcagtgcgtgattgtattgatacagcaactagaatggatcccaaaagaattgcaggcacacctaggagatactgcgagttcagttccagacaaccatgaaaaagcgagtcatatacatttttgggtaccctggtgcatttaaaagttaggtttactactgatgttatcatttgaaaaaaaaaagagttttatacaattctgtagtctatttaaagtgtgaagagcattatgtctaaaaaatgcacatatcttaatttttaaatattgctaaaaaattttaatcatctgagccttcagcaggttgtaatctttttgctggtggagagtcttgcttcagtgttggtggctgctgacccatcaagatggtggttgctgaaggttggagtggctgtggcaatatctgaaaataagacaacaatgaaaacaatgtccacgttgatggacacttcctttcatggaagatttctcgatagcatgtgctgctatttgaaagcattttacccccagtagaacttctttcaaaattgtagtgaatcctctccaattttcctactaatttacaactaagtttgtgtaatattctaaatcctttgttgctatttcaacaatgctaacagaaatagacttaccaggagtagagtccatctcaagaaaccacattctttgctcatccgtaatcatgaacaaataatgatatcatgagcagcaattcaagcacatcttcaggccccatttctgaatctagttctcttactgtttccaccacatctgtagttactttatccagggtagtcttgaacccctccaagtcatccataaaggttgaaatcgatttcttccacactcttgttgatattttgtaacttcacagatgcgtaggtggtcaaaaaataaaaatctttaaaagttgatattttgacctcctcccatgaatcacaaatattcttttaagacatggaggtgttgctctgttkcccaggttggagtgtagtgctgctgtcatagcttattgtaaccttgaactttggggctcaagcagttctcccacctcagtgctggtgcatgccaccacatccgtctatttttatttatttatttatttatttttgtagggacagggtcttgctcgtagcccaggctggtctcaaactcctggcctcaagcagtccttctgcctcagcctcccagagtgttgggattataggcatgagccaccatgcccacaaatgttgttaatggcatctagcgtgatgaatcctttccagaaggttttcagcttactttacccagttgcatcagaggaattactatctttggcggccatgtagccttacaaagtgtatttcataaatatgagacttaaaaatagaaattaatccttgatacatgggctgaaaaatacatgtgttagcagtcaaaggaacattcattctttttacatctccatcagagctcttgggtgacaaggtaaattatcaacgaacagtaagttttttaaaaggagtcttttttttctgagcagtaggtgtcaacagagggttttaagtattcgtaaatagcatatctgttgtaaacagatgtgctgtcatccaggctttgtttcatttatagagcacaggcagagtacttttagcatagttcttaatggccctaggattttcagaaggttaaatgagcrctgtcttcaacttaaagttaagtatctgcattagcttcttttttttttggagacagagtcttgctctgtcacccaggctggagtgcagtagcgcaatctcggctcactgcaagctccgcctcccgcctcctgggttcacatcattctcctgcctcagcctcctgagtagctgggactacaggcgcccgccaccatgcccggctaatttttttttatttttagtagagacgaggtttcaccttgttagccaggatggtcttgatctcctgacctcgtgatcmgcctgcctctgcctcccaaagtgctgggattacaggcgtgagccaccgtgcccagccagttgacctaatttcaatgttgttttgtctcagtgaatagggaggaccaaagagagggagaagagatggggtatcagccagttggtggtgcaatcagaacacctacagcatttatcaactaagttcactgtcttatatgggtgtgatttgtggtcccctaaaacaattacagtggtaaagatcactgattgcagatcaccatcaccagacataataatgaaagagtttgaaatattgcaagaattaccaaactattacacagagacatgaagtgagcacatgttgggaaaatggtactgatcgatatgcttgactcaagagttgccacaaaccttcaatttgttaaaaaaaaaaaaaaaaaaaagaaagaaagaaagagaaaagcaatgtctctgaagtgcatataggttgagtattttttacccaaaatgtgtgagaccagaagtgtattggattttttcagattttggaatattgaaatatctttgggatgagacccaaatttaaacaggaaatttatttgtttcatgtgtaccttatactcatagcctaaagggaattttatacactattttaaataattgtttgcataaaacaaagttttgactgcaactcatcatgtaagttcaggtgtggaattttctacttgtattgttaagttggtgctcaaaactgttggattttgaagcattttggatttcacattttcagattaggtatacacaacctgtgtgtgttcctgtatagtactaagggggaaaagtacctatttttaaatgaatatcctctgcaaaataacattcatatatttaacatagttcaattgtgttatttttactaagccatgttcacatgtatagagcacaatagaaatacctctaacactgaacaaatccaagttacagtttttgttttcactttgtataccttgtttttttctaaatgtcagttcttttctcattctccttttgttaggtcttgctgtcctttcattttttaactcctcgtcatttaaactaaaaagaatctgttatctgtatttttcattgtccagttgctataatatggttttgtcaagaggcattattcaaccagatatttatattataagcatattatctgtaagatgaaataaaagatttcatcccctataatgacataccaagcatcaaactggcagatgataactaatttgagggaagagggtaatgtaaatgcttaagttacactatggttactatatgaccatgagacggcgtctcactctgtagcccaggctagagtgcagtgctgcagtcttggctcaccacaacctccacctcccaggttcaagcaattcttttgcctcagcctcccgagtagctgggattacaagtgtgtgccaccatgctgctagtatttatatttctagtagagatggggtttcaccatgttggctaggctggtctcaagctcctgacctcaagtgatctgcctgcctcaggcctcccaaagtgctgggattacaggtgtgagccactgtccctggtctaaatgttttaaagcaatgggaatggaatgtgaggagatcaaaagtaaaagaccaccaacttggggaggatacagtctctgtaatatgtaaaatggatgattaatttttgtgtatggtgtgagataggggttcagatttatttttatacgtgaatatctagttttctgcaccattagttgaaaagactgttctttcccccattgaattgtcttggcactgtagttgaaaatcgattgatcaaaaaatgtggttatttctggactttcaattctatttcgttgatttatatgtgtgtctttatgccagtgccacactgtttgattatgtacctttgtagcaagttttgaaatgagagctccaattctgttcttctttttcgagtttttttttttttctttttgcctttggctattccagatcccatttattattctatatagtttagggtcaggttgccagtttctgcaaagaagccagcttggattttaattgggattgtgtcaaatatgtaagtcaatgtggatagtattgccatttaaaaaatattaaatgagaaattttaaaaaatatttaatgattaataagaatgataaacattgcaagtttacatgataccatattttgtacaaaataacttaaaaaagaagaatcccattgttttaacatttttgcaaatttccttaatgtctggcttaaccgaagaagatggctgggttcacatacctgcttttgcattcactctgatatatgtggtttgggttgaaatataagaagacaattttggccaaacatagatacaaagataaaaaggggaggacctcatgaactttttgaaaggatcttggtgaccctgcagtggtcctcagaccacacttagagaaccacatgttgaatggaaacaagtatgtgtttggaaactcagagacctaattgaaattcacagctctgcctcttaacaactgaacaagttaagttacttagcctctcagtctgtttcttcatttataaaatgaagataatgacatctccttttagggattttgtaaggaggaaacaagataatgcctgtaaatgttttggtatgtggaaaccgctaaagaaattatgctgttttcattcatttatatttgtcgacctctcgctataggattagctaatttttttccagtgaaaggtacaaatagttgggaaatgagagaggttggaattttaaatatacttatgtagtaaaaacacatcatatagacattcagctgtcaattgttgactcccaaaaaaggacaccagaaaaaatgtgttgatcaaagttgtatttattagatttactggaataggggcaaacacaacttgacaaagtcttagtagtctcaacatgaaaactttagttttttatagtggtatttacagtgagctgagctgtattcatatagtttcctattatccggccttttaactacaaatgttattgaacaagtaaaggaaagggaagggctaacaaaaaaaggtaaaaatttccagaaatggaggaataaaattagtagcacctttaaaaccatttgccactcaccctaatcccactatcaactgttgaagaatgaaagaaactgcaaaaattctccattaaattagagcacagggccaggcatggtggctcactcacgcctgtaatcccagcagtttgggaggcygaggcgggcagaatacttgaggccaggagcttgagaccagcttgggcaacctggcgaaaccctcatctctactaaaaatacaaagaaattagctaggcatggtggtgcactcctgttaatcccagctactggggaggctgaggcgtgagattcgtttcaaccccagaggcagagattgcagtgagctgagatcgtgccactgcactccagcctgggtgatagagtaaaactctgtctaaaaaaaaagagcatagtgctttagcatgtattttccctgttaaaattaataaaatgtaaataaccccacctccttaatgattccataaatactgacccaaatcatatacaaagttctaaaaaataaattcctgtggttaaaactctgtattattccaatggtaattttaattttgaatgtatctgcaaaactaaagtgataggattgttgcccacccaggacgttatggattcactcagcattcattcatgaaatattcgttgataatttactatgtgccgtgtactgcctatataaagcagagagtacttgcccttatggattttattttctagtgagtgagacaaagaatgaaatatttawgtataatatagtgtcagatagaaactattgcaatgattttaaaaaaggaggttgaggttagaacatgatggaatggagcgtagggcctgttttacacaaggtagtcagagcaacatctcttgacattcaagcaaacacttgaatgaaatgaaggaaaaagccatgagatatatcagggaagaatattttggatggaaggaacagaaagtacgaaggccatgaaagaagtacacacttggatgaagttgcaggtacacttgtttactgaagttcagcagtgttttcctgtagacaattgggaattaaaataaaaagtacataaagaatactggaggtgtggttctgggctgtcagctaggtgtattcattagttacgtgaatcattcccacagtagtctcttcatcccaaatgtagtggatttggggggacacttgtgacgtctaaacaccaatctttaatctccatatatcaaggatttcctgtcttcttagtgtttaaacaaaagatgccatagtttttcttaaacaaaagtacctgtgtttagacagactrataaatcttagctattagaatgtgagaagtcatccgatccaacctcagtggtgtgggacgcatccaggggcaatcacctgggcagcttttcctaaaattgtgtgcttttccttgtctgtcttcttccaggggatatcagaataggggaagaggagatgcctggctcatgcctttcgagcaagtgcctgtgggtatctgaaatcaggcagataatgtttttattctttgcttgaactattctagtgacaagagcgcattcctaagagaatgtttgtctccacattgtatttctttgtttcagggtctgaagattaccagataaatttttgttctgttctcttttttgttctttttttggatatagggaggaaggcgataggcaggggagaggaaatcgacctggtcccagacacaagtgagatgttatcctaaaagtgcatcagtgtcaatgtcacctgtgccctcttcccttcccttcctctccaccctgaagagaatagaatagatgggatgggaatagggatgggagactttgtttgcactcaagaccctccagcctggctcagttgtgctaaaaagaggaaatggtggacaataattctataaatgtcctcagtaagtaattatctcccctttatattccccttggctgtttggcacccttcttaggcttatcaggttgtattacatattgttgctgactaagatgctagaaccagtacccaaagcacatgagatgttatcacagagccaggcaaccagaccatgatgttatctgtgtgattttagtttttgtcttactcaggatggtttgaccacagaaaagaaatggttacgctggagtgcagtgtcactatcttggctcactgcaacctccacctcccggattcaggacattctcctgcctcagcctcctgagtagccaggattacaggcgtgtgctaccatgcctggctaatttttgtatttttagtagagatggagtttcaccwtgttggtcaggctggtctcgaactcctgacatcaagtgatctgcctgccttagcctcccaaaatgttgggattacagccatgagccaccgcgcccagccaagaaatgttttgaaggacattataaaaacctttttttaagatcattttaataagttgatttgagaaagaagatggtcagattggttttgtctcgagtaattttgataactcctccatcttttgaactcagacacctatcatattgttcagtatgcttgacaaattataaacattttggtggaaggcatgggatagaaaactgagcctgtgtagaacttaactacatttctaaaattaaattaattttttagaactttttttaagtagcatttttaaaaatcaaaacagtacatgcacatagaaatcagtatggtgggtctgcatttgactatcattctcatcctctgttttatcatcaggattcatgagttacttgaagagaatgtttctagcaccaaaaatcaaatgaatttttttaatgcttccatcagtttatcagaattatgtcacattgttacttcttatgactgtcttcgatttttttttctggagtttctaattgtcttttttttttttttctggttgacaagcaatagtgcaccatcagcatatcctcaagattatccagtctgtgtttccatgagatttttctcctggaatcttatgtcccgctcacaggtctcattccttcactgccctactaggttgaatcaactgtttgctgaatcttatggctccttctcttgttttttacattaatttgtctaggtaatagtctgagatattttcccgaggaaggttgcttaggaaataaaccttctgagaacttatatgtctgtagtcttttttcttttcyttttttttttttttttttttcttgagacagagtcttgctctgtcgcccaggctrgagtgcagtggcacgatctcggctcactgcaatctccacttcccaggttcaagtgattctcctgcctcagcctcccgagtagctgggactacaggcgcgtgccaccacacccagctaatttttgtatttttagtagagacagggtttcaccatgttggacaggatggtctcgatctcctgacctcgtgatccacccgccttagcctcctaaagtgctaggattacaggtgtgagccactgccccagcctgaagtcttttttctgacatcagacttgattgatgcatagaatgctaagtacagaatcatattccttttgtacttagacatatttctagtgtcttctaacatctagattgctgttaagagacctgttgccaatctgatatttcattttattttgaaattttccaaacgtacacaaaatttgataaattactcaattttacagttaaccttttgctctttttgctttctgccatattaatccatgttttatgcattttaaattaagttgcaggtattataatagtatacatcacccctaaacacttggacatgcatatgattaactagagttgaatgtttgattgctttttaaaggcacatatgcatttagaaaaatgcacaaatcataaatatgtcattcaattagtttttgacaaattgtatacatgtctacaacccatacatccattgagatatagaacattgctgtcacccaagaaagttccctcattctctttcccagtcatcgcccccccaccccataccccaagaggcaacaaccaaaatttccgattcttttccatcatatatttggctgtctaggatttacataaatgaaatgatacagtatatactctgtgtagggcttcttccattcaacatgtttttcagatttatccatttttgcacatatgaatatcctttttattacagaatcgtattttattatataaatacacagttaatttttcctttctgttgatggcttccagtattgtttctatttagtaatttaagaatgttttaaatcttcgaataagaaatacctgctaacatgcagtgcacaaaaatctacttcttagtcctacatttctttattcctagtttttgaaattttgttaatacaaaattcagtcaatttaatactgtcaaacgttttatgatttcttgttctcagtaataagagcaggaagaagattatttaaagtcatcccctttttaaaaaagttttgaacatttgtattgaaactagaattaacctttctaactcttaattgactttaggtaaataggtgtttatattaattaggtgtaattaagtatgtatctttcctagaatgcatttatatgcatatgcagcatatgaagtcatttaattttaaagaacacatattgtatggtttggttttgttttggtttgttttttaaaaaaatggggtcttggccaggcacggtggctcacacctataatcccagcactttgggaggcwgaggcaggtggatcacctgaagtcaggagttctagaccagcctggtcaacatgatgaaaccctgtctctactaaaaatacaaaaattagctgggcgtgatggtgggtgcctgtaatcccagctactcgggagacggaggttgaggcaggagaatcccttgaactcgggaggcggatattgcagtaagccgacattgcgccattgcactccagcctgggtgacaagagcgaaactctgcctcaaaaaaaaaaaaaaaaaaaacaaaaacaaaatggggtcttgctatattgctgaggctgaactgaaactcctgggctcaagggatacccagcttatatagttccttttatatgatatattcacagtgggcaaatccagagacagaaaacaggttagagtttaccaggagttgggggaaggaaaaaaatagttattccttaaatggaatgggtgttttacggggtaatgaaaaagttttgaaactagagatagctggtagagacaaacattgtgaatagactaaatactactgaattgtacctttaaaaatggtcaattgtgtttgattttcacctcatttaaataagaatacattacatatgtatttcccttgacacaaagatgtgtaacttttgtattataaattttcctttgttctttggtaaagattattgtcagttctacttttcatagcttttggaatggcagtttatattcataagacccaagtttaaaatcttttcatgatctggaatgtcttttccagctgaagttttgttaagtccatatgataaattacaaatgaaatattttggttgtcattctatgttacacgaactatttttttacacactccacagctttttgtgagtgttgattttcttttttaatgaatgctgattttgaaaattaaagcaaagaaagggtaaagggtgtttttagtctagcatttaagttttatttgtgatatatggaaatttctttatgccttttcttargcaagcagctttcatacagctactctaccatgtttttgttgcatttaccttgctactgaaatggagaacccaatggtaaaataggtggcagtttaagagaattgacttaaatgttaagtttgtatcacttgtacttcattagcatttaacacctatactgtaattttagaaagggcttatcttttctcatgtcatttttttcttggcttatgtggcatttgtgaaaatgcttacagaaatactggtcctacgataaggggtaattggtgttcttgtttgtgaaagtcacaccaaggtcacagaaatggctactgattaaattgtttccatcatcaaagatatacctctgctcatgacttagtggagatctatttgagtcaaaatttcartataaaatattgtgccttctttcttttttctcctctttctacttgtcctcctcttataaaagttcaactttatgcttgtatcaagtataaatcattttaggaatcaagtcaattaatgtgcctttatccccaaaatttaatgggtttattagggaaattttcaaaatggatagcttgtcaggcatactacaattatacttcgtattttgttcagactttgtaatgttcttagaattgttagttgcttacagcaaattacatatgcacttagaagaccttctgtcttgactcaagtcatgaaggttaagaaaaaaataaatccatccaccagtggacaagggacctataccatgtaatccaaatttgtaagttatatatagacaggtggctgaggaaatctataatttcctcattgataatagttttaagatcataggcacagagtagtgattccctgccattctatcgttaacacttttatctagccaatgcatggcagtaggttagtaggagatgcaggcaaactgacaagtttgtttttcctcatagaaaattagaaacaaaattagaagtgggagaggctgcccgctgtagctgcactagcagcaggaactgataactaaaatcaaagaaggaaagagaattataaaaggtattaagtagtttaaaactattcgggaccatttagcacagaataaattgtccatgtacctagtagaatgaaaaactgccaaggttattctattgcactctggtattttgtttttaaaacaataatgaaaaaaaaacagtgcaacagtcatctagaaaatatacttattctttgactatgccaagtaattaagatattacgaaataattgagtgtacattaaaagttaaatcacgttgaattgcataggaacactgatagttatttcaaactcacattagtgaagtagtatataatttatagttttgtcgttttacattgtggggtattaggagaatcttttcaaatggaattcctagagtgattgctgtttgagatcggggggtgtatctttctggtttctttctagttctatagctttttaaattttttgagtgaaatgtcaaaaattattgtaaactgatttgagagttgttttcattatctgattcattaagcttcagattttaactcagtattaccttgaaggcaaatgtttattttaatatgaaaatgatagttcatttgttgatgctagtatttatgactgtatcataaattaacatgagctgcttagagtctaattgcaaaattgaaaagttagcataaattatccatcatataaatgaaaaataatttcagtttatttagtaaagaagtttttgtgtctaatgtgcaagggattttgctttcagcattgtaagatttaatagtaaaatatatgctgtaataattatgaaagcatacctacatctcttttaacttatggcatgacctaatccagaatttttttttcttttttggggggtgcggggagggacagggtcttgctctctcacccaggctggagtgcaatggcatgatcttggctcattgcaacctctgcctcccgagttcaagcaattctcccccctcagcctcccaaatagctgggattataggcacacaccaccacacctggctcatttttgtctttttagtagagacggggtttcgccatgttggacaggctggtctcgaactcctgacctcaagtgatccacccgcctcagcctcccaaagtgctgagattacaggcatgagccaccacacgcggcctaatccagaatttaaattcttcacagtatagactaagtcaacaaccagtgatagcttcacaatttctaatgagtgacttgagagtgacaatctgatagttgaccctaggtacttttttcacagcaaaaatactatatttatttagattgtatattaattaagggaggctttagaggaagttgatagagatattggttcttaaaaagcccaggtcatcattggcactccagtttaagttagctttcttcactgtaatgacttgaaaaagtagagttgttagaaatttgtaatttcttactcattgtgcaaaccaggacatatttttaaatgaagtaaattttgtgaagtggaacagtttgataggtagtttgttgttaacattgcttttttttttcctcagagacaggccctcactctgttgcccaggctgaagagtgcagtggcatgatcatagctcactgcagcctcaccctcttgggctcaagcgatccacctacctcagcctccttaatagccgggaccacagacatgtgccaccgcatccagttaatttttgtagagacagggtctcactgtgttgcccagggtggtcctgagctccttaactcaactgatctacctgccttggcctcccaaagcactgggattacaggcatgaggcaccgtgcctggctctaacattgcttggcatccattctatgaatagatttcttggctatctagattatgtttgcttasatatttgaaagagtctttctgaactaaagttcaggcaaatgggaggaaattcagtatttcatactgaaatgaagtacaaccctctgttccttttttataaagtggcatttgtgctttttargatcacaatatgttgtggcaaaaggcaaacagcagtgatttgtacaaaatttcagcagatccagattagcaataataatgtttccaagtcatcaccatggaaagaggagtaggaaggaattgagatgtgtagcagttgcagaaatcagggattcaggagcatcaaaatatttgaatgtcggtcaagctgatgcccgatcaagcactgttataagaaggtttcaaaatgtgatgtttttacaagtttgtatataacctgacttatatgaatcatgttgaaagtggccgatgttaatattctgctattctgctgaggtttttgtatgtgttttttgtttgtttgtttgtttgtttttgagacggagtctcactctgtcgcccaggctggagtgcagtggagccatctcagctcactgcaacctctgcctcccgggtcaagctattctcctgcctcagcctcccaagtagctgggattacaggcgtgagccaccacacccggctaattttgtatttttagtagagacagggtttcgccatgttggcaaggctggtctcgaacttctgacctcagctgatccgcccaccttgccttctcaaagtgctgggattacaggcatgagccacgacgctcagcctctgctggttttttaaacaagtttattgagatataattcgtgtactgtaaaattaaccctattaaagtgtacagttcattcagtttttatatattcacaaagttatgcaactatcaccatatctaattatagaacattttcatctctccaaaaagaaaccccatacccattagcagtcccttccacattctccctcttccccagtcctcagcaaccactacttttctgtctctatagatttgcctattctggacatttcatatatgtgtaatcatatagtatgtggtcttttgcaactggatgctttatttagcataatgtttttggggttcatccatgttgtagcatgaatcagtacttcattccttttcatttctgaataatatgcgtttgaatggatatatgacgttttattcatcagttggtggatatttgggttgtttctgttttttggttattgtgagcatcactctgtaaacattcttggacaagtttttatgtagatgtatgttttcatatctcttggttatatgtctaggagcagaattgctgggtcatattggtaactatgtttaaccttttgagaaactgccaaacagttttctaaggtggctataccattttgcattctcatcaagctgtggattaggggtgggcccctatttcaatatattaataactggtgtctataaaaaggggaaatttggagaccgttattcatacaggaaaaatgccacatgaacatgaaaatggccatttacaagccaaggatagaggcctggaacagatcctacttgaccattttaaggaaccaaccctgccaacaccttgattttaccctcagaactgtgcaaagttaaatttttgttgtttaagctacccagtttgtcatactttgtcacagaagccctcgcaaactactacataagtggtccatgtccattctgtcctagcaaataggcaaacttcttttgttttgatgacacacactcctgctgtgacatacagtagtaaacttaaaagtaaaataagtcgggcgtggtggttcacgtctgtaatcccagcactttgggaggccaaggtgggcggatcacgaggtcaagagatggagactttcctggccaacatggtgaaactctgtctctactaaaaatacaaaaattagccaggcatggtggtgcgtgcctgtagtcctagctactcgggaggctgaggcagaattgcttgaacccaggaggtggagattgtagtgagccgagatcgagccactgcactccagcctggtgacagagcaagactcttgtctcaaaaaaaaaaaaaaaaagtaaaatagatgtcatctgtcctgayggaaatacaaatcaaagccatagtgagatacctttgtgtctataattacaaaaatcagataataacaacagttgaaaaggatgtagacaaattggaatcctcatatactgccagtaggagtgtaaagggtgtggtcattttggtgagtctggaagttcctcaatttgttaaacacttaaataagtaaacatgagttaccctgtgacccaggaattccactcctaggtatataaccaagggaaatgaaaatatgaccaaacaaaactgtacaccaacgtttatagcagcactatttatcgtagtgaaaaagtagaaacaacccaaatgtccgtcaactgatgaatggataagcaaaatgtaatatccatgcagtagaacattgtatgacaatacgaagcaatgaagggccaggcgagtggctcatatctgtaatcctagcactttgagatgccaaggcgggaggatcccttgtgtccaggaatttgagatcagctggggcaacataatttctacagaaattaaaaaaattagctgggcatggtggcatacatttgtggtcccagctacgtgggaagctgaggcaggaagatcactttagcccaggaggttgaggctgcagtgagccatgatcttgccactgtactccaacctgtgcagtggaacaagaccctgtcccaagtggggggatggggggagggaagggaaggaatgaagtgttgacacatgttccaatgtgaatgaaccttgaaaacatgctaagtaaaagaagacagttacaaaggaccatgtactgtatgattccaggcatacaaaatgtccagaataggcaaatctatagagacacaaagtaaattagtggttgccttgggctgggagaatggaggggattagcaggtgatgactaagagcagkggggttgttttttgtggtaataaaaatgttctaaaattgattgtagtgagggtcacactactccgaatatacaaaagccatttaatggcttttataccattcggtagtaatatgccattgtatggtatgtgaataatatctcagtagagtggttttttgaaaacactagaacatatatgatcaaaaaatgaaaaaatcaactagacctggtaatctgtgtttaagagtagcagttgattgatcatttattatgcatgtgctatgtcagactttttttttttttttgagatggagtctcgctctgtcccccaggctggagtgcagtggcgcaatcttggctcactacaagccctgactcccgggttcacgccattctcctgcctcagcctcacgagtagctgggactacaagcacccaccaccacacccggctaattttttgtatttttagtagagacagggtttcaccgtgttagccaggatggtctcaatctcctgacctcttgatctgcccgcctcggcctcccaaagtgctgggattacaggcatgagccaccgggcctagcccaaaactgtcattttgaagcaacacttactagaattcatatagaaaaaaaaaactattaaaattcctctgcttagattctctaggtcttacaactttatcagctacctgtttacctagatcatattgctctagcatcctttttttttaaacccaaagaattcttcactgatcttgcttattttagaaatatttttagctttacttgtaagaaaggtactgctctttaaagattgaagagcataagatgaagactgaaatgtgggatcttactgccttttttctttcttaatcagtgacttttaaacctctatgaagatccagatctagaattctaggacaagtgcccttgtggttctacttactctacggtggtaattagcaatttagtaaccttaaggaagtattttgttgttagtttattgctctttttttcctctactaattttactttttttttcctttttactgtccatatttaacgtaagtatatcctttgtatctttttcttcccatactataacaagggtcttgaaactctttatctctgattattctactcctgcactttaaattgtaagtgatacaaatccaaagcatacaaactcaacaaaacaggagtcagagaatttactaaactcatcgaatgccaggtccagaagttaagaggcagccaggttcaggtctcagatggtgtaatccgagtcttatttcttctccacaggtattctgtagacagcttctttcatgttgccaggaaaaattggttactataaatcctgacttacttggtccttatggctcttgatcccgatagcagtgagccagtggcaaggatgatcatatggcatattctgaatgacccagcttaagtcacatgttcaacattgaactgtggccagggactggagtatagttcatgtctaggtcatgttctcactcctggggctggaagtggaacttaactgccaggcaaggctgctgacattgagtgatattattaccaggagaggtggaggaacaaggtattcaagagacaaaaataatagaggctagtaagtgtagttagtatacattgaacaaaaaacatgggcccatgtacaaaggaatgacatcagatcttagaatacattaaaactatgtaattctttgagttgcatggagcccacagtgctagagaagtacgtattttaagagatacagtggataatgataaatgataatggggctaaaagtaataaaacattagaaatatcgagttatagattaattggttcaagtgtaatgccaattctttaagcacacatcataagcagctgatacgaaaacatcagttttcacacattggtaccatccaatagagttgtatacagtgatggaattgtttcgtatctgcactgctcaacatggtggccactagccatatatgcctgctgagcagttgaaatgtgtctagtgtaactaaagaactgaatttttaattatatttagtactgaacagctgtatgtggctggtagctaccttattagacagcacaactatctaaatttggaacaacttgatcaatatcctgcctcctatatttaatttaagatattggggagttttacaaaccttgcttgctgttgttttcccatttgtaaaatgagagtaaatatcttataataaataaccttagtgggttattttaaggattaattgacttaatccatgtaaatgtgcctggcactcacctagcatttagcatttaagtgttagtctttattgtcattgttatatcactaccttagaatgggagctaaagaaatgagtagccagtaatccaacagttaaaaattttattgaacatctttggagctgtagcagttgaacagtttattaatgtgtatattattatggactgagtacagaatatgtagtttggggagatttagggatgaacatttcagtactgtcttggcaatttaaaatttttatcaaacaaaggtttctgtacatatttcatggtgatttggtcagtattttgtttctaaggtggttaaatgtgtttttaaacttttaaaatgataatcatcttccttttaggattccttaagggttttcttctctgaaagtcaaaatgtaatttaaaaagtttaaagggttactactttttagcctgtcttaactttaaaattgttttacaaaaacttaaaactaaaataccttatcagtggtatttatgattccacaaagtgtgtgtgtgtgtgtgtgtgtgtgtgtgtgtgtgtgtgtgtgcatgygtgtgtgtgtgtggttttgttgttgttgtcggagacagggcctcgcttggtctcccaggctagagtgcagtggcatgatcacgactcactgcagtctcgaccttctgggctcaagtgatcctcctgtgtcagcctcccacacagctgggactacaggcacatgccaccacatccagctaatttaaaaaacattttttttgtagaaatagggtcttaccatgttgcccaggctagtctcaaattccggggctcaagcaatcctcccacctcaccttcccaaagtgctgggattacaggcatgagtcaccatacttggcccacaaaatatattaccttcttgcattccttgctagattgttattttgtcccctgagatattttgggatggtagaaaatcaccaggtccatcctgcatttcttctaatttatactatttttgtgccttttaaaatatcaacccttggctagaagtatatttatatgccttaatctctgtattatcaattattagatacttgggctgagccccttggaccatctcatttccctccttcctgcagtaggatccaactatttactactgtctgtaattcagtattttagacacttgtttagtagttggttgtctcttatcactagttgattgaaggaactgtctatctccatgaatgtttgaagtatgccctggcagagctctttatgtttttggaatgtggagctgactatagctttctctcagtaataaattcatctaagtaatgaaacattcacttactaaataaaaggaaaaagagatacactcttaatttatgctatgcgcagtagatagagttgaacaaaagttttaaatatttcactatcatcatrtataattcagttcgcatctgttccataacttactaaatcaattcagtgagagggctgagattttgaaatgaccaaatgacaaattttccctgcagtgatggcatggaaatcacttggtctttgtttacaaagttggcgcatgtatatattattctgcaggacctattgatttttccactctaaaccacttaatgtttaaaatttcaagttcttaggatttattagtaacattgtgagcatactaaaaattgaaggctgtgtaaaccaaagaatttaaacatgctgcaggtgatacttagattccctttgtctcagttctaactcaaacatgaagcatttttactttaccacaatctatgatattttgacacatttctttctgaatcttttttcaggctggagtgcagtggcgctgtctcggctcactgcaaacggcctcccaggttcaagtgattctcccacctcagcctcgcgagtagctgggactacaggcatgcaccaccacatccggctaatttttgtatttttagtagagacggggtttcaccacgttgaccaggatggtctcaatctcctgacctcgtgatccgcccacctcagcttcccaaagtgctgggattacaggctctttctgaatctttcatttaaaccatttcactaaaaatgaaaattatagttgaaatatttagaatcatagaatctttggataagaataaaaaatatacaagttgtggtagagacttgaggtgcttatctgtactcagttatgctttctgggcatctggaacagtacacttcccagtcccgttgcacttaggtggtaccaggtgactcattctggagtgtgaggagagactgtcgtggaggctgtatgttaagatggcagagccacttacagaaagaagccaggaaccccaaacttaaagcatcctgagtctctgagtatgacatggaaggcagataataaatataaatataaaagttgttcttagtgcaagggacatacagaaacaggccacaggccctagtttactaacttctgtgcttgtcacctgagtggtaacaaatgtatggtacaaccaagacaaaagtctttctgttaatccagtaagttttaagggttaattatcacagcattacttgacttactagatcacaggtgatctcatctaactgtctgactccgtcagatttctaaagaatgcttctgataccaggaatctctgcactgtacattctgtgagatgacctgttccattgatggacaactttgtaacaaatttttctctttttagtgagccaaagtcctgattacattttatctgttggttccaattttgccttcggataagttttatattttgtggcagcttttcattatccaaagatagttttcaggtctccctggtctgttaacgtggagaaaacagaataaaatagcaaatgacattttaaaaaatgttaagcttggtgggacgtggtggctcacacttgaaatcccagcgctttggtaggccaaggcaggcggatcacttgagcacaggagttcatgaccagtctgggcaacatggcaaaaacccgtctccactaaaaatataaaaaattagctggttgtggttgcatgtgcctgtggtcccagcttctcaggaggctcagttggaagcatcacctgagcccaagatgtcgaggctgtagcgagccaccatagaaccactgcactccagcttaggtgacaaaagtgaggtcctgtctcaaaaacaaaaaaaaaaccaagcttaaaataaaagttgtattaactagaatataataaactacatttaactttagaaaaattaactacacaagcggtaagaagatttgacccagttctgagaaaaaaactgtcagcttagtataaaacaataaaatgaccgttaaagaattaactgaattataggcttggcgttttgtttatggcaaatatttctctcctgtactgtgaatgagtccagccatctattacattaaaggccaccaagttttaaaggaaaaattgacaaagttagtctagaggaatggtcaccagaatgtctcaacaaaagtctagataccgttaacacagtgaatggctaaaggaattagagatacttaaagagaaacagcccattgcacaatatctcataatctcagatagttacaatgaaatctgtcttttataaattttctttctctatcttcacagcggtgactaatagctgttygtaggaatgaggcgtatgggcatccaggctttacatttgatctttctagccaacatctttcagttatgtgtttgaccatcatccccaaagcttctataggatatttggtcaagaacttttctgaaatcatacagcatatagtctgtagtatattaacaacatactaattctatcaaaaaagaatttaaagttgagtattagatgatatgacttattctgtcaatgccaattcttaattatttggtcgcttattatttttttctagttgcatttcttctagtaatctagattataattttggtaggatttggcatcagatatactaagccataagtcttaaacttacaccatttgttgcaaattgagagttcacttaccaatatctagacttgaaaaatcttatctccttaattgaataaaactttccttctcaaatttatttacaccttcaggttcatgaagacctgcacagttgaacttattttaagtggccaggtgctttcatctttacattcctactttagtcccatactttatcaggtatctttttaaagccaactatgctaagtcaactaaccttatctggttgggataaattcatctttagcaaaggaaaacgtcctgtttcaacctcagtaaatgttaactgttccttttatttcatttcttatgaaaataaatggaccattttatccttttactttgtgcctttactgtttgctgtcaggttgataactagggcgaccacattacctgttgcccagcaaaaataatagtatcccctttcattatgaaaagtattccagtttggataagttatttggtcatcctcactgttgtttaccatttttggcaatgattggcagaaatgtcttatgtgagtgtttcgtttcatttggctgataacctaattttttcatttaccccttgcaactaacaagtagtctatgagatcatactcaggcactctgaaatccttagcatggggaataaatgcgtgcatgtgtgtcactcttgtgctggggccatataatataatttttgcttatgcactgccaaagcaaacttaagaattgccttttaatttaaagcaagaaaaatcttcttttttctaaaaactttggtgcatttcctgatttgctgagaatgagaactgtgtacatatcttgttccattttgctcttgctgccacgactcctaggtccagatttgatccactgtcaattctgcatcagcgtttttggttagcatatgtcttcctttcggtaagggtgatttatttgattttattgtatactttttggctctttagtagccatttaaaatttttggcaaggtatttggtataaaatcataacaactatctttgtaggactccataatgatagccattactatttaaataagttgggaccagggtgcggtaaatacccaaagcccagtggaatacgtttataatcctgttatgggaggaaaagaccaaccactaaaaataagctagctatacaacaccagccttaatttttttgtggttacagtttagctcttatgtattattctatatgtgttagtccatttttgcattgctataaaggaatacctgagcatgggtaacttataaagaaaagtggtttgtttaggctcagtgttctgcaggctgtacaggaagcgtggtgccagcatctgctcctggcgagggcttcaaggagcttacaatcatagggagggtaaagggaaagcaggcacatcacatggtgagagcaggagcaagagagagtggggaggcgccgcatgaatcacatcctctatgatctcagagcaaaaactcattcatcatcacaaggacagcaccaagccattcatgagggatctgcccccatgacccaaacaccacccaccaggtctcacctccaacattggggattacattccaacatgaaatttgaatgagacaaacatccaaactatattactgtatattttgtacctctacctagacagkaagttatatgcagcttctttcttaccatgtgtaatattgtacttagaaatgagataaatgaaatgtgcattctgcaaatggtgaatttaaatgttgcagaaaaatttcctttttttgttttgttttgtttttaagacagtctcactctgttgcccaggcgggagtgcagtggcrccatcttggctcactgcaacctccgcctcccaggttcaagcgattctcctgcctcagcctcccaagtatctgggattataggtgtgcaccaccatgcccagctaatttttttatttttggtagagatggggtttcagcatttgaccaagctggtcttaaactcctgacctcaggtgatccacccggcctctgcctcccaaagtgctgagattacaggcgtgagccaccaggcccagcctaaatgttgcagaaaaatttctatagtgcagagtagagtgagattggtctcaaagtgtcacatttcccatatgtgtaggtcctagcacatagattttctttatatttttataaataaatatgtaatacacattcatagaggacaaaatacagataagcaaaaatatgaaaactarccaccaataaattactatttactgttaatatttggtgtataaccttccaaacttttaaaagtatattttctacattgcctggcaagtagttatcacaaaatggataaagtattcctttttcttattttaactaaaaatcagatcatactgtacataccattttatggtctgcttttttgtttcacctaaaatgtcatcatcctcttctgctgccagtaagtacatttctgattttattgaatgtactgtatttccatttaacacagccagttctagtgtgtacagtttttcagtcttttaaaacaacacttkgatgtatgctgtaattttttctttaggataaactttctgtaagtggtcttcctggtcttcctggatcaaagatatattcagtataaggctttcatactggtaaactgacctccaaagagtttggaccatttttcacaacagtttatgagagtgtacatttgctgagccctccttgcacttggcaaaattctcttctgtccttgccaatgaaaaaaaattattattattattattattattattattattattattwtttttaaatttaagagacaagatctcattatgttgcctggactggacttaaacttctgggctcaaggaatccttctgccttagcctcctaagtaactgggatgataggcacgtgccattgcatctagttcaaaaatgctgttttaaaaattgcttttctttaatcaaaaatcgcttttctttaatcaaaaatctttcgtttctttgcgttggactacctcttcatttctttggctgtttcaggtatgttcatctttttcttctttacttgcaaaattaaaaatataacttgatagtaattattaaatcttaattagtagaaattactgctcagagccagacttgattttcttttttttttcttgttttttgcagtttcaacagtaagaaactaaatcactgccttgtacaataaaaagctctatgttggggtgatcagacccaacaccaggtcatgggggcgatgagtccggtggagtcaaaggaatgagaaaaagacagtttgagagagaaagtgggaccggggagcctacgctatttattggtgatcaaacaaagaaacaggtggtgaggatgtggggattgaaagaaactggtgtatcaagtgaatgagaaacctatggctacttgagataatgggagtgctagaagcaaggagctagcaagtctagccgacatgcaagccctgcctcagcttctctcccaacactcagcttttctcccaacagatatatttgaaacttaacttcagatatacatatagtaaaattgaaaacttattaaaataacttatgattcatatattatgtttgcatcttattttatctgattgtctaccctgaacaacttctacctgccctgagctagacacacccttttgaagcagatagaaggctaggggttttgaggggggaagcaagggagttttttgctttaaaaaaacttggcaattgttttgtaatactaatctagaatatatgtaaaactctttgtactatcttacatagcgtctttatgtgaaaagggataagttagggagtaagagtgatactgcccagagatctcacaaggcatcgtttacattattgaaatacagtgcttgtggcctcaactttgagaactcrgaaattttgtttttgtagattcacataaaataagctcrggttatatatgctaatgatgtttgcagagattgaataaatctgaatgccagattattaatttactgtgaaagttgagtagtgcttctgtcagcattaccagtatattttcttcttcaggttaatctgcatgraaatccaaactattaattagaaggctgtttggtgagcaagaggttcagattaaggtttgttagtcgtttggatggttctagggaaggaaatgatcaaaactgtaagcccagcgcggtggctcacgcctgtaatcatggtgaaaccccgtctctacaaaaatacgaaaattagccagcatgatggcgggtacctgtaatcccagctacttggcaggctggggcagaagaatcacttgaacytgggaggcagaggttgcactgagccgagtactgccattgcacttcagcctgggcaacacagcgggactccgtctcagaaaaaaaaaaaaaaaaaagtaraccccagcgagatgctttctaccttgctgttattggcactactggctctaccacacgtctttgtggtcaagttctcagtgttttcaagtgtgaaagaatttgtttttaatttaaaaagtgtctgtaatagtgcttgggatacagatgagtgtatgaattttttgcagtaactgagcagtatcctaccaatctgcagcccgtagacaggtagtccctgctatctcctaacaatcctgcttctctttatacatttggtccagttagagcccaatataattaattggtacttattccttggaattatacacccaggtactttgggtgctgttaatttcttgagtcatatatagacagtaacttcatttttcccaaagatgaatgagtacattgtgtatatgcatacacgtacactcaataagctttacttttcactcccaaagtgtgaccttttaccagtgtggggaaggggtctaggggcttactgcttgaccaatgttctggtgagaatggtaaagctgagtatttcacctgttcgcctctagagcttagtatcctagagtatatcaagttgcatctattttatcttccctttaaaaaagtaaagtaaaattttaaaatctttaattaaatatttaaactatgggttttctttattgaaagggtaaaccatgcccaagtcatttactgttctcatttcaggattttcctgtaggtattttttctatttttacctttgttgtttttttatttttgattttttttagagataacgtctcactctgttgcccaggctggagtgcagaggcacagtcatagctcactgcagcctcaaattcctgggctcaggtaattctcgcacctcacactcccaagtagctgggactgcaggcgtgcatcaccacacctggcttttttttttttttttttttttttgcaggggagagataggatcttactcttttgaccagcctggtctcgaactcctggcctaaagggatcctcctgccttggcctcccaaagtgctgggattacaggcctgagccaccatgcctggccacatttttgtgtttttttgtttgagacagggtcttactctgtcacccaggctgaagtgcagtggttcaatcacgcctcactgcagcctcaacttccccagactcaggtgattctcccacctcagcctcacaggtagctgggactataggcacatgccaccatgtccactaattttttgtagatatggaatttcaccatgttgcccaggctggtctcaaacttctgggcttaagtgatccgcccaccttggcctcccaaagtgctgggattataggagtaagccactgcacctggccacagtttttttgtttgtttgaggcggagttttgcccttgttgcccaggctggagtgcagttgtgtaatctccgctcactgcatcctccacctcgcaggttcgagtgattctcctgcctcagcctcccgagtagctgggattacagtgtccgtcactacacccggctaattttttgtatttttagtagagacatggtttcaccatgttggccaggctggtctcgaactcctgacctcaggtgatctacccgccttggcctcccaaagtgctggaaytacaggcgtgagccacttgtgcccggcctggccacagtttttttaacctttgaaatagagttagtattcatacaagtttaacaatacttttttaaaagaaacagtttttcatttaaaaaacacttctattcatagggcgtattggtgacctctcggaagaaagggataaggagtcgtcacttggccggtaagggaaatagactcaagtggatgaggtccaacgattcagtcttgagatttcactgccctaaaagtcaaataatgtgtaagaggacagcgaagggaagacttcctcctcccccacccccacctcaggaaatcctgatcttaattctcactctgtatacccagtcactcaaaccagaaacttgggcatcatatctcctctgtctcctccagtccagtcacttactaagtcctgcagtttttactgtggcctatttaagtttcagtggtttaatattctggaatacataggctagatttgccctactctgtaggaataaatcagagtagatggtgatgtttgtcagttaaaactattaagaatgtagaagattttttttaatttcgcaattactgccaggcacggcagctcatgcctgtaatcccagcactttgggaggccgaggcgggtggatcacaaggtcaggagttcgagaccagcctggacaacatagtgaaaccccatctstactaaaaatagaaaaattagccaggcatggtggcgcacgcctgtagtaccagctacctgggaggctgaggcaggagaattgcttgaacccgggaggcagaggttgcagtgagccaagattgagccactgcactccagcctgggcaacaaaatgagactccatctaaaaaaaaaaaaattcataatcacagagaaataggtagtatatcaaagtagttaagcacatggattatagagccagaccactcacttcagatactagactctaccgctcactggttgtgtgaccttaaacaagttagttaacctatctgtctcagttttcccagctcagagattaggatgttagtacaacttgcctcatagggaatgcttagaacatacctttcatatagtaagctcttttttttttkttgttkttttttttggagagggagtctcgctctgtcactcaggctggagttcagtggcacagtctcggctcactgcaagctccgcctcctgggttcacgccattctcctgcctcagcctcccgagtagctgggactacaggtgcccaccaacatgcctggctaattttttgtatttttagtagagactgggtttcaacatgttagccaggatggtctcgatctcttgacctcgtgatctgtccgcctcggcctcccaaagtgctgggattacaggcgtgagccaccatgcccggccagtaagctctttttaagtgttaactcttgatccatttgttgttttcattcaagaattagaaaaatcgatttcctcagctgatgattttgaattaactattgattgtaaacatctcttttatttactaggatatttgagatgaggaattttaaacaactaaattattcttattttctgccacttaagcttgtgttccaccaactgcatctagaataattctctgacctttcatttgctacacaagttcagttatctcagtattaaatgtcatgtagggtagtaaagtatcttccatgtgtaatgatgtgtctgtatgctgtaggaatacataagcaaatattgccttctactttgtggcccatgtacttgcaaacaaaaaatctttcatttgatttctgttagtgattagatgactgtgttacagttaccttcagcctctcaagaatctattttgtataacttaattagcagctgaaaagaggagagaaaacttgtttatatactcaaagggaaagaagaacttttttggaaaaacaaattatggattgcattgtgcatcccacacctaatgctagaatcagttcccctttacaactgtctgaggacctaggataaaaattagttctcccaaagttgtagaaatgagcacaagaagatagaaattaagtaattcacagacttcgttgtagagattatgtgtaataaagcttcttgccagtattgacaaagtccttgttgctcttacatgccatcaaatgtacaattttattgttccaggtcctttgctcttttatttagctttgttgtcttaattttaaaactattttcgtttttaaaaaatcatctagcctgaagtgtcacaaaagtattttcaacgtgtgtgttgtagcctaatggtgggaagactcatttaggcaatgacttgatcaaaaattgcattttgacccctcagaaaagtcaatatacttattagcattttttatttacttttcttgaggccaaaaataactatacattgttttttaaaacatgcctatactgccagaaattcctggagttgcgacatatttttttagttaatgaggaatataaaatgtttgttgaaaaatgtttttcaagtatgtcagattcagataaattgggtttcatcaaattaaaaagttttatattttataggatgccatcaagaaagtgaaatattttcacagatggaaaaaaatattcacaaaccatgtatctgataaaagatttacaggatgtttactagcaaaattttattttattatttttttttaattattcatttatttattttttagagctggagtcttgctgtgttgtccaggctggagtgcagtggcacaatctcggctcattgcaacctccacctccccggttcaagcaattcttctgcctcagcctcccgagtagctgggactacatgcgcacaccaccacacccggcttattttttgtattttagtagagaccaggtttcaccacgttgcccagactggtctcgaactcctgagctcaggcagttcgcccgcctcagcctcccaaagtgctaggattacagacgtgagccactgcacccggcctaattttatttacttttttaagacagggtctcactctcttgcccaggccagagtgcagtggcacaatcacagctcactgcagcctctacccctggggctctagcgatcctttcacctcaacccccaacggagctgggactacaggcacactctaccatactggctaatttttgtatgttttgtagagacggggtttcaccatgctgcctaggctagtctcgaactcctggactcaagcgatctacccgccttggcttcccagaatgctagaattataggtgtgagccactacatgtggcctgcasaattttattttgttttattttattttatttcgagacagtgtctcacttcgtcatccaggcaccacgtcatccaggagtgcagtggtgccatctcggctcactgcaacctccacctccygggttcaagcaattctcctgccttggcttctcccaggtggctgggattacaggcacacaccaccacgcccagctaatttttttggtttttgtagagacagagtttcaccgtgttagccaggctggtcttaaactcctgacctcaagtgacccaaccttggcctcccaaagtgatgggattacaggcatgagccactgcacctggccccagcctgcaaaattttaaaaaatgataaaggacgtgtatacagaatacataaggagctcttatgactcaatagtaaagacacataacccaatttaaaaggggcaaatgatctgaatagatatttttccagagaagatacacataaggccaataagcacatagaaggatactcaacattttagccatcaaggaaatgtaaatcaaaaccaaaattgaaatcaaaaccacaatgagatacaacttcatgcccactaggatgactataataaaacaacacacacaagaattggtaaggatgtggagaarttggaaccgtcctacattgctcttgggaatgttaaattgtacacaaattgctggggaaacagggttgtcattttacccaacaagtcaacccagatatataggcaagagaaatgaaaacgtgttctcacaaaaatttgcataatacatgaatgttcatagcagcatatttataataatcaatagatggaaacaagacaaatgttatcagctgacaaatggataaacaaaatgtgtatccatgaaatggaatattattttcactgtaaaggatgaattgctgataaatcctacagcttggatgactcttgatatcactgtgctaagtgaaggaaatcagccacaaaagaccatatattgtatgataccatttatataaaatgcctagaataggtaaatctatagagacagtagattagtggttgtctcgggctggatggggaatggaggaattaggaggcaatagctaaagagggcagttgctctatgggatgatgaaaatattctaaaattgattgtgattgttacataactatgaatatactaaaaagtattgaattatacactttaaatgggcaattatatgacatgtcgtttgtatgtcgataagctgttaccaaaagaaaattttcaaggaggacttccaaatagctaaagacagtagtggtcatcgatctactgcctcccaattttccttcaaataaatatagaataagaaggacaaaaatctatacagaatttgaagacatagcataacttgaagagaatttaagacttcagtataactgtaactaaaaagagagcactcaccagatcctggcatgtgatctcttcatactcccattcagctcctgcctgccgcaagactttgtggcaagcacaggcaaagaaaaatgaacacaaaatggagagggaatcttaacgttatctaaatgttcagccagaagaagtccatcctaagtctgaaaattcttttttttttttttaaggtttccaaatagaataagagtagggattataagggagggacttaaaaatacatacaatctgaagaggcagtcttcaaagtgcgtagcttataggggagaaaaagaaggtacataagaagaggagaagcaccctttggcagttgagtggtgaaaaggtaataaagcaaaggaggaaattcagaatgcagcaaaacaaagagaaccacaaagttacaggattcatagccaactgttccccccacaacaaaacaaataattggcaggactttgctatactaacagaagagggcactgttaaaataggaatcttgtaaaacatcccagtaatatggtgctttaataaaaaaatttatagcagtaaacacatttatctgaaaaaatgaacataaatgaattaaatttccagctcaaaacaaaatttaggaaaacaaagtaaacctaaagagcatacccagaaggaaataataaggataaaagcagaaattaatgaggtagggaatagaaaaacaagacctaacaaatctgtattctgaaaatttaaaattataaaatagacaaacggttagctaacttaatcatgtaaaggaaaggagtaaaacatagatatgcaaaataagataaagcggtaaataaccactaaaaataatttttaaaaaattttaaaatcacaagagactacttagcagacctcactgcagttatttgaaaacctagatgaaatgagtaattttctagggaaatgcatattaccaacatggagttagagaagttgaagagactaatttccataaaagaaataattcttctaaactatcccaccaaaaggcattagacctgaatggtttcacagagcaattctatcagaccttcaaagaccagatagttccactgctgcataaattgttccagagcattggaatgttggaaagcttctgaatttctgtgaaacaaatatagtattgatacttaaacctggtaagaacagtattgaaaaaagaaagctataaatcagcatcccataagaatattgatgcagaagtgctaaattaaatattatcattgtgaagtgatataccatgaccatgtgagatttatttcagggatgcagggctggcttaatgttaggatactcattaacatactccctattgatagatttgtgaggaaaactcagtgtctccataggtgctgaaggagccttcaacaagaccacccattttgtgatatttctctcccgctctctcaaatagggattgtgggatacatttttgaaatgataaaatttatatatcttagtcctaaagccaggaatcttatatataatgggaaatactagaagtatttccacagtatacagaaacaaggcaaatgtgcactatcttcactgctgttcaacattataatggaggtattaaccaatatagttagatacatygatttaaggcataagaatgggtaaagaagaaagactatctctgcagattatatgataacgggttgagcatccctaatctgaaaggctccaaaattcaaaactttttaagcagtcacacgatgcacaaagtaaatgcttattgaagcacttcagattttggattaagggtgcaatgaaaataatgaagaaattccaaaatgcaaaaaaattcaaaatacctcgacccaaactgttttttggttttggccagagtgcaatggcacaatcttggctcactgcaaccttgacctcccaggttcaagcaattcttctgcctcagcctccaaaatagctgggattacaggcacctgtccccacacctggatatttttgtattttcagtagagacagggtttcaccatgttggccaggctggtctcgaactcctgacctcaggtgatccacccgcctggcctcccaaagtgctaggatttacaggcgtgagccaacatgcccggcccaacccaaacatttttgataagggatagtcaacctgtaatatggctggaaaactacaggggatcactggtaaaattaatccaaatgataatagaattcaataaaatagcaggatataaaattaacttaaaaaatcaatagactcatatacagacagtagccagttagcagtcagtcacaatggtagagaaaactccacttacaatagcaacaaagattaaatacttattaaacataaaaatgtacaaaacctacaggaagaaactttttcaatacttaagtcataaaattagatttgaataggatggctcatcattataaagatgtcagttctccttaatttctgaaattaatgcattcacagtaaaaacaccaagaagccttttttactttttaagttagacaagttgatactaagtcttatgggaaaacaaacatacaagaatagccaggaagaaactggaaaagaaaaactgctggtgggactagctctaccagacattaaaacatatactataaagcttctataattgaatctgtgtgctactgtcacatgaataaataaatagagaagtggaatagaaagcccagaaacagacacaggtacaagtggaaataataaaaatggtatcttgggctgggctcagtggctcacatctgtaatcctagcacaatgggagggcaaggcaggggaatgacttgagcccagcagtttgagaccaccctggataacatggcgaaaccctgactaaaaaattagcaggcatggtggcttctcaggaggctgagagatgggacaattgcttgaacccgggacatccaagacagcagtgtgccatgatagtgccactgcactccagcctgggtgaaggagtgagaccctgtcgcaaaaaaaaaataaaaaaaagtgttaaatcactgaggtagaaattggctttttaataaatggtaccgatatatctgaatgtcccagataataaatgataccactgaataaatagtactgagatatttagaaagagataaaattagatacacatcttgtaccatgtataagaataaatacaacatgtacacaggttttcatagcattattcataacagccaaaaaattcaaacttatatgtccattgactgataattggataagcagagtgtggtatgtccatacaatgaaacatatttcagcaataaaaagaaaagcagtgatacatgctacaatgtgggtgaaacttgaaaacattatactaagtgaaataaagcagtcacaaaaggccacaggttgtatgatttcatttatatgaaatttcaatgataggcaagtcaataaagtgtgaaagtagattagtggttgccgggggctaagggagtttggtctaaagaggggtgactgatgaaaggtacagtagtttcttgttggaataatgaaaatgttctaaaatttattgtgatggctacacaactgtatgaatatactaaaagccactgaacaagacactgaatgaatttaaatggatgaatgtatgctatataaattatatccaataattagctgttacaaaagaaaaaaaaaaaacctccaaacaggttaagaatctaaatgtttaaagagagagaaaaaaagaccatataagaaaacccatgttttcttatttaacctttgtgtatgaaaaaggcttttgggctatgactcaaaatgcagagacaaccaaagattgacaaatacgtctatataaaaataagaaaattttacatggcaaaaaccgacatgaaaaaaagtcaaaaacacaagctgacaaactggaagaaaattttttcaacatataccttagccaaaaggcctatagcactaatgtatactacacttgattttagccaaaaggctaagaagccatatccctaatatataaagaactcttaataattaaatgaccaaaaaaaaaaaaaaaaaaaaaaaaaagccttgagcaccaaaggaccaaagacctgatagaaaaaatggggaaaagacataaatggacaactcacaaacaatgaaaattgggccttaagcacataaaaagttttaagttcatacagagaaataagctcacgcctgtaatcccaacactttgggaggccaaggtgggtggatcacctgaggtttctcaacctcgagaccagcctgaccaacatggagaaaccccgtctttactaaaaatacaaaaattagccaggcgtggtggtgggcgcctgtaatcccagctacttgggaggctgaggcaggagaatcgcttgaactcgggaggcagaggttacgacgagccaagatcgcgccattgcactccagcctgggcaacaagaatgaaacttcatctcaaaaaaaaaaaaaaaaaaaaagtgaaacagcacttagacgccatttctcatctaccagattagtgaaaactaaaaagaatgacagctaattctgtgcaaggcaccttcagatactgctggtaaaaatacacactagcatagctcttcttctgaagagcagtgcctaataaattgacatatgcacttatcttttgacccaacaatcccacttctaggaatcttctctaaagaagtttatccattttaggagtgtttgtaattgcaaaatattgcaagtagcctaaatacccatgcaggagaatgatgaatagatgatggtacagccacacaatggagcagtactgtgtcactgtaagaaagaatgaggaaaatcgctgaactacttgcagtgcaattaagggaattaagtatgaagagtatctataatatgctactctttatgaagcagggaaatacaggcacagatgtcaacttaatgtgtgaaagaaataccagaatgataaactagaaactattgaaactggtttcttacagggaatacatgagaatggggtagaaagattgggagtaatgggaataagatagtagggatagggagcagcacttctctgactatagttttttatatgactttgactctcagaaccctggtaattttttacgtagtctccagaaataacataaaataacttagatgttggcaagtgtggagaaaggagcccaaaatgtaatgcaagcactaacagatgaacaatattaacttgatttatgaagtcaatgaataacactgacttgagtggggaagaaaagaactaagtaactttggaaaacagtattttgattaggcattctaaagctaaacacaagacaaaaaacaaatattgtaagtagtaaatgtgtttctcacagaggtatcgcttaggaattctgaaactgccttttgtgtaaagttttaaaaataagtgaatatattgtagataatgaaagtcagacttctcattgttgtataaagaagttacagattaagatagtaggctagaattaaccctgtgttcattgactggagtttgaggtatccatatgaagtcgtggtttttaatatatatgtatatatgatgtatgaatacaaaaatacataatacagatgtgtgaatatgtgtatactgtacatacacatattcccgagctctgtcctgagagagccagaggaatgatatcctagtaagcacattagtgttcggatcttctttaaatgccattctccagtaaagggaaccatgggtccttcgaaaaatggttgagtctggcgcaagaataatacaagatgtgcctggaacatcacgtggcgccagaaagtaattcaaaaaatgattagggcatgttgaaaggacaacaggaaccaatctgttggaactcccaatggcccaaagtgggataatttgagaaacaaaataatgagaatattagattgtaacccacaaaataaaacacatgtacaggcatttaggtagataagatagatgggagggataggaaggacagctcttccttacatggaattccaattagcatagatgaaaagagagaaataaaaaccatcattaggcagacaacactatgataaatattgcatgcaagaactatcagcagatactcaatggagaagttgtgatgaaaagcaggatattttcaaggtcacaaaatatctccccacaagatatgaattacaaagagaaaaatggtaactatggggtggcgggggsgggtggaaatggcagataccaccttaaccaggtaaagtagaagtcactagtaatctgagacacgccagcgtcatgtgttccctgatgcactgaaagggcacaatttcacttccgcggtatccctaccaaaaatgcctaagttcagtctaatcatgaaactggtggtgtttgcttaaggaatctaaataaggtctgtagattagttaatagtgttacatcaatgttaattttctgatatcagtaattgtactataattttgtaacacattataaggggaagttggatgaggtatatacaggaagtctgtgctatttttgcaacttttctccgagtstaaaattatttccaataaaacatctttaaaaataggggccgggcatagtggcttgtgcagcactgtaatcccagaactttgagaggccgagacaggcggatcacttgagcccaggagttcaagaccagcctgggcaatatggcaaaaacctgtctctacaaaaactagccgggcatggtggcatgcaccctttagtcctagctactcgggaggtttatgtgggaggatggcttgagcccaggaggtggaggttgcagtgagctgagatcgcaccactgcactccaacttgggcaagagggacaccctgtctctaaataaatgaatgaataaatgataaaggtttgaggtaccaggtatctattgttayctaaactcttgttatctgagctcagaagccagaaaaattttcatgacatagtaagctttgctatcagggctctcactatttgaactaagactgaatagagtcacaagagatacttgtatttattattggttttttttgcaatattattggaatttgttctaaatagaatttattcttattctcctggagtcaaccattgatttctttgcttgttctcttaatatactctcccttagaggactcatccatttgattggcatcagctgtcaccctttaagtgaaaaatctgtacatgtcactctcctaattgtcttcattatctccctaatgagtttcaggaaaagtcccagctcttaaacttcactcacaaggccttgcctgtctgctcctacttacatcttcagctttattgttttaaaacaacaaactcttagctttccttgaacttgcagctcttgccttgctgagctactctgaaattcactcattccttgaacttgaagctgttgccttgctgagttactttcagatccactcttcctaatgctttttggatcttgttcatattgttctttcttcttctaattctttgtcttatttctttccctggctaattctttcaaatgatagcttaagtattagttcctccacaaaacattctttgaccttcaaagactggctttcagtgtccccctcagatacttccatggcatcctttagttcccctgtcctggcacttactactctattataatgcttatatcttatactagaccatctatggtatgaagaataaattagaaggcagcagaaccattttaaaggctggagaccagtaagaagcctcttggggaaatctaagcaggaactaataatggttgcctatattaaggtagtagtgaggatggagcccagagatactgtatgaagaaagtggggtataagatccttgagagcattgtctgtcctgtttccctgtagatccacagtaggggaactctcatgcgtccttccttatactcataattccaattccatttcccacctgtggaacatttcactttacctttaacggtcttggtgccttatttctataattatctgtgtagtctttgaggctggaactttggatacctcatttcaccattggttgtggactgttgattgacctcacctgactgactaataccacaatctttcctcaccacttattaatagtatctcctctctatgacatgttaagttgaagaggatgatttaggattgtttatttgcttaatgcttgtttacttgcttttggtgagtggtgaacaagagtagaaattagtatttttgcccctatcccagttgaccatgccgaatttcctacttctagtggcatcaacattcttttatttatccaggttttcaagtttctgaatttttattagccttctaagttttactttgaagtatctctccactgtcttcatttttctttcccagttaactctctgaccttaactcatggtaccttatgtctaaattattgtaaaatctctcagtttatgttcttaatttctttgcatcattatcctcaacttagattcataagaagtatattgactctaagccttgacatcaaattatcttggtgaattgatttttcctcagaattttaaggactaaatgagataayagatgagtgctttgtaactgtatatcccatatctcttgatttattccctccttttaaaaatccttccatcttgctgggctcacacctgtaatcctagcactttgggaagcccaagtgggcggatcacctgaggtcaggaattcgttaccagcctggctaacatggtgaaaccccgtttctactaaaaatacaaaaaaattagccaggcatggtggcgcacacctgtaatcccagctacttagggaggctgagccaggagaatcacttgaacccgggaggcggaggttgcagtgagccgagattgcaccattgcactccagcctgggcaacagagcaagactgtctcaaataaataaataaatacaaattatttagtcaatggttttaattttaatgaaaattaaaaatggatcataggaagtgaatttcttacctccttttaggttattacaattttatgttcagtaaaagcagaatcttaagggaatgaggaagcttccagagttgaaatgccttggtcgttttgtgtccctgggctgttggcagtgtgactctgctacagaataccacttggggagatcagcttactcagtacagggtgcagggaatgggggaagtctggagggccagaaacccacactgcgtggtatggagtagtggaaaagaaccctcccttaggaggataacatcctctgcagtctatttttatatttcaaagtgaggtatttttacttcaaattacagtactgtatatagttaataggagaatgttgtatatttgctaatagaggattattgctatataatggtctccttctgcccctgtaacattgtaaagaaaaaataatcctaaccagtttttaaaatgttttaaattcttaataaataaaaaatgctgcagtaaatatagatctttacttcaaaaagaaaaggaaaggaggcctactggaaagggttacacagaaaagtttaaagttataaaatagacacacagatagccttctgtcttcaccagttcttaacatttcggcacatttgctttctctctctgtgtgtgtctctgtttctctggctaatgtatttttatcacacccaagaaatttaacgtttataagatgtaatcatttaatataccaaccatgtgtatactgcttcagttgctcctcagattcctgaatctaatcagatataacactttgcattttgtttaccggtctctctagtcttctgtaattttcccagttttttcccataatactgatttttttttcagcattaaagctagctctcttgtagagtagtccacagtctgaatttatctgattgtttcatgattagattcagattaaatatttttggagaaatacagcataggtgattttttttccctgttgcattatatcaggaggcatgaaaggttagcctgcatgattattggtgatgttaaatttgatcacttgattaaggtagagtctgctggtagaaaacatacctttgaaattaaaagttatcagtaaccaaagattatcttgttcaatgaccatctctcatctaataggttttgtcatttatttatgatccttgccagaatcagtgattaccttagtggttgcaaaatattgattttctacttcaagagatgtgttaaatttcttttaaaaattgttaccctaagatggcccttggctatagtaatcatttgctctttttatttagaatgtattaggaagtatgtgagaggattaggttcaaatgttgtctttacctgtaaaggttgagatctttaaaaagttccgcaagagctaagccaccagaaaaataaagaagaaagtttatcagccatgttagtaattcgatttagataattaaatttctgatgttagtcccatagttgccccagttcctatcattcagatgggtattatctttttaccttataaccacagttaaaccctgtagagtcaatatacttctatttttgcagaagttgctggacattccaaaatggatagcacaaaatttaaggtgcaagcaaaaagttaaattttattaactcaaatttcagctgggcatggtggctcacacctgtaatcccagcactttgggaggccaaagcaggtggatcacttgaggtcagaagttcaagaccagcctggccaacatggtgaaacaccatctctaataaaaatataaatattaaccagttgtggtggcagtttcctgtaatcccagctactcgggaggctgaagcaggaggatcgcttgaacctgggaggcagaggttgctgtgagccgagattgtgccactgctctccagcctgggtgacagaacgagattccgtctaaaataaataaataaatattaactcaaatttctgttattgaggatttatttgaaagttttcattacctgacctcggtagcatgtttaagcacagttccacaacatcattagaaacctaaacctgtttcatatttgtgttttaacatttgtaaggtagagacacagccaactcatacaattaccagtgtagcatccaaaaagaatattaaaagataagattctgtcttactaacaagttgtagattattcctaaattaacggtttattatcactaaagctcactattaacagcgaagttacttcccttcataattagaggaaggcctctacttgacagcaataaaactgtattttaagatatttttaattatgacttttcactaattcacaattacttgagtttataaggcctacctaacaatttccaaagcttggagagagagagaatcttttgaaatgtagtagaaaatattcatttgtttttgctacagtgtaagtgggttgcttcattattctgcattttagcttgtccatctgtttcataacaagagtttctgttacagtttttaagaaaagctgccttgaaatatgtttctcataagtaacaaagattttatctgagaaaaaaatcatttataccctttggcaaaagcagtagctctttatggaaaaaagttaggagcttggatatttgtttcttgggtacctaggctggcacttgatttttaccagaaagttcagggtgcagtaaaagattgtacactggagaaattttaggtaaatcagcgggaagcttctcagataagtctcagtgttgttagctgcctcatcacctttgttgtttgaagatttaggaagattttgtggatttctatgtatttttaacaatctacttctagggccgagtctatttttggaaaggtgttaatattttttcacattatactataaagctggtatcttttagtgtttgtcaagttggtataaagaaactgctggtttattaatccgtaaggttgtgtaaactctacatgacttaacattttagtgacatagaaaagtgggatttctggttggtgtacagatctttcttcacatcgtgcaggtaacgtatgagcattgtctgatggatccttacaacattcctgtatgcttttggaaagtatgatctttgtttaacaaaatgggaaacagaggcacatgctatacccagctatcacagaaaacaatagttagaatccagaaaacatactcatctggtttagtgtgttgcccaatagatgcaattagtattctgttttatcttatttgtttgccttataattattaaacattgttttttaaatttggttttggttgattccttttcttctaagtccgccacttgagctaatatagccaacaagcatctgacatgaggcagaattgtcctcggatcacagttctattgctatctccatctgttggtatgaagaagtaatgctcttgccagaataagcaagcttcttttaattttagcaaaaacagattaagaaataaggaattgtgctgttaattcattttctttgtgacaggtaaagtcagttggaagatgcaaaactgtcacaggaagttagctattacagacaaattgcctttttttaaggctttttgttagtaatactaaaagtgtcaaagagagtaatttaaaaatgatatattaaccatacctaaattatttatggcttgttctttaaggaattatagaaaaatatggttgtctcaactttttttcttcaacctgggatcaggcattgttgtgcaacaatattttaatagcgagaaatctcaaaaatcctgacagtctttgcatattcacagtttcatgggcttttgcatcattgcttctgaattgctaatgaagagctcaatatagcttctgatgcatttcagatattctgggtggtgactggctagagtgttactgacatcacaacatacagctgttgactttctattgtctgagtcctcctcggcaagtgctttagactgctctagcaggcactcccaatgccagactaatcagctggatgtgtgcagtgagctctatagaggagcaatgcagagcatcagtttacaggtactatggaaagaacatctccttaactctgtatgatgaagcaaataccaatacaatgaaggtatgtgactcaattcttttgctaaatttgtatagaatgtaatctgatacatgaagtattcatgttcacttagtaccataatttttgttagaggatgtgtgataaaattctactatattgaaagtgagagcattttaaaattgtctttgtttatttttgcaaaaatatatttgtttaggttggtggagtgaaaagtagagtcatttacttctcagctgtagcaccaatttcttctccccacccctcacatgtttgatatttcttgtaacttactgatagaatggtttacctgtgtrctaattggtatttgtgtatagcacagcaaattgtcagctggaaaaatgacttctctttcaagttcatcttaaaatagacatactatatggcttgttgaattttaaaaattttattgtggaacaaatacaatgtgaatgagacttttggaaattaagaagctaagaatcttaactttcaaaactcatggtaacggttttctacccttttgggggaagaggtagaataatttttaaagtgcttgtaacagcaaaacctagatctgtcattgctatgattaacataatcagatatcacattgcaaaagagagcaaatgctaatcaaactatgtaatttttgaggagtatcttattcctaattatacagtctgaaaactttgacatttaccttgatactttgattcctcaaaagtgaaatctcatcatgtaggtgatactgaatgactaacacatgtccattagtgtaaaattgaattgtttagaaggtttttgagagttttgcttgctttttatctggaattagctgaaattttaacagcatttggaattgttatgatatgaattccttccccctccatttacaaaacaattattttgttcttaagaaataattcatctcttttctagaggaaataggaagaaaatcactaaatggccttttatcaacrctgaatgtcattgctctttcttttgtctatttctgattcccaactgtgtaagtaattagggtcatgaaaatattaatagctattattaaaattagggtcttctatcagatgcattgcttcaccctaatgccaagagaatttcattatttttaagcctcagattttaagttttttcttgagaactataaaagaaaaaattaaaataagcaacacatactctcagttcttacttacaactgcttttatccatcctttgtcatattctgctttgctttttcatacttttgctcattttcatttcttctttttcctttaggwttctgtttgtctgtgcgtctctatcttgccctccctctctttttctgtttgactttctgaatatttgtctctccctcttgatttatctcatctctccctccatcttccattctccctatccccacccatttttctccccctctccctctacatttgtctttcctactttgtctcagtctgtctcccttttttgttcatctacctggtgtttcagggtgtctctccctttctgactaaatctatcttaatctctctctctctctcttttatctttctacctccctccttcctcttttctttctctttctgtctttccttttctgcccctctgactctctctccctgtctgtttcagtatttcccattctctgtctcttgctttcccactgtgtcttggtctcttcctgtccctatctgttagtctctgtccatcattccctcttcctttgtctgtttctctatgtgcccttctttcttctccctctctcatccttttgctctttctctctacctttctgtctctgtgtgtctccctggctacacctctttcagtctctctgcctccgtccttccctctcttggcactctgctccctttcccaccctactcccagatctttctcttttctgtctaagcttcagtcacacacattcactctgcaaattttcattctcatacaggttttcagttcattggagccagatctgcacttaaatttaaattttttggtgaattaataaaccattagataaagaaattaaatactatattttaaataaacatgatttactgtttgctcagttttttaattttgagaaacttatgcttgaggtcttataagtggattgaagtcattatttaaaaattttttgtcttctaaagatatatgtgttaggctactattaaagggaattatttttctcttaaaggatttttccattaatttttaagatttatagaaagcaatttaaaattttttccttttaaggatacataagataataccccacttcatagttatatttcagattatgggtaaacttgtatttaaaacttgtattgacttttttataccatctgtatttttcaaatgtgttaacagcagatatatgctagtattttcttcttttgtttttaacctcttgttttgaaataattatagatttatagaaagttgcgaaaacagtacagagagtattttttaatgttttcctcaagattttgtattttgtatctgagtatttaaaatagaagaacagacgctcatttagcatttacgtgtttagataatcacaaacctagcaactgtcattatattkttttcattttgtaaagcagattaaaataccatttgattcaagcatagtatatattaatagcagtatggctttgtcataactagcataaagctatcaggaaagaaaattagatttacaagtaacaagttatatatataaagtattcaagaagcaaagaaagatgtataagatgaaaatcttctcagagctgagttaaatgtcattttcacatacagctcttcctcctctgaaattatgtagcattccttgtttctgcattcttttgatgtctctcctgctttgtatagttttcatctctgctctgtgatccccctctggttgtaggggacaaaaggtggaaatgaaacagaaccaacaaaatcatcatctctaaatcttgccatacttgcacagctgaccaaccctccttctgattaataactgagatctttaatacagttaatataatttattttttccaaaccgagttcctctaagccccagggtaccacaaaagtacttcaggaaatagagaaaagcctgaagcccagttaacactgctctactcatccccaccttctcacttgaacagagcaagtttatataataaatatatgtttccacagttttagttctccagaagcctatatatgaatcctacttaacccttattttatattttatatatgtatgttataaagtgacttggataatatatctgtcacattatataatatatattatgcaaatctgttacattatataatatatatgatgcaaatctgtcatcttataaatatgcatgtcattttattataatatacatagatataaaaagggggttgttagctaggattcatgtataggcttctagagaaccaagcagtccctaaaagcatgtgtaaactgtgaacatacacgtgtgagtaagcacatgtgattgctgcatttctgaggagaggatccttgggtttaataagattttcaagagggatcctttcatggcccaaaaataagtaagagtcactgctttatagtgtttataaatcattgctcaatatgctttgttaattttaaattttctctcttttcattttcaaatgcttagaaagttatgtagtacctctacaatagcagacacatcaacagagatcacatacagtttttggaagtagtttgaaaatatacagtgactgattactaggcacatcagatgtcagacttcagcttggggtcactagagagagagagcagaacatttttttattccagtactttcagaatgctggctaaaccacagctttccttaacaggtagaaaatgaatgacaaaaaaactgtatgcccccttgagctccaatgagacaattgtaaagaaacccatgggttaaatatgaataactactaaaacaatttgatgtggtagacatagctaggaaataaagccacaaaaaaataaaatctgaaatgcattaaacccattgaatttttgtgttttgtgcaaagccataggaagttgagccaattaaattggacaggtactttaaagagaaattatatctgctagctctacatgtatagtatgtagtgtgaactatgagagattgtgagctttttagcagtgttcacccatgcccagcagcagcaccttcaagctgtaaaattgtttgcactttgttgtacacatccttttatagagtatgaaggcagatgatggcaactgaaagacagcacctgttctgcctcaagctgtttttaagctatttttactggccacaaaatgctctttgacagaaagaagaaatcaaacgttttctarccttttccttctaacataatccttaggtgctttcttgagagagggctgtgatcctttgttagaaaaaaatgtagttggcaattcaagaaataaagggtggcacattagtagttatgaaactgaatgtctaccaattgtaacctaaattaaaatcctataaaggaaacagattttttggtgtaggaaggaaatgggtcatgttagatctaccaattcaactgctagagaatgtgaagtttcacattttaagccatcaaagaaccattgggtgggttaatgtgccaggagcccagcgtgaattttgctaagattctttgataataagctttgtacctttaagacctgtaaaggattttcattgtgaccctataataaaaatgaaatgttggtcatgggtaaaaagtatatagagatacattcatttagttatatattagtagggtagagaaaaatatatcaagcgaaatcgaattttgaaagcatgaagaaaayaccacatcaaagtctagctaaaatacgataagactgagggtttcttataaatagtccaacacttgccaaagtctgtgtaaagcaaatgcctactcattgatggcattctgaatggctaaattttagaaaccaagattatgctcataatgatgttcaccttatgaactgccaacattatcatgctatgaacaaagcacaaaacacattaaagaatataacttaatgagactaagttatgcacccacaatgacttttgacactaatgtgcagttaggccagacaagtcctacacaagactgccctcacttcagccactgggccaccctgctgatcagctggctacaaatttggaggttccctcagacttaattgactagaataactcaaattacactcagcattagagctttattgtaccaaaagaatacaaaccagaactagccaaaaggaaagacacacagggtaaggtctaggtgagtcccaaatgcaaagcttttgttctctccccatgaggtcaagatgtattgtctttcctgcacattggcgtttgttaatttgcagacaatcagggaggctcacccaagcttcagtgttcagagtttttattgggatctcattacattggcatgattaattgaatcattggccatgcaattgaattcaatatccagcctcacttccttccttggaagtcagacagtttatcacattcctcaaagccccaactttctaattaacatgtttagtctttccagccagtccccatctggaatcaccatcttaacataaactatatcatagtaacctcattagcatacattatcaggacccaccatgaatgacaaagacatttccatcagtccagaaattccaagaatttagaagctgcctactaaggacaaaggtcagccaaattttccattacacaatatcttattttccaattattgataatgtctttggtgtaccctatgtgggaagtaatttacttttatggtaattatatgtgagataactccgaggtcaagactgagtgagtgatctttctccttctgaccacttccctttagctgattttgtaccttaaaagcatctctaaacagatcacttttgaaagaatgaatgattttttgaaaaatgaattgtaaacaatccagtatggaaacaaacaaaaaaaactatgttttctcttacatgcctgttatcttaagctctcctctcacatccttattatccatagctcagtttccaggaatccaaaccttttgaatgttctttgctgtttatttctcaaagcatgactagatggtaataccagtttgggttttttttttcctccatgtagttttttattatttttttttatttttattttttaagaggcagggtcttgctgtgtcatccagactggaatgcagtggcgctatcgtagtgtactgcaccctcaaactcctgagcccaagggatcctttcttgtggtagatgggactgcgggcatgtgccaccatactctacctccgtgtagtcttttttttttctttttgagatggagtctcactttttcgcccaggctggggtgcagtggtgccatctcggctcactgcaacctgtgcctcctggattgaagcgattctcctgcctcagccttccaaatagctgggattacaggcgcctgctaccacacctggctaatttttgtatttttagtagagttgaggtttcaccatgttggccaggctagtctcgaactcctgacctcaagtgatccacccacctcagcctcccaaagtgctgggattacaggcacgagccaccactcctagccctgtgtgtagtctttaaaagagattttacctcatgccaatcagatcatattacaccctgagttatttatttcagtcctgcatttagcacatacatggggagctctcagtataaccctggactatggtaggttcagaattaaggcaaaatacattttaccctcactagcactatattaggaggtcattaacttcaggtttagagttacattaatggccctgactttcttgcattgtctcttacctatatctgccaatatctaaacccctttagaatctcaccaggttatccccaggattatccaggatctcctcatgagctcaagaacagccgtttcatgatcttccagttttgtctttctctggcccactgcccactaccattttgctagtgtttgccacgaattagctcatgtccatgccaaaggttgtatctcttagtgttcccaacatgtttagtcttcagggtaccatattctctagaattttcttttttattttattattttatttatttttttgagacggagtctgactctatcacccaggctggagtacactggcacagtctcggctcactgcagtctccacctcccaggttcaagcgattctcatgcgtcagcctcccaagtagtgggattacaggcgcgcaccaccacacccagctaatttttgtatttttagtagagatgaggttttgccatgttggccaggctggtctcaatcttctgacctcaggtgatccgcccgcctcagcctcccaaagtcctgggattacaggcatgagccactgcgcctggccttctctagaattttctatgtaccagcaccatgccatcctcagagaagttaggcaagccattcacccgcttctgtggtgggcttggtcacctgggcaccaggagctgcttgtctcccacatctcccctgctttggttctccagtgaaaacacttcctttagcttttgctttcatttaaactaggatcactgctacattaagatatatgtatagttcttttagtactctagcattcctaatttccagctttttatgtattgatttggcattttaaattacgtttcttaagctactataccatacagtgataaaaagtcagatctggaaatggctgtgaaaaaaacatttagcctattatatagccaagtagcatctgagctttctcatttgcatcactctcactcattacaatgccctcagtcaaagaattagagatacccccagtcttgtagtttacagacttctccttagaaggactgtgccaaaacagtcctgaatgttcgtgttggccttaatgaaccaccccttagtgactcagtcaccattctccacaagccctacagccatcccggctccctctcttctagcaaataggttcggggtaaaaaagaagaaatttattaggtatgaattccctccttttcctgccacattcccttcagtatcttaggataatgtatacatttcaggcttattcaccagtttgtacttctgattacattttctcatttcatccactttcagattttccttcttattacctttcttccctcctaaacctctagcctctccccatctttccttactggcttctgtggcctacacactttttcattctgacaaccttcctctaacttcgcatctcctggtaactttattaccaaatcatgtatactcattgtgatcttccactttcctcctcaatccttaagggttcagtgttccctagggattctacaccccccccccttttcaatgaaggcttgtgggcaacttcattaacattgataactcaaaacttcaatctatatagtgattctccaccaaataaataacattagctgacttctttcctgagctccaagtctatatatccaattttctgttagatttctccacctgaatgtcctgaagataccttaaaattaactgtaggcaaaactgaaatcatcgttctgccatcaaatccattttcctcccagatatatttcctatatttagtggtagcaagcactacctgcaccttcagtgtgtcctctcataactcttccagctctcacagcccttaccttttccctgaccactcatgtattgaattggcttcccccagttagttacttgctattatattaatctattcatttctacatggagtacaggtagtggctgataccaagggctctggagccaacactacctgagttcatatcttaactctaccccttactagtcttgctactttgaaaaagctgcttartcttcctctgcctcagctgcaaactatgtaatactgcttttatggggattaaatgaattaatacacttaaagcattgggagtagtgcttagtaaataataaataactctttaagggtttgctgttaatattaccagtttcacagcacatattgcaatcagttattatcttgtatattttgtctctgcactagaatgtaagcattttaggttctaggatcccatctgcttggttcactcatgtatccctattacctagaacagtgctctgtacatagtatccagtctggagattgagtgaatggaatatcttttctccttttcagctttcaccttttgattctttgtctaaaccctagtcactttccatcaaaactttcattttgtttgctagaacagggttaatctatattgtagctaaaatcattctccctggcttctcttaaaatgtgttcctctattactcaagcttcctgttgctcctgggatcagtactaagtttcttctttttctttttctttttgagagggagtctcgttctgtcgcccaggctggagtgcagtggtgcgatctcagctcactgcaacctccgcctcccaggctccagcgattctcctgcctcagccttctgagtagctgggattacaggtgtgcaccaccacgcccagctaatttttgtattttagtagagacagggtttcaccatgttggccaggctggtctcaaactcctgacctcaagtgatccacccacctcagcctcccaaagtgctgggattacaggcatgagccaccgcgcccagcctaatactaagcttctaatcttaatttcaaatatatccacattttttgttattctcatttattttcaggacatttttaatgaaaaatgtcataaacaaaaaaaggagcattataacactcagtactgaccactcagaattaacagttgctaaccttttttatattggctggagatctttttttaaaataaaataatacagatgtgatttgaagtcccttctccgtcttacccaatccctttcatttccctctccagaggtaattactaacatgaaataggtatatactcttcccatccatgcttgtgtggtttttaaatttttatatacgttacattwtatggtagagttcattctgctttttgactaaacattctgacattcttctttggacttatatttgtacctatagttttagttcatttcattttaatcgtttcatggtatcgtgcaacatgaatatgccacagttgtttttactttaaaaagaaaaaaacagttttcctattaatacaacatttggtctttcccattctttgcttttaaataaaacagtgcagtgaatatttttgtacatgtccctttgtataaggcgtttccttagggtgtatctacaccagaagtggaaatgtggagtcataggatatgtgggatttaaaattcatttgatagcacaaattgttttctaaagtggatcacaatgtatgagaggcccattgtcttccccatttctccactcagaatgcagcacattcgtgtaacaccttgcctctccatataactttttccctaaaagtaatttgtttcatatagtcttacaagactccactaattattctctctcattcttcaactaccaaaagtctttccttcttgcttataatgtcctcctaaaattattatttatatttgttggtaagtgtcatcattaacctcttcatggtttaacgaactcttttagktcaagggagttcattctctttactctttttaaatgtaactgatattcattaaagctatagtgccttctgtggttatttggtaaatttttgttaaatgacagtaactgtttacaaatcacatgcacatttaacattttgaaatgtcagtgcttatattcttgttcaagtgactgacaaagtgactgcaaatgtgaatttccactatttctaaatagagcataaacagtgctcttcgcctttctttctagaggcatttgaacaatttggttgtgccaatttataacctcagggagaacttgatatgggttgcttttgtgcatttgattttctttatagatgtgcctgcttggttatatttctgtctctaagagaaaaaacataacatcttatctaatgaaacgggattggataactagatagtgataaggaagcaacaacccttttttttgggctttgccaaattctgttcagataacatcaataatgtaactctttttcccctaaatatttttgtgaagaatatttttacctataggagcgagatttctttcccacatataaattaacttaaatgatttttaaatattttgttaacctagagtaaattgacttttgttgtgtgaaatttgagtatttattgttggggctaccgaagtttccagttcttttgtgttgtgaaaccaaaacttagaccccaagtataataagtgatattttgaattgtcagtgtcagtattgcatttttgttgttaatacttctaactaaaattttcactagagaaactacttgtctttagacttcatatatactagtttgcctttgaaagtgttgatcctaattctgccttgctttgtttcatagaggaaggtacttaaccatgcatatttatcatttgtaagctactgccttctcattgttccttagccacaaactctgaatccttattgccacccaagtttgcatagttggtactcatcatcacaggcgataggaggattgagagaaagaaacaaaatggttatataattcctggcagttctgatagtttggtagtgattactcctggtgaccattaatacaaagttaatagtactatcttcttgtacacacacaaaaaatacatagctcctcttcatgtgaaaagaataagtttactttgtcttaagtccagtacaaaggagttaccatgtcataattactcttgaaatgaaagtgctccgtaaacacaaattgcccctcttcttggtacctacagatgatgatacagtattgcgggtaagagcctgaaatggagcactagtctgtccagttcaaatcctgttttccatacttactggctgtgtgatgttggacaaattacttgatttttctatctgccttagtttcctartctgttgtwggacagagtgataataggacatacttcttagaactgttgtgtgagttttaaatgaattcattatgaaaaatattaccacagggccaggcacatggtaaatatatgtattagtatttggttttgatggtagttgtttgtattcttttttagcttacctgttcctgtcattcccccatccttttctttcctttgatttataagaccttctttgctttcaacattttgaccctttcatgttggaaatagttcatatgtatcatctgccttttgtttatgttctattttattatacaggaattttaaaactttgttctaagttttataactatttacctttaatggcttctagattttggtgtcacacttgggaaggactttcccacccaaaaattataaaaagatttcctatatatccttgtgcattcatagttttacttttttaaggttatgacctttaattttacctgtaatttcctttcatttatggtttcaggtaagtgccatcctttttgtgcatatgtaaacatacatgtggcgtttctctggttatctacctggtagcacaggaattatatataagcacatctctgacttgtccctaataaatagcatgttgacaattagaattttttttttgaagttgaatatgaattttgagctcatatatccatctctcttaggttgacaaagattctgaaaaattcagtttttaaatttcagtaatagtaggaactgagatatatacttgaatgtctatattttgttcatttttttctctaagttgtcttcctaaattttgtaagttcctaagtatctttcacttactgtacaactatttattatattaagacagtacatttaatggacttctaaatgttgtgttagagacatgatgtgccatgtctatcttgtagctttctatacttgacacccacgtgcccacacaacctttggcaaactgagaagtgtaggcttcatgggtttaccaaaaaggggtttgtttttgtttttccagtgagtaccaaaagctgaaacatcccttttacttgaagatttggagagggaaaacatttttatatcaaacaagttcattagctgggcaaagtggctcacacctgtaatcccggcactttgggaggttgggacgggggattacttgagcgcaggaatttgagaccagcctgtgcaaaatagcaagaccccgtctctacaaaaacaatttaaaaattagctgggcatagtggtgggcacctatagtcgcagttactcaggaggccggagtggaaggatagcttgagcctcaaaggtcaaggctgcagtgagtcaggattgtgccactgaactccaacctgggttacagagtgagaccttgtctctaaaaaaaaaaaaaattaaaaattaaactagtgcattaatattttggagaagaatacaaagttcgtatgatttttttttttttttttttttttttgtagagatagggtttgctatgttgcctaggcttgtcttgaactcctggtctcagtgatccttctgcctccacctcccaaagtcctgagattacaggcctgagccactatacccaacagtttgtatgaatttttaatattcaattagaagccttcaaatgagagccatacacaaaaatgctaagccgcttgtacacagtgttaggcctcctgtcagtctactgctgtgtagtggtaggggtcaggacacagcaaatttaggctcagccaactgctgatctaaagggattctgaccagagaagacagctaacatttttggagggcctgccctgggagagaggctgtggtccgtgctctacatttaaatcagtcagtcctcacaacaaacctagaagctagatattcttttttccactttgcagatcagaaaactgcagctcagagagattaagttatttaccgaaaatataactggcagagctgggatttaaattatcgtctaatgctagtgcacttccctttctattgccatttctatatgccattgactccttcccaggcaataactggtcattttcattctgaatcattcattatttagtctgttatcaaatggtgtggcatattaccaagttttggtcacacatactggttgtgtgactttgaagaagtcatttgacttctaggcaataataacttgaatgctgaattacaatattggactaggtggtctctcaggttctttggggtttcatggaaccttgggatcctaagaggatcttctaaggtgttcacctcttcggttttgccccttcctcactctcccctgcagctattgccttatctagtaccttatttatttcttaaatggattaaaaaccttgcttttatggaattacaaaattaagagattcatgataaaattgtaaagtcactttacaaagaacacaaataatttggttgcttagagaatgctgccatcttgtgtctaccattttatgagataaaaagctaaaatggagaaaaaatacttgaaggatttttgttttgttttgtttttggtggaacttaatcatttgatgtagtggctggagaatcttggtcagattgagatgacacggtatcaattaaaagttttttgatatttgtttttgatacccccttttctattatccttgtgtcaaacattgtgaaatcaaaatgtgaaaagtaatgtaaggatatatcgggttccaagtgattgtatttcaaaatggtttttgaagagttagtataaaatgtgagttactctataatgcatgcttggctgtcttggtattaggtctcttggtgcttagatctcattatatgcatatatgtatgcttagctatttcaccttaaaatgtactattctgtttattgacagcaaaattgtcaaaggacaatggaagaggtaaataatctttttagagttgtttacttgctaggctatattcattcataccgaataaatataaaataaaaccgacttcaaaaatataacatggagaaaattttgtatttggggatttttgttttgttttgttttgtttttgctctgccatccagactggagtgcagtagcatgatcatagctaactgtaacccccaactaaagctattctcccacctcaacctcgcaagtaactaggactgcaggtgcacacccctacacccagctaattttttaatttttgtagagatggggtctcactgtgttgcccatgctagtcttgagcccctggcctcaagtgatcctcctgccttggcttcccaaagtgctgggattataggcacaagccactgcacccagccaacttttttttttttttttttttttagaacagacaatgtgggtttcattaaaaatgttaaatggcttgttatttttsttttattttttcttttgtatttttaaaaatctagaatgttattacggttcaaaattacagtcttaagtccatagagttacacagctctagaagagaactctaaaaatgatggttcttggagttaaagtgtttctgattatgatcttttttctctctctttatctatagatactatctcaattataaccctgactgcattgtagcttctcagtacatatcattttctttcctcttctctcttctgcttttaactaatcaatcctctcggcctcagtgacttattcaggttcacaaagctaatatatgttagaattcattgttactcagtgttctgactttcgtttaggaaaataatgtaataaaacaactgacagtaatatttttaatttctcagtttcatgtggagtgttccatttcccttggccattttgttaaaatggtttcttttgttttcattttaggccacggaaaggtatgatatatttgatccaagacagtccattccagtccgggaatctacagtggtgacaaggacatgggactcctcctgccagattacagatggttcactacagttgacatcctggctgacaactgtgaaaaagaaccttggattattttattttatttttgtgggacaccacaatcccaaatccaaaggacgcatcaggtaatgcttccctgtcattcagaaaaacatatttttcttacaaaatctcacctataaaaagcaagaagccagtgtcttaagtaacttcaccaccctctccctactttgcagctgtttgttttcggaatgaaccaattaacttttgtatgggttataattaaggaagacatggttttytttttttaattcagttcagtctgtctgtgactttaagacctacttctctttggcttttttaacttttgagctgtatttatcaattcctaaaatccatttatttatgtatttattgagatggagtctcactctgtcacccagactggagtgcagtggcgcgatcttggctcactgcaacctccgcctcccaggtccaagcaattctcctgcctcagcctcccaagtagctgggactacaggcttgcaggcacgtgctaccatgcccagctaatttttgtatttttaatagagatggggtttcgccatgttggccaagctggtctcaaactcttggcctcaagtgatacacctgcctcagcctcctaatgcactgggattacaggtgtaaaccactgcacctggccctaaaatccatttagattgcaaaacattctttcaggaaatgaacttttgaatttttcaaattgatatagagaaaataagtttcactggtttcccccccgccacaagattttattacgaaaattttcagaaatatagaaaagttgaaagaattttacagtgaacatccctataaccaccccttgatttcaccagtaacattttagcatacttgctataacctatatctgtctatccctctatatatcaatctgttcattttttttaaagatgcatttcagaataagttgtttatataaagttctgccattattgggtttttttgtttgttttgttttgtgacagagcctcactctgtcacccaaggtggagtctagtggcgtgatcacagctcactggaacacacgccttttggcttcaagcaattcttgtgcctcagcctcttgagtagctgtattataggcatgcaccaccatgcctggctaatttttgtatttttagtagagtctgggttttgtcacgttgcccaggcttgttttgaactcctgagctcaagcaatccgcccaccttggcctcccaaagtgctgggattacagtcgtgacccaccgcagccggccaagttctgctgtttttattacattttttgcagcttaaaatgagtgctatctttagcttaatctctgatacattaatccagtgcraaaccagtgattttcttaaactcactaatgacatgaaaatatattggaatcttatgtatttgatttcctgtggattccatattctagagtgcctggataatgtgttgtttggcattgaatcacttaattcaggagagttttcaatgctttcttcatattgctgaacatatttgttaatccagatttacaagtgtattttgtaatagaatgttactgtttatttttaaattatttccttttggaaatatttcagggtaatttaagaaatttggaattttaggaatccagatgaaaaagctattataggtatccctttggagaaaaagatttctaatgtcttctaaatacacatatattattctccagccattaccttctaccttgatctggctcggtccttaatgtttcttaagaattgccacaagtatatgtgcatcaaaatcactccatattctttttttaaatgtaaaaaaaacacacttatgtgttagcaatagggtcttgctatgttgccctggttggcctctgcctcctggactcaagcagtcatcctgcctgactcccaagtagctgggactacagctgggtaccactgtgcctggctcacatactttctatagctcttttctcactgtattgtgatcttttttttaatttggatgtatctagcacaaaattatatactccttgaaatcaagaattttgttcctgtctatattcaacattatttctggaacataacagacagtaggtcagtatcatgcagtaactgaatgtaaaaaagtttcaaactgtattaatttttttttcttaaggcttcaagctccctgtagaattcgaaaataaccttttctaatgaggatgtctgatactgttactgtaaaagatgaaactgcaacaatgaaggatttggaggcagaagtgaaagatacaaccagagttgaaaatcttatcaaatcagaaaactatgggaagattttggtagagaagaatgaacattgtattgagaacaatatagatttgcaggtaaacaggaatttttctctggctacaaatactaaatattcagtatatatttatgtttattttcatacaaaactcacttctcaaaattctaaaagggtaagttgacccttcgtgacatgcttactagctggttttggagccagttggattagcttgctgtgagtcttaacttggcttgtatcatgtaatatacttctttttatttgtatgtggctagtgcatttttattggctttctactttctcattccacscttttcctaattaccagtgctgtgagagttttgaactctcacagttaaattttgagtttaacctaagagctcttaaaggaaagacaaatagaatacaataaaactgcagacgaactattggcaaaaacagccctcagggggttcctcagtcactcaacctgactgacaaaaaagatttgtgggcccgggggaagttaatgcttttaatgctgtgcatatataatgacttagagctagccactgagaaggcttctaattccaggcataaatggaaattgagttgattaacaaattgaagataggtaaaaatggtcccaagtaatagcatttctagtactattcatttctttggtaaggttttccagttatctattttctcagaatgaagggctaacacttttaaacaatttattttattttattttatttttttgagatggagtctctctctgtcgcccaggctggagtgcagtggtgtgatctcggctcactgcagcctccctctcctgggttcaagcaattctcctgcctcagcctcccgagtagctaggactacaggcatgcacccccacacccggctaatttttctattttagtagagatggagtttcactgtgttgcctaggctgttctagaactcctgagctccggcgatccgcccacctcggcttcccataatgctaggattacaggcgcaagccatcgcacctggcccacaattttttttttaatatctcatcatttatcagtcaggaaacgaagcaaggcttgggctgagtgaattttctattctacagggtatccaaagaggtcctttgttggcatttaacaggccggtggacttggtctggagcatcccggattgcttctcgcacctgtctggcacctaggtaggcaaggctgcagtgctgggctcaggtagaactagaagcacctatttatggctcctccaacaaggtgggtccaaagtagtcagacttcttatgtggcagctcaggggtcccagagagaatgttccaagaaagccaagcaaagctgcaaggtttcttttgacataggcccagaagttccagaacgttacttcagctatcttcttttgatgacataagtcaataaagccaggccagaggatggggaattagaccctacctctcagtaggaaagaatttgtagccacctttaagctaccacaaaaagttattcaaaaaaaaattgtttaggccgggagcgatggctgtaatcccagcactttgggagaccgaggtgagtggatcacaaggtcaggagatcgagaccatcctgaccaacatggtgaaaccctgtctctagtaaaaatacaaaaaattagccaggcatggttgcgcgcacctatagtcccagctatcctgaggcaggggaatcactcgaacccgggaggcagaggttacagtgagccaagatcgcaccactgcactccagcctagtgacagagcaagactccatctcaaaaaaaaaaaaaaaaaagaattaaaaaaaaaagtttaacaatgttttaatttttgctttgcaattaaagaattctatttttggagaaaatattctatcattctatatgctaaagactttgaaggctataagccaaaaagtatagcttcattttttttttcttttgtgttttcttttttagcttcacttttttaaagtaaagaaacctggtttttttgggtgggggggcggggtttttttgttttttgtttttaagacagagtctcgctctgtcaccaggctggagtgtagtggcgcaaccttggcttactgcagcctccacctcccgggttcaagcaattctcctgcctcagcctcccaagtagctgggactacaggcgtgcgccaccatgctcagctaatttttgtattttttgtagaaacagggtttcaccatgttggccaggatggtctcgatctcttgacctcatgatccacctgcctcagcctcccaaactgctgarattacaggcgtgagccaccgctgctggccaagaaacctgtttttaaaggttttctcattcttttgttcagtcaaaaactgtcttttttycctattatgtaccagacaccaggttagacaatgatagcaattcctccagctataaaaaaagcatttaggccccacttatagtcaagtggtaatcatctaagaaattgggagaaataacatttttttcccagtcatttttactaatagcactttctagaacaacaaaaaattgccatacctgtaatcagtacactcagtgatgacagcatgccagtgtcctgattgcatcagagaaaatctgctaaaattctagtgcatttgtgattgaaataataaaatacttcattttagcctcttttctacacctaatatttcttttcctagatcatgcttatcaacaagtcattaatttgggttattgcatttcctaccatgtctattgtgttgcccttggcagtaagccacaagaacattctgatgaccacttttgcatcatggcccagttgtttgtagtataagaaaatttcccacattacccaaaccatttattgaaaaatctcttctttaccaagggaataccatagtaaacaaacatgggtatggtctttgacctcttgtttcctatagcatagcgactgtaacgatttggaaggagggaaaaagagaatgtgagaatttattttatgttaatctggtgaatgccatattcattgtttattgaagtatttattaataatttactatatgggccgggcgcagtggctcacrtctgtaatcccagcactttgggaggccaaggtgggcgggtcacaaggtcaggagttcgagaccagcctgaccaacatggtgaaaccctgtcactactaaaaatacaaaaaaattagctgggcatggtggcgcacgcctgtaatcccagctacttgggaggctgagacaggagaatcacttgaacccaggaggcggaggttgcagtgaaccgagatcacgccactgcaccccagcctaggtgacacagcgagactccatctcaaaataataataataataataataataatttactatatgtaagaatattgaccctgctttgagcttttgaggcccaaaatgctttcatccaaggtgcctggcaaggggtgtacagttgagataccttgtatagaacagatttaattaatggaaattgggaattggaagtagataaaactggaaaattggtttcttctgtgttttcatttaaaatattgtaaaacaaagttaactgttttaagcatcaacagggaataagtgttttgttttaaaaagtctggttaatacagagttacttttaacttaatgtggagttaactattctaacatactaccagatatttcatcttcctttggtacctctaaggtactgcctaaaggttgtcatcttaaatagcaactgctgtttttcactcataagtttggatgtatgtagcaaataatgtaggttttctattgagatttttggataaactattattttttctaatagagtgataagatattctctactttgctctcattctgaaaatcagctaccatgaatrttataacttacatctgttatcttgcttcagcatagtaatatttaaagtgattaaaggaaacaaatgtttaccttccaaaagatgcattcattttattcatttatataaaaaaactgcacgtttaatatatacattttgagtgaagtcattgttaattaagggatgttacagccccttttgtactatgaagagactttatgattttctttctgttaagggtagtatttacataaaaaataatttcatcaaaccagagagaggccaacagacattacatgtcatctcaggtggttccaagcagagattatctcagagagctctttgaccatttaatttataaataattctacttgtgttttctttctactttcactagttttctctttccacttttaaaaaatgttgtgtttcttattcagggttttgttttggactgtaatattttatagaaattttaggattactttcataaaaatttcttaatacttcagagctaattcaagaaacctgtgtgcattaacgtcaggaagttaactktcccacataattgccttggagttgttctgaattgttgattatggtctcaaataattatctgacaggtttttggttaggaatttttctgctgccacacactgttcctgttgagaatgtagaggtacatttcggactttatatttttatgaaacatttggaaggttggggtggtggatgccaggtttctaaatccagaaaaatgtattttgttagactatgagtatccctaatctttaacatgggttaattggatggtggggagtatttgctttgatttcctgtgtataactcaccgatgggtttccattgtttgattttcttcgcggataggtttttcagattacaattagtctaaattagcctggtgcggtggcacatgactgtaatcccagcactttgaggaaggctaaggcaagcggatcgcttgagctcgaattcaagaccagcctgggcaacatggcgaaaccctgtctctaccaaaaaaaataaaaaaattagctggatgtggtggcatgcacttgtagtcccagctactcaagaggctgaggtgggagaattgcttgagccagggagatcgaggttgcagtgagctgaaaccgtgccactctactccagcctgggtgacagagtgagaccctgtcttaaaaaaaaaaaatttaaaaaacttagagtaaattatttgtgttgatttttacagtcatttattttaaatataaaattcagaactctgtgctctgcttattaaaggttcaaactcaactttcccattcttttacagttgtatctttgtacttaacaaatagtttgtccagggatgttcatctgtatacatgtgtatatgcacacaattcaaaacatatctgggaacagttcaaacaatgcctctccctcacattattaytaacaataggatagggagtccacattgtgttggtaacccttgtcatggagaaaataagagagctgatttctgttaaaaactaggccttgtgtgccagagtcaatgaatagctctgacatacgtgagtcaattttccatacacagagttggctaaagtacatgttttgtatattctgtttcagtagtaagcccttcgataatcaagatgagactcttatgtcttgtatccctcaagttaattccagtgcatttctttaaaagaggtttgggcaagaaagcaatgaatctaataaggctatcagaaaagttcagaacacaatgccacgcttcttcgacaatgaaggcagtacataacaaattccctcatttgcttggaaagtattgatgaaacaattaacttatttcattaatctgttaagaaatgaagtatttttttaaaggactgaataaaagtctctttatataaaatcattcaaataataatcttagctatttcctgtttgtcaaacaaagattaaaagyatgtatgtggcaaagcgtggtggctcctgccagcactttgggatgccgaggcaggaggtttacctgagcccaggactttgagaccagcctggacaacacacgaagactttgtctctacaaaaataaaaataaaaaaattattcatgcgtcacggtacatacctgtagtcrcagttgtttgggaggctgaggtgggaggatgacttgagagttcaaggctgcagtgagttaggattgcaccagtgcactccagcctgggcaacagagtaagacctgtcccttaaaaaaaaataaaatttaaaaaaaaaaaaaaggatggctgcgcacggtggttcacgcctgtaatcccagcacgttgggaggccgaggcaagcagaatgcttgagtccaggagtgtgagaccagttggggcaacatggcaaatccccatctctacaaaaaaacacaaacaattaggcatggcggctactctggaggctgaggtgggaggatcatctgagcccaggaggtcaaggctatagtgagctgtgattgcaccactggactccagcctgagtgacagagtcagaccctgtctcagagaaaaaaagatatatgtaatgtacctagtacatagagcctagcaaatggtaggtgctattaacaatgttataattgttactattagcaataacacgattctatggcttctcaaaaatttgtggctttattgtcatgcaagattttttctttagtaataaaacagagtaaaacttaattttaacataacctccccacattttcagtacagtagttttaattctattaagttctgtatctgtatgctgtatttttattgttttttattaatattgaatgagttcaactttttaaaacttatgatacattttccatagtatatttttataattatttctaggatttggtactctttctactgaacttgggtcatatgcacatatggtagttcttttaagcacatttacttttcacggtgctttcttgtgctgcgtaaagatgttggctacatcttgtagatgtagaaatgcttttgcatacttaccgtttgtacttctttggataattttcatgtacatcaccagtgggatgggatgatcctgtatcttcatttattataaggaataactataaaccagatagtttgtgactttctccacatacttttcrttagaatctaagagttaggcctttgagtatttaactctgtgctttatggctcgaaagattaaatgttaaaaacaaattagtgattgtgtttagtttattgatttttaaaatagctctcccacctcagagaactttgtatttttcatttattccagtagaaattagcatcctggcatccattatttttactgccctgaccttaactagacatggaacattttaattcattatcttccttacaattgccactaatctttactattacctagaaaagtactgagaattcgtaacctcttcaaggtgttttgagtctggttgaaagggtgtaaccattataatttttcttcataacaattattaattacaaagagaaaattattcctattttttaaatgtcagattttcttagttgagtgatatttaattggttatttttgtgctaatacatatataactcataaggattgctctgtttttttcagttctccaaattctagtagctggtaactctgacaacgtattagtatcaatttcaaactgaaattctattaaggatgtttcatattctgcacccattttttcgcctagttcctgtcttatacttcagtataaaacaatgtaaattataaattggggactttgtccctaagccttctaaattctaatataaatagcatttctctggactaatacaggtctattaaacaagctgctaaatttttgctgtgacagtgaaattctgctaagggtgaaaagtgtgctctaaataataaaatccacttttaaaataattacatatcaaatagagggaattgctacttaaagccaaatctggctgccaagtagattacaaaaatatgaaataaaatgtttactttaataaacaacttgttttctctgctttgttatgtatgtatggcatattttctagtacatataatttctatttgctgtttgaaaggaaatcgaaataaattatgttattgaacaatgccactttagcaatttatggtttacttatatagtagtgtattagttttctattgctgcataaaaattaccacaaacatagaggcttaaaagacaacacccattatcagctcacagtgggcccaactgtrttgtccgcttagggttctatgaggccaaagtcagccaggctgggcccttttctgaacgctttgggaaagaatttgcttcaaggcttattccagttgttgacaaaccttagtttgttgaagctgtaggtctgaggtcctgttttttggctggttgtcagtaaaggccactctgttctgagaggctgctcatagtcctccttacatggcccctctatcttcaaagccatcaacgatatgtcgagtccttctcacrctttaaatctctctgacttgcccccgtgctcccaccagagaaatgtttgagcttttatagggctcacttgattgaatcagactcacctgaatcttaaattgtatcttaaggtcacttggcttggagcttagttaacaaatgcataaatccagcagggtatggtagttcacacctgtaattccagcactttaggaggccaaggcggactgctcagttgaggtcaggaggttgagaccatcctggccacccagtgaaaccctgtctctactaaaaatacaaaaattagctgggcatggtggcaaacgcctgtaatcccagctacttgggaggctgaggcaggagaattacttgaacctgggaggcggaagttgcagtgatccaatatcacgccactgcactccagcctgggcgacagagtgagactcagtctcaaaaaacaaaaaagcaaaatcctttcttagcagtaccttgatttgtgtttgattaaataaccagtggatgggaatcttgggtgccatctttagaattctgtctacctcaggtagaatttaatccacaataaagttttttaaaatatattaattgcactggactaagattctgaagatatggggttctgtttgactttagtaactaattctggactgtgaggtctttaagaccaggaactatgtcttattcatcttcatagctctagtgcctagcacagtacctggtgtacagcaggaacctaaaacatgtttgttaaatgaagtcaaattaagataattttacttctctgtatcttcctttatcttttcctcattttcatcaaagcctcctcgtagattaaaagtgagataaatacatgtgtaagtctatgaatattctcaagcattacgataggaacaatatacagcacccccattttatagacttttttttaaattagcatttgttagattaagtaatttttcttaatctcattgctaataagcagaggcagcacattggttttctgacatggtcagttcctaacctttaataatcgattacatttatgacacactttagagttttcaaagcccctttgttagctacgctttcactgaatcctttcaagaatcctgtgaattagtgcaagtagtatgaacttttagacagataaaagtaaactgaagtaatttgaccatggttacccactaataagaagcaaattcaaaaatttaagtccagcttttctgcatatgaatacaggatttacattgacagttaatgacccctttccttttagaatttttaatagaagattttataccagtgatacttaaaattacaagagattaaagcagaggactgggagtaagtcacaaattattttcccttctgcttcttcagaactcatttaggtatgtgcattttcatagtattcacctgttgcttttctctctcttttttttttcctgtaatccctagatggtggcatctaccacctagactagatggtagtacaatttattttacttttattgttagatgtgagttacagttaattagaaatcctcttgaacaagttagagagtaggtaaaaacagaagacaataccaacatgcagaagacctcttaggtggcactgccatattcatgtgtgcgcacacatgctattttcttctgtataagaaacaaagtcatttttcttttattttwtctattttccttttgttgttctgtagtttgtataatctagggttaaaatcccaagaatacagtgctttttaattttgaagaacttttggctcaaaatgggagcaggacatactggtactgtagactcttgtttctgttgactctacaaggaaggcctttttgaaataaaatgatgggtttttttttttaatgtaaagcatactagtctggatattaaggattttgtatctgttttatgtttgttaccagactggctccctcatgttaagaagtaaaaatgatagatacttttgccgtgtactatttggtgttgggtttggggaggaaaattggaagaaaggagtgtttaaaacctatctggctctggttcacaggtgcttcagctggtttcccaaaccaaagcttgtatcacaaacttgagttagtttgccttaccgcattctccaatcatgtgactgatggtcggcctgtcagtcatgctggacatccgtattggaagtctgcccttttttcttcctttctgcttcattgcctcacctcagacctgatgaataggtttctatcactaataaactggtggtgtactttatacagtgttgaaacacctcagtagatttgtggttggactctgacttactgtgcatttgaaacattaagtttggaacttttctgagtttatccacctttaactgctggtttttgtgtgtgttctttttccttaaccttggctaaactataatatgttgtaaaataatgaagtatattttatttcactaccaagaagtcaccatataagttccattgtactcaattaacacagaaattgtggccatttgctgatttaaagaaaaatgcctaagaaagaaaaataataaaaatgccaacctatcaggattttaaagaaacttctgcaagtgtgcttctgggaggaatcagtactcctttactgaaaccaactttgatttcctcacttttcatactttatgcacagttagtttttctgtggtttaggactatgaattaagaagcaaattttctgtttcagtatgaaatttaatacaaatctttcttgtatattcagcggccattgcagtcatttggacagacaggaaaaaggtctaaggtatagtaaatattttggtgtgctggcatgccaagggccttccttcatgcttgatgaatccttgttttcatatagcactacattcagtttagttcttccatattttatggggggcagaaagcttattttgttttatttgggatttttgtcttgcctagtcgcttttgtgcattgctttttttatcttgatggttctttatctgtagagaaaatcgctttctcaccatttttggggatatgaagttggaattattcccattctttctattgctataattttcaaaactgcaaatgtttgtgttccttcttaacaaaggccttcagtagtgtttaatgatatatttaacttgcacatttcatctactgttatacatggcagaaactataaagaaacttagaaactctttctagggggcttttggatatgccctagatttctgaaatgtagtgttaattataaatacttctctttagtcaagctcaaagttaaagctagttcggagccttgcagtgtgtgaagaatctccaccaccccctgcaccagagatatcacaggagaaccaggtaaaaaagcaaaacaaatgttatttcaagacatggtggaactggagaatttttgtatatgatttaagttgtgtttgttatatttgttttattttgactaaatgaaacttattcaataatacttggcacccaagagatatatgaaaagttagaaaacctctttgcttcaatctaaggcttagagcaattattactcttctggaagaacttaggaatcatgtaattaattaggaatgtggctttaagaaagttataaattaatttttataaagttaaaaaatgttggtcgggtgcagtggctcacgcctgtaatcccagcactttgggaagccgaggtgggcacatcacgaggtcaggagatcgagaccatcctggctaacacggtgaaaccccatctctactaaaaaaaatacaaaaaaattagccgggcatggtggtgggcgcctgtagtcccagctactcgggaggctgaggcaggaaaatggtgtgaacccaggaggcggagcttgcagtgagcccagatcgcaccactgcactccaacctgggcgacagagcgagactccatctcaaaaaaawatatatatatatattaaggtagcatttccagtgaatataattgtggtgaaatttgcccttttagttttaccttttagaaatttctcagatacttaatgcttgtttgtaaagagaccagccaagacttcttcttgataggttatttaacgtaacctgaatgcatggtgaaaccaattttcatattagcttggctctttaatagttatctagtatttctaatttctcacatatctattcttgtaaaatttagaacagtgaggtttaggcaaaccatttagtttgcattctttttaatgctatgactacttttctgttaatctcagctatgggttgatctctgtctcatgttacatctgtatatttatgcataaatatttttggatcctttaccaatgtttatcttgtgataactttgcctagtggctagttgtacttaataagagtttgagcaacttaaaatgctcctttatcccaaaaaacagtttccaaggaatttgggcaattttgtggttatttaagaagccatgactgatccatgacatgtacatcttttttataaagtaaatatcattatacatttggtgattcaaactaaaattgttaaactttcccttgatttacatgataccctcaaaagcctattacagatatttaggatagttgtcacatatttagaatatgcactgtttttgaaaagcactacattttattgcttgaaaatgcaaggaaaatgttttgaaatagattgttgtcaatgaaatgtacttaaaaatctgtttgctttgacatttctttgcatcagaaacatagggctgaaaattaatttatgattttttttttttttttgagacggagtttcactcttgttgaccgggctggagtgcaatggtgtgatytcagcccactgcaacctccgcctcccaggttcaagccattctgcctcagcctgccgagtagctggaattataggcacccgccaccacgcctggctaattttttgtatttttagtagggacgaggtttcaccatgttggccaggctggttgcgaactcctgacctcaggtgatccacctgcctctgcctcccaaagtgctaggattacaagtgtgagccaccgcgcccggctgatttttttttttttttttttttgatgtatctacataggagatagctgtatgcatttatttgatataatagatgcattttagcaatgaaatagactttctagcaaaaagcagaaatacagtcaaagtatttactaaatccttgcttggagaatattttcaaatattaacctttggcttttgcatgattgtaataaagctgaagagctatataatacagtctgaaaaaaaaccaataaaattgttttttgaaacagcacttttaaaaagttcttttggccagggacagtggctcgcgcctgtaatcccagcacttttgggaggccaaggcaggtggatcatttaaggtcaggagttcaagaccagcctggccaacatggtgaaaacccatctctactaaaaatacaaaaattaggcaggtgtggtggcacacgcctgtaatcccagctacttcggaggctggggcaggagaatcgcttgaacccrggaggcagaggtttcagggagccgagattgcgctattgcgctccagcctgggtgacaagagcgaaactcttatctcaaaaaaaaaaaaaaaaaaagttattttgtacaagtcagagtaaagaatacgcctgtttgggatggagtagtaggcagtgtaatgtttttgaaaattcatttctttgttctgttgaccaaaaaacagatgttacaccatcttagcttcatgacagtctaaagagattgaggaaagaagggtcaggcattcataaatctgttaatacagaggaagcgtatactttttgaaaaaacaaaagctgtaccatgacccttgttttttgtagtgcattttacctgtttgaaaaatcttgagggagagcctgttatggtactaaatttggctagtgaaaatttatatgaagaaaaaataacaggaatatatgttgtgtattgatatatacattattgatcatagataattytttgtgttgacagttcaaaaagatgagttatggcatgtggataatgactaaagaagttatatcaaaagtcaattatttcccttaatatattctttctcagtttctcttagatacaataagctttttctttttggataattgcctatgaatacaatcctctgaataaaagatacttcttctagtaggaagtctttttccaagccttgagataaataaattgcacctgagtggaaattggaaaataaattatttctcatgaaaggtactagtatctaatccttgatggtagacacagtttccaactaatttgcttgattcagaatgtgatttttgaggaattaatctggaataaaactcattattcaaaaagttgagaggcaattaagagagagatgtcacttgtatctgatgagagcttgtgagagggaagtgacctcaataacagatgttattgacagagtgaagagtaaaggaattgcagtttcctatggagaggtagctattattccagttatttatagtctgaagattttgtgtataagaacttcagtgtttaaaatatatcttgtttatttgctactgaaaactaggccaactgaagacaggcctcagtacattaagcttacaagattttaaaaatatagttcatcttgataaaatagtttagtatctgtaattaaaatatatggctttttgaggagagcttagaaatgaaatctgctagttactggaagtgccttttagtgaagatctaagaggaggtagtgtgaaatcttttctcccagcctggatttcactgggttcctcttgagtaaccagaatagtagttacaagtcaagaaaacttctaaatattatacttctgaaaaatagttctgggattcatttctagatacctgttttacagttatgaaaagcgtaaagaaagtgggttggaaaatgaatcacaataagaaaaattacttactggttgatgagtgtaaggaagttgccagtgtctttggtaaacaagacagagagtgcaaaaagcaagtgtttgtcatcctagtaaaaactgccagtgtgcatcatttaccctatattatgaacacaaattttaactggtatgatgaattaagaagaagaaaagagatgaaaatagcaggtagcagtcctattggggtaaaaagtctacgtgtctgattgatggttttcttgactatagaacaacagtataatttagtctaaaaataggctacacttttatctttagtaaaactggtgtagaatttattatagctttctttataactttacctaagtaaacagagctacatgatttttgccttttctgtgtggattaatttctagtaatccctttgggttctggaattacatgtaatggcattgtttttaaaataaaacatgaattctcctttcagtcttacagaatgtggttactttacaattaaacattacgtatctgtaaggatacaattttgtttgaaatctttctaaaaaactgtggtgattgaaggattgacagtgatatataaatctcaaaaasgaaataaagctgtgtgccgttgattttggaaatgtttgtacttaacatttttatatggtaggagaatgaaggaatgtgtgattataatggatactcagaaacctgatttttattaatcattgacttgacacttatacattcgtattgtcatgattgatgataattatgctcttgcttggcatcttccttgcaaaaataagttaagaagacctgagttctcatcctccggggattttacaagttgatgcacttaaactataatagaaaacatttattttctctataatgttgaggatttgttttaattgatatattcaactcagaacgttagttttacattttatataaagtatttrataaaagtagtaaagtattattaagttgttttttagtttgaagaatccagttgggtaaaataatctttttcctctgtacaattctgtgttactcaaaaaatataaatgtgtggtattaaatgaattgtattgtattttcattgaataattgactttgccttccaacaggagaaaattcagatccagttaacacaatcatttgagaaagaagagaagccctcaaaagatgaagcagaaaaagaaaaggccagtgataagttgcccagaaaaatgttatcaagaggtttgcagttcttttgtttttttttaaaaaaaaattttgctatcagtaattccatccttttccccttgaataattatatatagtatatctttatgtaaaatgacacagaacagactggaaggatgatacagtacttaactcatctgggcaaaatggtttaacacagttccatatatcagtaagacgtttcagccaaaaatgcaacacataacagacgttgaggacatcttaatctcttactggtccctcactcatagtaaaatactaaagtcattataatttttatattgattcatctaaggatactatcactcttgaattccttatggtacaaagagctgatgtcataatattgagtatccagtaagaatattcttggaaacagagtgtttattttttataagtttggagggtcttcactattacctagcattgcagatcaatagaaatgctttttaaatttaaaaacccagttatgttgaccagtattataaatagtataaagatactacatttaaggcgaagatagcatgaatatttgaaaagtattttgaaagcaagcctgtagtaatagacctgacaaaaatcaaattctttcacaactaaaatttctrtctacctccaaattattgcctccattatattcatatctgaactaagctgtcttaatttgctacaaatgtagttaattatgtaaatcatttaaatttttcacccacggaggcattttgaacatgaggttgtggtgagtatataaaaggatctttaaagaatttagaggaaattaaacagacacatgtgagaggttaatttttttttaagaatgtgcgtggatatgcagttatataaactcatgtcatgcacattatatgggaatagaaacatcgtggtcacctgatttcattgtaacttttcctactttgtcgaatttttttcaatgtggggcatcttgttttatttaagatatatatacatcatgtgtaaaagggaatgggacttgttttcaaacaactttatactgggtttttgtgttgttgttttttagattccagtcaagaatacactgattcaactggcatagatctacatgaatttttagtaaatacattaaaaaacaatcccaggtaaaaattaaatttataaggtttccattgcttctagagtaccataattttgctatatatgttttcattattgagttagagtaatagaataagattgcagatatttgaagtacaccagaaacattttagttttttagggcaaagatgttgttggtctagtatatgcaaatatataaatatctttttgcattatgcatgtcaccatgatgtatgaattttgggaaatatagaatcactaagatatttaggctcttgattgagttagacatataccattaatcatgagaaaaaagaaaaataggtatctcaccatagtgcactcaaccaaataagaacttagtgtattcacttatgagtttttgaagtttttaaatgcaaagtttttgttccttcttgctgagtttataaatcatcaacccaaagatttttgaggtgkttatttgagtcagtactttaattgtgaaatctttcattttgtcagattactaaatgaataatttttaactttttggcaactcataagcactttgagacattctccctrcaaaaatggctacccacaaattatctgaccaacactttcatggartgaaagatgccaaggtgaagaaatcttcctctagatgttagctttccagagtagtagctttccagagttgacatacgttgaaataaaaatgatgtcactagatatgggcacacggaagataagagagttgtttatctcttacacagtcttgcttcaagataacttgtttttattcaggatgtattgtattcagtactatcttgattttctgtttcgtatttaatatcaaccccaaagagaattaccaaaatgaagtggtctctataataggagctgaaggattataggtaaggatttagagagaaggtaggcaactctccttgactttttttcctccagttcaagtttattcctcagtagtcccaacagaaagataaatttatgagtctattgaacagctctaactatgtgccaagcattgtgctaaacattgtagatatgaaaaggtattacataraagctctgaccctacagtattcactgtctctgtactagaaaaagacacctgataattaaaataaaacaaatgtaaaagaggtttacaggtgctgtaatagccagagaagggccacaacctctgaaaggattttggaatatgtcactgaaaaggtagtgcctaacctgaatcttgaattaagagtgttttatattggagctgtctatacagagagacatgggaagggcatttgagatagagactagaggattgccaaggcatagttatgtgagaggaagtgttatattcaaggaaagataggcatgtggcaagttattctagaaagtgatggtaaaggtcgggcgcagtggctcacgcttgtaatcccagcactttgggaggccgaggcgggtggatcacgaggtcaggagatcgagaccatcctggctaacacagtgaaaccctgtctctactaaaaatataaaaaattagctgggtgtggtggcgggtgcctgtagtcccagctgcgtgggaggctgaggcaggggaatggtgtaaacccgggaggcagagcttgcagtgagtagagatgcgccactgcactccagcctgggcgacagggcgagactccgtctcaaaaaaaaaaaaaaaaaaggaaagtgacagtaaaggtactggtgagatatgaagcataggccatatccaactatcgtcagcaagggataataccaacaccctatggcagtgaggaaatgtgaggggaccttttgattgtcccagtgagtgcagagtgctgctgggaagccagggatgccaaaaagacctataaaacggtgatgaaccacgaaaaattgtcttgaaatgccagtagtgcatcagtcgagaaatactgactatggcatgccaagttaaggagtaattaaactggattttaaatagggccataccataatgagatttgtgttttggaaagattactttggtgttttagaaagattattttggcagagataactgtaaagaaaaagagtggctaggagaccatagaaaagaatggagaggaaaagacacatttgaaagatatttaggaagtatcatggcaggacttgatgatcatttttatatggaaaggcaatggggacagtagagtagaacagaaaggccaagtactaaagatagcaaaaacagggcctggtggcatgtgcttgtagtcccacctactcaggaggctgaggtgggaagattactggagtcctggaggttgaggctgcactgagctatgatctcgccactgccctccagcctggactccatctctaaagagagagagagagcagaggaatcctgagaacatttgtcctggaactcaaccaaaagggaacagttacactgaaaataaaataacagaggggccctgcacaatgattcatgccggtaatcccagtactttagcaggctgaggacagtggatcacctgaggtcaggagttcgacaccagcctgactaacatggtgaaaccccgtctctactaaaaatacaaaaattagctgggcggttcatgcctgtaatcctagctacttgggaggctgaagcaggagaactgcttgaatctggaaggcagaggttgcagtgagccgagatcacgccattgcactccagcctgggcaataagagcaaaactccatctcaaaataaatgaatgaattaattaaaataaaataacagagggatatgaaaatataagtattgtaagattgcgaaatatatatatttggtctgcctccgtttcctagcttacaactaaaatacctgtaatctccaaagagctatctttttgtatgctaatgttgactgatagcttcaagatatcagattaggcgggtcactggaaggacaaaggcatgttcagagggttgggacttcagcccctgctcccaatctcctggatgaggagattggtgaaggtcagtctcctcaacaatcatacctacataatgaagacttcataaaaacccaaaaggacagattcagagggcttcccgatagctgaacacatggaggttcctggaggatgtcaggccccaggaaaagaatgcaagctccatccctcttcccccatacttcgttgtatgcatctcttcatctgtatcctttataataaaccaacaaatatgagtaagtgtttccctgagttctgtgatctgctccagcaaactagttgaatccaaagcaggggtcatgggaaccccaacttgaagctggtagtcagaagttccagaggcctagacttggaactggtgtctgaagtggggcagtcttggggactgagccccaaactgtgggatctgacactatctccaggtatagagtgtcagaattgaattggaggacacccagctgttgtccactgtagaactgcttgcttgcgtgcgtgcgtgcgtgcgtgcgtgcgtgcttgcttgcttgcttgcttgcttgcttgcttgcttgctggtggagagaaatctccacatattttgggtcacagaagtcttctctgttgattgttgttgtgttggtgtgagaacagagggaaaacatgattaaagaggttttccaaaacaagtaccaaaaataatttgttagattcagaagttagaaattgttggctattttaacaagtcatttcatttgggatagggtggtgggaaccagaactcagtgggttgagtaataagtgggaaggtaggaattcataactagtatgagtaaaataagattctagacaggcagaatttttcttctctctctaaacctgtgggaaagacatcagcaaggaacaaagattataaatccatttttatgtcttccaaattatgttttgattgtgtagttatttttcctctatagatgcaaacgtttttaagttatccacatagacattttttaactgtacggtttaatggtttttagtatattcaatatacagataggagcactatcaccacagttatagaactttttcattgccccaaaagaaaccccatacattgtagctattcctatgctaataataatagtaatactgatattggatgatcccaaccctaatctgttttctgtttctgtagatttccctgttctggacatctcatatgaatgaaattatataatgtatggtcgttcatgactggcttttattcacttagcataatgtttttaaggttcatccatattgtagcatgtacctttttttattccttctgtgtatgcatttttatttgagcaaatatacaagtgaataattcgtgtaatggctaatgtataagttactattagtgtcattgtggttttaggaagttgaagctaatgttaaattttgtgagaaataaggtttgcttaataattgattcagtattctctctcagtgaagcatacagctaattgccagctatacctggtacacaattagttagaagtatggcaaattccccctgaagcattcagggttgaatattgcctggagaattctactagatgttaagcagatttatttttagtgatactaaaatttagtcagcctttcctttttggatatctttaatttcaagatttttgttcacatcattaaatcttcattatcttgtcatagcccaataaataaactaaatttcaggggttaaataataagttatctggaatttctgggtgtctgcaatattttcagagactaccctattaaatacagtcattaataaattaraacctaggaacctgaaggtgttactgataaagattacactcactgacataattttatatgtatttttgtgttgcttttagccatattgtataaattttatatggagaaatatggatggtacagataacttatattatgtaataggaaaacaataccatggattaacctgaaggtggatttttttaagtaatttgttttgctctagggaacgtcacgtatttgttctctgaaatatcttctaaaagtcatttttattggaggtaatatttaagtcattttatttcttatctgttgcagacatttaaccaagagcatatgaaacattgggtggagggtggtcaaacagaagcattactattttcttctttttttatttgccactggtataacatcggttccctctttctctaaaattacttctggaataatgactagaacaatagtaactaaaagattgttagcccttcattttagcttttagtttattagcttgtttttattacttctttaataattaacagcatgtatcagttcattttaaaggttacacgatagaagttttagtttgtgcctacttttagatggttttggctcacctgctaaaagatcaatayaccttgagaaaagtagtttacctgttagtttgagtctcatatgtagggcccctataaaggattagtaacctttaacttatgaccattataaaaatatctaacctcaattacagatttgaaaatttgaaagcttggataagctacaatgtggaataaaaggcagaaggtataaatcttaagaccttaggaaagttgtcattcttgtttttttaacaagtgctactaaaagcagggtatcttttttaaaataagtgacccagataatctaaaaatcctctgcaatctatagatgtacgtcttaaggggagagaaagcctaaatttctatcaattgctagtaaaattgttagattctgttatttcatgcagatagtggaaatttcagtggcagtgcatttcactgaagaacaattgaaatattcttatacctgctctttagctcaaacacagaaaatcaatttaaatgtactgttttatgaactccaaataagttgcctcctttcttgtttgtttgtttgtttgtttgtttttgagacggagtttcactcttgttgcccaggctggagtgcaatggcacaatctcggctcacagcaacctccgcctcccgggttcaagcaattctcctacctcagcctccaagtagctgggattacaggcatgcgccaccacgcccggctatttttgtatttttagtagagatgggggtttctccgtgttggtcaggctgctcttgaactccctacctcaggtgacctgcccacctcaacctcccaaagtactgggattacaggcgtgagccaccgcgcccagctagttgcctgcttttgattctcgtctttattttttttacagtaaggcaatatgtaaattataaaagttactgaaaatactgtctcacaataaccccaaaagcttggatgaggctgggcacagtggctcacgcctgtaatcccagcactttaggaggccgaggcgggtggatcaccttaggtcgggagttcgagaccagcctggacaatgtggtgaaaccctgtgactactaaaaatacaaaaatttgccgggtgtggtggcacacacctgtaaccccagctaccgggaagctgaggcaggagaatcgcttgaacccgggaggcagaggttgcagggagccgagattgtgccactgcactccagcctgggggacagagcgagactgtctcaaaaacaaacaaacaaacaaacaaaacttgggtgaaagagggtcttataatttagtaaataaattctttgttgggaaaactttaggaagtaaaaattcttcaccctcccctaaaatttaagaaaaacaaaaagaatactaaaagaccttctggatgaagtaattttactaatttattccatgcaaaatatttttgttgaacctttctatatacaaatagttcaaataactatatatgacaataattgtgataaatgctattaaagaaaaatatgaaagaaacaattctaagaaagaatataagaatatttcagcaaaggggaacagcatgttcaaagtacctgagaaagacaggagcttggcaaatacagaaataaaccaggatgataacagttttgtgagttcaggtcaggagatgaggctggagctggatgaagaccagctcatgcctgccttgtacatatgtttagttctaagaacagtaagaaacccatgacagatttaacaaagggagtgatgtgtgatcacatatgtgttcttaaaagattgttatgcatgtttcatgtagaatagattagggaagatcagggaagatacagggagacaatatactcctgctgtagtagtcaagccagaaatcctgttgcctggatccagggttgtggcagtagaaaaatagatcaaaagtagataaaatttgcagtagtaattaactgtattggagcatttgaaaaaggatgatttaaaaaaaaaaaaaaccttcgagaccagcctgaccaacatggagaaaccccgactctactaaaaatagaaaattagtctggcgtggtggtgcatgcctgtagtcccagctaatcgggaggctgaggcaggagaattgcttgaacctgagaggcggaggtagtagtgagccgagattgtgccattgcactccagcctgggcaacaagagcgaaactccttctcaaccaaaaaaaaaaaaaaaaaaaaaaaaaamcaaaaaaaaaacgagattctcatacttctactatcatatactgagtaraaggtggtgccagttactgagatgggatatactaaggagaagcaggtttggaaaccaaactgaatattgctataaattttgttaaaatgtaattctgtgttcagctttggatttgaaatcaccaagtaracatgtttttctgttgattttttttaaacaaatataaaaatgtaagttaaatatttaatgaatgatgggggaaatgttattacttagttttatgaaacttttgcagtgtaggaggagaatcaaatgcaggtctgatgtgtagactttcaggtgaccaaagcaggggctaccagttcttctattgaaattgagaataatctgcatagtgtttattttagggaatcattaacctcttggcctcgttttcttgatctgtaaactttggaagacaaaactgaatgatttgtaaagctgcttttagctttaagtttctgtaagttacattttttttttcacatgtatatgaaatttccaattagcacaggaaaattctagagccatgttatgggtgtgtgagcagggaggtcctttggggagygataccattaatttgttgcagctaagagaactaaataagaccctagtgatctaaaggagcacatacaggtactccctagagtccttatttattttatatgttggaggtttttggttcacttagatttttatgggaaaatttaaaaatatataatggcagtttatagaatgggttgaaatatcctcttcttctaaattagcgatataattaatacttctctgccatagtcccatctacatactagtattagattcccatagaagtattcctgttgttactggcattgcatgttctttagaatactgtttctatggagttcagcatgataacaaagtcctgagcctaactaaagatgtctgttcttctgcttcctctccactttattgaatgaggaaataaaaactaaaatgcttttattatccacacattcacagagcaaactctaatatagtaatactaarmagatcaaaatacatttaagttccttcgttgtgtgtaagcaaaaaaaaaaaaaatgcatttaagaatagccacatgttgattattgttaaagttgggtgatgggtacatcaaaattcattacactrttctctacattagtgtatgtgtgaaaacttctgtaataaaaagttaaactacaaaaatcatcttttgttttaaaacattaataaatattctagcatcaagattggggtaatactgaatgtatagtttttagggggtgaaatttagctgtataaatcataggctgttgacatttgtgattacttcattgctaagttttacatataagagtcttcatactttgtttcagggacagaatgatgctgctgaaattggaacaagaaattttagatttcattggtaataatgagtaagtcctgacattcaacaagaaaagaaattgtcatcaccattctccttgacttactaagttggtttttcttgtgcttctaggtctccacgtaaaaaattccccccaatgacatcttaccataggatgctattacacagagtagccgcttactttggattagaccacaatgttgatcagagtgggaagtctgtcatagtaaacaaaactagcaatacaagaatgtaagtgtcaagagatgtaactacatattatatatctaaataataatactttatctttctatattacctttcatctgaggttttccacatgttttaacagtctaattaagttttatgataaccttatgtgataggactgaaaaacacatttagtttactgggaacaaaatgcaacagcctggactcaaatatggcatatgaatgaggactggggcatatggtaaaaaaataaaaatccagaggacatagtatcagtgatgtttgacaamcactcttagggatttttaaaattaatttagacagctgtagccagccttagtcaaatttaaaaaaaaaaaaaaaaacacaagagagagagcagactttgtccgtgacaccctcacatttagttaatcttctgtcagtttaccgttctttccaaaagcctctgaatttactccttttctctcacaattcttaagaaagtgggactgttggttaatgcaatatcattagtgctgtcttcttcctgggctatgtatgattctccggaggagctttttgttttaagaattgattgctttatagtgttacggaagtagatcatcattgctgttacttgggaacagmagamccaatgcagaggcacccaagttataaaacatacacagcacatccgttacatcttctgcctatttttaaggctaatcctaaaacaactagcwgagttmwgctgaaatttatattttgatggtgatttgcctatcgaaaggaatttcagtttgatatgaggcagcaacaagtctgtggtaatgagtagcagtcaacttcagatggcataaataatcctttttggtccattatttttctttctttcctgaagccagatttctcccaggttcttatctatgaatgatttaatttgcatggttatatttaattcatctatgccttttctgatttatggtcttttgtccttatagctgccatatcacttgctggaactattggttttctcccattttaaatagtctttttgtaaactaagtaaatactttagtatttttaaatgatcgttcctataattaaaagtaaattagtgaaaatagatgtgtttagaaagggatcttttcttcttatagggattaaatgttactaaaatgtgagtctgatttagttttcattaaaatttaaattttcatatcccttcgtctttaatattcttttcagttagtctttttccagtcagttatatcatgactaaagtaggatagtaaccattaagctatgagctgagctagaggtgaatagaactgttaattcatttaaccagtacctctcaacattactcagagctgctggatacacaagcacatatacattagcaggcattttgactaacattttgactggtgactctctaaggttttcaatacagtgtaacctcagttatttgaattatatgaatgatgtcaaaaagctttagagctgtctttatcaagataatcaaaagctaggctcagcagagatgcttataatatacttaaagaagtatgggtcaataatataattataatcagacagttcaaatcattcaagttacactgtactttttatatatatatawcttctgggatatgaagaaggttgtaaatcagaaaaccttagagatctgctccatattgaataaaaacaaacttaccttttcctcatagggagattacccgctccagccttgaatcagtggtgttatggatgtcaacaacccagtgtccactggggtgtctcaatggagcgggaagttggcgattacagggcagtaaattcaggcatctataaaagaatgaggtaagacagtcttaaggttagctgaaatgcctgccagtgctgttggtgtgggaatccagctgctcttagaaaagttgccaggcccttggttaaaccttatagttcactttggaatagcagtctctcgttcaaatataaactccatgaataagaaaatgtgactttgaacagttacaaagatagatgacataagtcaatggggcaatcatgtgacaaaaataacatactgccatggtcagaactaaataaaaatctttcaaacccttgaagaaaatactctttttcttattattttgatcacaaagctgtttttcgtcttcctatttttcttttacttcttacatatatttatgtacaaatctgttctctatttcacccatctaagtattttacaatagaaatttcattaacttgcttagataattctcacttttaatctccttttgcataatttgacaggaggcttttacgtactttattagaaattcataggttaaaataaatgttcaaaagtattacttcggttctagggccaggcgcaatgtctcacgcctgtaatcccagcactttgggagaytgaggcaggtggatcacttgaggtcgggagtgtgcaaccagcctggccaatatgatgaaaccccatctctactaaaaatacaaaaaaaattagctgggcatggtggcaccctcctgtaattccacctactcagaaggctgagacaggagaatcgcttgaacacaggtggcagaggttgcagtgagccaagatcgtgccatggcactccagcctgggtgacagagtgagactctgtctctaaaaaatttttttaaaaagaagtgttacttaggttctagatataaggaagtttgctgaaaatatcattactcagatttatttggattagaaatttacttaggttattcacatatatcatttgatatttgaactataaaaactacctaggagttcaatgagattttctctaaagccatttaatatattgttatatttcatatttcaaaagaataattccagttttataatagaatgatagtcacaggagtattgattcaattaatttgttgaagctgagaatgtattttgggaggtgaaattttatataattgtaattttccaagggccacaaccttgtgtttgtcctctagatcacagtggaacttgcaacatttctgtggaagaaagatgagtccactataaaatgtattgctaagatttcataatcgttactttaggtcacaactttgacttctataaaagaacatctcttttctaacctgttmcagttaatgttagcaaacctgtgccctactgtaatttaaaattaatggatgcactttgaagtagtctgtaagtttttagctaattgaatgacaaaatattttattactttcaggtataacaccaaactaggtaccataggagtagcataagatacggcactgcactttccttgtcccagcattttttcgtaggtttagacgaggcagtacaggctttgggtctaactgacctgagctccaactatggcttaatcatatgcctgcctttgaccttgcatatttgcttaagccatttgaacctcggtttgttcaawaatatttatatcagtaactaacttctgagtgtttactgttttatgtgttactgacattttcatttcatcttcagaacaaccctaagaagtaggtacactatataattcccattttacaaataaagaaaccgggaaagagaaargttaagtaacttgtgcaagtcataaagcagctaaagtgctaaagctcaacctttgaatccaagcggactgactccagagccaacattgtatttgatatggcctctcaaccataacatggaatagttagtattttctcatgagattattgtgaggactaaatgagactgcataagcatctatggatggcactaaaaagtggtaacttattttatttcttttcataaaatgttatgtttaacttctttgctaatattgttcattatcttttcctgttcctttgtttttgtttttgttttttaagacctgatcagaaatttaatgaacatattaaggatgataaaggtgaagactttcagaaacgttatatcctcaagagagataactctagctttgacaaagatgataaccaggtaatctagaacaattgtaggatttgtataggtgcaagacatactataccagtagttcatttgcctaaaaattatcctcttttctgtagrtgagaatacgtttgaaagatgacagaagaagcaaatctatagaagaaagagaagaagagtaccagagagccagagaccgaatattttcccaagatgtacgtactaacttacttaggtcttcatgttagagtatattctaattacgttgtagggtctcagtctcccttttatctattgatcacatttatttttaatcacatttgttgcacataaggtcatcttttagaaatattgagatcagttttgcttgtgttattaatagtttataaaatactacattgcagtagttatayaaaattttacaaaagttggaagcaggtagactacaggagtcattaaaagaatgttctccagtctatatagtttgtgtgattttttttccccagacttgtgacagacttgagatttttattaatagaaattgctccactgtctacaaaatcatatactctagatgctacttgttagttgactttctttgacaaataatttatttcttcttttgaaataaagctaattgattttgtaggttaatatctgttttcttcttcataagtgattatataagataggctttctaaatggctaattattttatgcatatatgccagaagagaatcaatttgttttttgtcaacatctactaagcatctgtcctgtaatatgtgttaatcagctacagatagaaatttcctctgtgttaaaaaaaaaaaaaaaagaagattaaataacactaaaatccagattgtaagtgaagaacttattcattcaacaaattttattgagcacctgtagtaagtgctatcctaggcactggagaacatattcatggacagttaaaataatttatccccaaaacaaccctatatggtagatactatcattgtttttattttacagataaggaacctgagattccaggaggctaaaatagagatcacacagctagaaaatggcagagttgggatttcaacccaggtctgctgaactccaagcctatactaaatgtccttctctctagtttataagatagatgaggtatctgcccttgatgaatagccaagtaatgacaacagggtatgtggtttatatagagacatgaaggtgtaatagatgacacagcagataagcaccaaaaccagaactggggaagggatgggagagttagcttccaagaagtaaccttacaggagtgaagagttccaagtcgagagtcagtatgtacagaggcccagaggtaagggagaacttgacacactttaggaattaaaagatttaagaggaggccaggcacagtgactcacacctgtaatcccaccactatgggagcactgaggtgggtggatcacttgagctcaggagttcaagaccagcctgagcaacatggcaaaaccccatctctacaaaaaattagccaggcatgatggtgcacgtctgtagtcccagctactcaggaggctgagacaggaggatctcctgaactcaggaagtacaggttgcagtgacccaagatggcactactgcactccagcctgggtgacagagtgactctgtctcaaaagattcagagtagccagattctagcctgagtgatataggaagtgaggaaagtttaggttggaaaaataatcagaaatgagatgacttggtcctgaaggtttaagatgattggacttctggggtttttggtggtgtttttttgtttcgttttttacttttggcttttttcttttttggtcagcagactttttctgtaaaggtcagataatagctgttttaggcattgtgagccacatagtcttcattgcagatactcaaatctgactttttgctactcaaacgtgacagcagccacagacaatacataagtgaatggtcatggctgtgttccagtaaaactttgtttgcagaaacaggtgtctcgctatagtttgctgacactggtgctaaaacatcagggagccattcaagtgggaagagttatgatcaaattgacatcttagagagattgctcctgttatataaaatgggcaaaaaatggtaactggaaaactagttagaagactgttgtaatcatacaaacaaaaatggtcattcctaacccagattaacagtgctgaaggactttaagcaccattaaggcatagctacttgttcactgctctagccacagataaagcacaggtgatcaaatatttgttaagtgaatgaagtggaatatgtatcctatatataccttgaatatataatgaaaatgggttcacttatttggaagataatatttgaatttcaaattaatttgagccacaaaatgaatagtttcaagatatgtatattatatatttgttaaaagtaagcataggatctccaaaccagaaaaaaaattccattattatttatttgtgtacccttatcaccatttttaacttacattattacacatgatttttgttgtcatcattggtttacagatggcattacgttatatttgacaaaagctcaactttttgtatctattcttttttctagtccctgtgttcccaagagaattacmttattgacaaaaggtgagggaatttttaacatctgttttggtaattgtctgactgatgctaataaaaattaaaatgtcctattaaaaygccaacagactccaagacgaggatgccagtagtacccagcagaggcgccagatatttaggtattggaagcatgttttcaatacagtattgaaaaattaaagcatttttttctttactttttgttcccctgcattagcttttcaaggttttatttctaaattacagagttaataaagatgcttcagggagatctacaaatagccatcaaagcagcactgagaatgagttgaagtactcggaaccacgaccctggagcagcacagattcagacagctctcttcgaaacctgaaacctgctgtaaccaaagccagcagcttcagtggaatctcagtcctgacaagaggtgatagttctggaagcagcaaaagcataggcaggctttcaaaaacaggtataaatatctacacaaaactgtgcagtcaagtcattagttttcctaatgttgtctcaggtccttatttatcagatggcttctaattatcctaaaatataaaatcactatcaatagtaccttgaccacctccggagcacttaaggggtaatatgtttcttgacatgaggattcactctctgtcctggacacagatttacaaccatcaattaccataaaaattcttctctattgtgacataaacttaattaggtaggttcaatgaaacattatctcttgattgaatgcccataggtaattggaaattctttattacttattcgtagttggtagaaggcatggtttctcacctaggattatttaacactgattgcattttcagctaatactatcaattattgattgcattttttatgataaagtccttcattttccattaaaaaaattaaattgctgaggagattttgaggaatttaaaaaacaaaaacaagtaacttacaaatgactgaaaatttcaataatctcctcattctactacctgcttccttggagttcattggctcataacatttcttcttttcatttcctctaactggcttcaatactaaagaagctcatatgtttttaggatccttgaagatctttatttttatcccaaaataagcgtgaaagtcaaaaatgggtgtttccctgtccgggcgcagtggctcatgcctgtaatcccaacactttgggatgccraggcaggcagatcacctgaggtcaggagttcaagaccaccctggccaacatggcaaaaccccatctctactaaaaatatttaaaaatcagctgggcgtaatagcacgtgtctgtagtcccagctgtttgggaggctgaggcaggagaatcgcttgaacccaggaggcagaggctgcagtgagccgagatcataccactgcactccagcctgggcaacagagcgagactccgtctcaaaaaaaaaaaaaaaaggaaaagaaatgactgtttctccctaacctatttgggtgagcctaaacataaggtattgtacacgtaagaattgaaggacatatttgaactgaagggctgtaatcagtgctttaaattattaaggcttatgaattgcagttgtcatctttttaatgtataatatggttgtattgaaaatatcttagtatctatgttaggattttgctaaaaataggtaaattttatcagtataagaagtctacttgtgtaccaaatatgcattatttggaaaatggccacttggtcatcataacagaaaaagctatttatgtatcatgagaaaattatgtagacacactgccaaattaaaacattttaagaatgtgtactatatgtattctgtattctcttcagagatgaaaagaaatattaattggcccttttaataggcaaaaaatgatttttgtttttaattcttagggtaaattgatacagtttttatgaagagtyattttggcataacttaaaatagaagctgtccttcagaaggcaatctgtatagtgtatcatagttgtttcattcattaaagattaattatccatcccagagtcaattctcttattcaaaacctaattaactatatacataagatgcaaatcattttctttctttgtctcggccaccttttttagccattatgctaaaaatcagtgacattttcagtccctgtataatagaaaatggaataaattgcagggatgaaggcatttaaaaatcagttatcaaattagttcagtaagaaataaattttaagttaacaccagtataagtacttggaatatatttcatggtatctctgtcccttgattagataaaatattcaaagttgattttacattttgggaaaatgctatgctagtaaaatgagaaattagattctgcaattaaatttgacagttatttgtcttaatacagaatttatcatttatttcttacactgaatctttctgtgttcttatagataaggggtttctggtattaaagattttgggcattttgctgtactaaattctttttcctgggggaaaattatctatatattcctaggtgttaatctaaaaggtaaaatgtacataactttgtccttttgggaatgtgggtaatgtgctttttgtggctgtctgtggctggtgttgttataaatgtgcttaaattgcatgctttggcagtgatttctctgacaacttacgtaatcagtttgctgtattaaacttgttcgttatggggagggtaagcaaacgtggacagtaaattaaaaagagccaatgcttttatgtagtaactgcatgttatgcaatgtaaattttattgttgttttaaaaacctgtgttttttatatgaggtttaaaaaatccatatttttcattactcctcttctaggttctgagtcttctggtagtgtagggtcatctacaggctctctttctcacatccagcagcctcttccaggtacagctctcagccagtcttctcatggcgcacctgtcgtctatccaactgtcagcactcatagttctctttcctttgatggtggcctaaatgggcaagtcgcatctcctagcactagcttctttttgcttcccttggaagcggcaggcataccacctggcagtattctgatcaacccacaaacaggttggtatccagaaaaaggtgtttcaggaattatctgaaaatttaaggatacttattaaatgtattttctgaatatgtgtagtcagctttttattattcatgaataattaacattttccaagaactttataacaaaaacacttaatgctagggaagtttcaaagacatttatatcagaaagcatttttttccccttgtacatctgtgatatcatctatgccaaatactagcccaattataatttttaaaaaagtttatttcctagaaatgagacaactacccacgaaagagctttgtttgatataacaattttttttaaccaacattgatttttttggatgatacaacaattttatacttgggaaaatcggatacattttatgaaaaaggactgaataagcagctttttttcattatataatggaggggggaaaaataattatctttcagaatgtgttgattttctactgaggaaaaggtaaaggacatcttattggtagtaaaaaaaaaattggggggagtcatgtattaatattgacaatacatattctttgcaattagctaatagtaatttacattttggagcatttacttttaccatatgctctgttaggtgctttaaatataaccttgttaggtaggtgaaatcctcatttacagataaagaaactgaacctcagagaggtgaagaaactgcagttatagtacatttcactatgtaaattggtaaaaatgatttatatagaaaaaatgatcttgtaaaagatcacaagaagtcttgatctcttcaagatagcatagcccagtcatttggcaaggtaatgaaaactctccttgatcttttgataactttaaatctcatagatttagctgatgtggtctcatcataatggcagtagtttacaggcagatacgggtgggagtataaggtctctaagtgttcctggccctttcctttcatttgtagtagaaaaatcatggcttgggactcattactttcaggttttattcacatctctttttaagacgaagtatgcaaacatttgtttctcttataagtattaaattagcataaataactgatttttcagaaattcaatttttgcttagtaattaccttcttattcttcaggttattatgttactaacattcctgtttttatccagcaagatgtaagatgatttaatattttactttttcctattatttttcattcaaaacataatatggttttggtaacatgaaagattcatttgcttaggaagggatagagtgagaaactgattggtctgaaattgaattgtactattaatttaaatgaatcaaaaagygatctctggtttttgacaacagtattacaatacatttaacttttttaagatgacccttaaattacatttgaccgccttcacccaaatctgctccaccaattttttctccaaattatttagcagtcaacaaatacccaggacaacttgtttttagttatctataactgtcacacaaattatcagtatactaattgattaaaataattttactttagagtactttttctgcttgatagctatagactagtatagtcttctctcccaaatattatgttttgatatcataagtttcctcaaaaaaaaaaaatggaaagggatttactatggaagaacagatgtttttaagacaatttaagaaactgtttttcagtcaaatttttctgtttgtgtatttttctcactcgtaatcattgcacagttactttttatgtagtcccttcttgtttctttttttaacaatccaattttagtaaagaaaaatactaatcttttaatctacttattgaaaaaatgtctggaagacagtatctgaaatgttaacgatatgattatggggaattccacaatagcaaagacatggaatcaacctaaatgcccatcagtgatagactggataaagaaaatgtggtacatatacaccattaaatactatgaagccataaaaaagaataagatcatgtccttcacaggaacacagatggaattggagaccattatccttagcaaactaacgcaggaacagaaaaccaaatatcacacgttctcacttgtaagtgggagctaaatgctgagaacatgtgaacacataagagggaaacaatacacactggggcttattggaaggtggagggtgggaggaaggagaggatcaggaaaaataactaatgggtgacaaaataatttatataataaaccaccataacacaagtttacctgtataacaagcctgcacatgtgcccctgaacttaaaagtgaaatcacacacacacagagattatggtgaatttattttcttttttgtctctatttgttattttcttaaaacaaatgttactttttgtaataagaaaaagttgtttagaatgtacgtgtagagaagccaggtgcagtggctcacaccagtaatcccagcactttaggagaccaaggcgggtggatcacgtgaggtcaggagttcgagaccagcctggccaacatggtgaaaccccatctctactaaaaatgtaaaaattagccgggcgtggtggcaggtgcctataatcccagccagtctggaggctgaggcaggagaattgcttgaacccgggggaggctgaggttgcagtcagctgagatcgcaccactgcactccagcctgggccgggcaacagagtgagactgtctcaaaaaaacagaaaagaggttgtaaaataaggacagtacyrtcaagtttacaatttgaaacatgagctattaattattttagtttttcatccagttctaattttattagtgaaatatatgtaatgtggcctaaaaattagatatttcctacctcctaataaaaactaatgaataactttccaatatcctgaagtcaagcattttctctttgaactgaaatatagccttataggaccccaatcctgtaactgaatttcttaggctaaatgtgtttcgcaattcagagtttttcaggaaacactacatattatgaaataaggctaggattactttgggaggtcaaggcggacggatcacctgaggtcaggagttcaagaccagcctggccaaagtagggaaaccccatctctacgaaaaatacaaatattagccatgtgtaatgtcacatgcctgtaatcccagctactcgggaggctgaggcaggagaatcatttgaacccaggagacagaggttgcactgaggtgagattgtgccactgtactccagcctgagcaacagagtgagactccgtctaagaaaataataattaattaattaattaaattaagctcactagcggtctgggccagtaccccataataagaaatgcagtaaaacatttgaatatttaagtgagggaaataaagactattaatagcctcatgtcagagcaggcatttcccaacctaaggaaatctttgttttcaaatattagggtttttttttaattgtggttaaaggattttggacatgctttgtaaattgttagtaaaaggacctattttccacctgtattctaagttatttttttccctctttttgaatttttcaggtcagcccttcataaacccagatgggagtccagttgtgtataatcctcctatgactcaacaaccagttagatcccaagtgcctggacctccacagccacctctgccagccccwcctcaacaaccagcagctaatcacattttctcacaggtgcacatatccatgattacataatgctaagttgacttgcctttacatatttgggactaaattcgctaattataattgagatagcctaagtatctcttagaactttaatattctgccactagtgatattccactcactactcataggaaaagagataacttcaaaggtttttcccctgataaatactgaaaatatgttggaaagaagggaattgttttaatcatatgagcctgtctggtgagtattttatccctatttcacaacagcaagaaatggacaacaggagaaataaaaacaaaactgtgattgttcattggcccaatgagcaaagtgagttgttttaagattccacagattaagcagttagaagaaactgagataggctgctcaggttctgcaaggtactcttcatccattctacctaccctatgaaagacaaagcagttctgagttagaattcccaaaagtactctcagtaatattttgagtttgtaaaaatgtttagaatttacacattcattttcacattcagtctttttcccctacagttgtattatccatctttggggaacttgactataccagtatgaactcctatttttattctaacttttttttttttttttgagatggagtcttgctctgtcacccmggctggagtgcagtgaagtgatcttggcttactgcaagctccgcctcctgggttcacaccattctcctgcctcagcctcccaagtagctgggactacaggcagccgccaccacgcccggcaaattttttgtatttttagtagagactgggtttcaccatgttagtcaggatggtctcgatctcctgacctcgtgatccacccgcctcggcctcccaaagtgckgggattacaggcatgagccaccgcgcccggcctattctaacttgtaaagattgtttaacattatcaaagttcctgtagttagttatacctctttttccctgcaagactcagtattccattggtgaaaacatgcagagtgattttgtatgaaagaagtatgatgggcctggcgcgttggctcacacctgtaatcccagcactttaggaggccgaggcaggcagatcacctgaggtcaggagttcgagcccagcctggcccaaatggtgaaacccccgtctctactaaaaatacaaaaattagtcgggtgtggtggtatgcacctatagtctcagctactcaggaggctgaggcaggagaatcacttgaacccgggaggttgcagtgagccgagatcaggccactccactccagcctgggtaacagagtgagactccatctcaaaaaaaaaaaaaattaaataaataagtgagtatcccttaaaaaaaaaaraagaagaagtatgatgataaacttgaactggagaaatttcattaattttgctcacaaatgatatcatttgtattgcagggttgaagaacatacaagtttaattacattatttaatggtgtgaaagtcataaaaaataattgtacttctggcaattaagactcctaatactgggcaaggcagttttttaaaaagaagaacttacaagttatggatatacttctaagaccatagaaatcagttaatgtatgtagaagagattgcctaaaactatttccacagactcccatattcccttcccaatcccatttggttacatacaatgagctcgcataaaacttcttccctggctttctctgccttggcttcagtcagcttggtcccaaagagtttcctctttattatgctgtcatgtagttgtctttgcagtgccatgtattttaccaggagctttaaaacactaattttcatttggtttcatttttatttaaatttcagtggaaataatgttaatctggcaacttttaaaaactctgggatttatctgtgattatatatttcagattattatctcttagaactttgtctgatttagtgataagagacagttctaaatgaagatgtaggccacctagtttagaaacagatgctttaatgagctataattggaattcttgggatattcatcaaatttcataacttatttttctagcattgctccaagttcaggtaatgcatcatcagatccagaaacagagactcaaaagtgattctcaatgaataccttttgcacaatctgaaataatttatcaatgagattgcaaataaccaaacaaaataatgctatgatttccaaagccttcagaagggctacttttcttagacctaacgtaaaaccaattactttaggtggatgttgttttgcagccagttgcaattcaagtaggaaaaggatgtgctaaggctctttcttccctaaatggtgtcagaatttcactttcatcaatcaatcttctagcccacagtttttttcattactctctgaaattcgggaagacattaattcatacccttggtgctcatagtactttccttaatcccccagctgactaaaacttttgtttcatctgacacataggagatcaagtcatctgaaagttatgtcttaatggttatctgacttaataacacatcaagtagcttgttcttgagagttctaaagctatggcacctcatgtagtataatatgtactatcatctgttaggaagctcacttatttctagccatgagttttgtgaggaaccagaggctacttcatagatctttcagcttttactgaaagatttttttaatgctttaattatagatttttttgctttcttttaagcttatctaagcttttgttttttagaaaccrttgtgttgattttgtggtaaaagtgcaactcaaatcattattatctatctatgatgtcatagacaaacaatgtctatcttagttgacatagaagttctctatttaaattattgcctgaacaatcttaattccattagtttatctaacatttttaaagtattgtctctgaagacaacatgcagagataytgttcagaaggagatgcatgaatatacattttaactaagagtyttcatcaagtgagattccctgggttcctcatctacttgcttatgtggctgtctacaagtcacttaatttaccttagtctaactgccttctgtaaagtgggttgctatagtctttaagccaatatgtatatyaccgtttttgtaataaacagtataaatatgagaaaattaaacagatgcaattttagtttgtggatgaccagctgtattcccaagattgaaaagtgattacaactttaaaaaaaaaaaaaaaaacacctgtgtttgagtgcccctgggaaacataaaacccttttttttcctgaaactcaggagtatttcattaatggccagagattttaagtaactagtttctcagctcctaacatgtactatcttaatagaaatgtgttaattacaaagaaagtgtttatcttccttatataaaagaggtgtttgtgtgtgtgtgcatgtgtctgtatgtatatatgtgtttgttgttccttaggctattattcttaatagttcccaccatatatatatatttgggtttttttttttttttttagacggagtctccctctggcgcccaggctggagtgcagtggcgcgacctcggctcactgcaagctccgcctcttggattcacgccattctcctgtctcagcctcccgagtagctgggctacaggcgcccgccaccatgcccggctaattttttgtattttttagtagagacggggtttcaccatgttagccaggatggtctcaatctcctgacctcgtgatccgcccgcctcggcctcccaaagtgctgggatatatttttttacccagagcttttttcttataaaattgctaaaagttaggggctttggtcccaaaagactgcttaatttcaccttatcagtagggtaattggaatagttattgtgtaagttattactgtctgatagtaagaatgaagtttttcatttataatttagtgttayactgcaaaatagggcaaccctttcataaaaccaggaaataatgagaagtagttttgcttttactgacttaacccgggggtctttgttaaataataggattcaaaatgcctaagtcacctgttcccgttaatctataataaagaaatattttattgcaaaaaattattctcctaattatgtaataaattcaggcgtacatgtttttgaaagttttactgtattagagttgcttcactttgtattgtttttgttgtttcctatgttgttatattttaaatgactttataaatgtagttaaagctattgccaaaaaagtgtaaatttccgttttatgcaattcttctaacgttttattctgacattaacrttgtttgccaacctgttattctttagcctgttcrtcctctgcagtcctcttcacagcctgttcagtactctacagccccttacccatccccgttcctgccagtctcacccacccagcaatactctgtggtactatatctctattcacctcctgcgttgtttctgtgggtggatgtgtgatgaatgctcaagagtgtcattaatgtaatatgatcttttgtgattttttttgggtcaggtttacatatgtatctaaacaaagtatttctaattcatactagaaataatttattccataaaatattggttatagtggcttattatggtgattgtttaaccttttcctgctttttcataacgaaagaattttcaggttgattattctagtcctaagatgttttagcaactttctcattgaggccactgcaggatctgtgctgccctgggatggcagctttcatctgggtttaggcattctattttctccccaacactgtagctccagtagacccagtaccagttcttagggtgagttgtagcttacagctacagaggacttctaagtatattttctaagaagatttctggatatttaatctgtgactgtaaagtaatgatactttcttctatccaaagtatgccccaatttttattggaataagaaaatgacttttttccaaggtgactctgagagtggtatacaattatggtacttctgttaacaatatttgatcatataacattgaaattacagttcataggtacattttttttccttttgacaccattcactgaattaggctaatagtgttaaagtgtcaaagtgacagttggggaagagaaaaaycatatattttcaatcattaaatcaggcatctcctttcagtcctttatcttctccatagccgtaatttactttggaaaatccagcagatctagaaactgcagacatgtcaactttgatatgatgactcaattgccacaattttgtaagtcatttttttcagtgttgaccttttaacaaaatgtggtatattttattgccagtctgtggtttcttgggaacagggagcattttaaccctatataatcatttcagtgatatttttctggaacaataagagctggtccttatcctgttgaattagagaaatgtttgtcagatagcacataaatcataacccttgtcttggtagggcaccatttagtaaaagcataggaaactgtcatttgaattacatttgtcaaattatctgacttccagaacagattgaaaaacacaagggaagaatggaatgtatggccaaattatttttgaaagattagagaaaggactgtagtggattttatgtatttaatttctgcaaataattttcgtggttagggatacaaaaatgcatagaatttgcattttgccttctaggaagaggggagatrgtttaaagcaaatactaattagtaccttgctcattgcttggtctttgaagtcctttcagaaaatattaattgtataatatgaacttggccaatttcacttctacattctaatgttgctttcatcttcatttaaataaatgtcttcattttttaatgtgaaatgttgtaccctactcttttctgcatgctgtrcattcccactagatatatttttwaaataatttataatttataatattcaacaatagagttgtcatttttttgaagctttaccctrttacataattgctgttgttgatatatataatttccataatgtgtactattgcatcttatttaaaaataggaagtatttttctttgataagtttggcctatgtgtagaaggcttactaatttttgacttcttccttttttagcaggataacctagggtctcagtttagccacatgagtcttgctcgccagccatctgctgatggttctgaccctcatgccgccatgttccagtccactgtggttcttcagtctccacagcagtctggttatatcatgacagcagcccctccaccacatcctcctccaccgccaccaccaccacctcctcctcctcccctaccacctgggcagccagtccctactgctggatatcctgcctctggtcatcctgtcagccagcctgtgctccagcagcmgggatatattcagcagccatcaccacaggtatattgctttttaaccttttctttcttgtggaaacctctcacttaagatcagttttaacttcaaagaacttatttttaaattctcatgaagagaatttgtgagagtatataaacaaagcatatactcatctttccgcctctggagattttcacgcacatgctaagcaaccatatgacaggtaaatgctccagttggttggtaaagtatgtgagctttgaggggttttttttctgagaggtatgggtttctaaaaaactaacctaagggaaacacaataaagtgtaaatccactgtaaaagtaaaatggtaagactgggcacagtggctcacgcctgtaatcccagcactttgtgaggctgaggctgactcacaaggctgggcttgagcctaggagttggagaccagcctgggcaatgtagcgaaacttttgaatatttaactaacttttaatttctgaaacagaccccacttggttatgatgtagtatccttcttatatattgtgggattcagtttgctaatatttgttaaagatttttgcatctatgttcatgaaggatattggtctgcagtttgcttgtaatatttttggttgtactatccggatggtagtagccttaaaatgagttgggcattgttccctcctcctttattttctgatggtgtttatgtaggattgatgttatttcttctcrcatgtttgccagaattcaccaatgaattcatctaaagctgtagattttttgcagggaaggtttttaaattacaaatttaatttcttagtagatataaaatgattccagttctctttttctctttggactaaatttcatactttgtttccgtttcatgtttcaaatttgttgtcataaaattgttcttaatatccccttatgcttttaatgtttttaggatcttagtggtatcccctttttatttcttggtattggtaattttgctctctcttttttgttttttattaatttagccagttgatttatcaagtcttttgatgttcttaaaaaaaaaaaaaaacacgggccaaacatggtggcttacacttgcattcccagccctttgggaggctgaggcaggcgaatcacttgaggtcaggagttcgtgaccagcctggccaacatgatgaaaccccttctctactgaaaatacaaaaattagctgggcgtggtggtgcacgcctgtaatcccaactactggagaggctgaggcaggagaatcacttgaacctggcacatgcagcttgcagtgagctgagattgagccactgcactccagtctgggcaacagagcaagactccatctcaaaaaagaacaaaggtttcattaatttttatgattttattttcagtgattttagatttttcttctaatagaagtttttaatgctataaatttctttttttctttttttttaatgctgcaaatttctaagcaccattttggtgctatccacaaatttggatatgtagtatgttagttattatttagtttaaaatgttttctcttttgagaggattttttatgacccatgacttacttagaagtatgttatttaatttccaaatacgtaggggctttctaaataccttttgttattgatttctgttttaattacatgtggtcagagagcttactcttttaagatttcagtgttttgggccggacacagtggcttatgcctgtaatcccaaatggtgaaaccccatctctaataaaaatacaaaaattagctgggtgtggtggtgcgcacatgtaatcctagctactcggtagcgtgaggcaggagaattatttgaacccagtaggcggaggttgcagtgagccgagaatttgtgttctaatattttagcgttatgtggttttttgttcagggttcttttgtggggcagggcattttgatttttttattgaaattcacataatataaaattaatcatttaaccatttttatgtgaacattttagttgcatttagtacatattcacagtgttgtacaaccaccacttctgtttggttccaaaacattttcatcactctaaaaggaaaccccatatctgttaggcagttgctacttgttcctccatttcccagcccctggcaaccaccaatctgcttctgtctcctatggttttacctattctgaatacttcatattaatggaatcaggcaacatgttaccttttgtgtctgacttcattcatttaacataatattttcaaagttgatccacatcgtagcataggcacacacacacacaaacacacacacacagtggcacactattcatacttaaaatgtattcacacttaaaaatctgttcacactattcattctttccctttttatccattaattgaaatttggaatgttttcttttgttgttgttgttgttgttgttgttgttgttgttgttgttgagacagagtctctttgttgcccaggctggaatgcagtggtgcaatctcagctcactgcaacctccgcctgccatgttcaagcaattctcctgcctcagccccccgagtagctgggattacaggcgtgagccaccatgcccaactaatttttgtatttttagtagagacggggtttcaccatgttggccaggctggtctcaaactcctgaccgcaagtgatcctcccgcctyggcctcccaaagtgctgggattacaggcatgagccaccgcacctggccaaaatttggaatgttttcatcttttgtttctgtaaatagtgctgttttgaatatgtaggtacatgtatttttttaatatctcttttcagttttttggagtatgtgtgtatataaagtgtgtgtgtgtgtgtgtgtgtgtgtgtgtgtgtgtgtgtttgtctttttgttattgagctaagagttctttatgtattctggatactagacccttgtcagataagtgatatgcaattattttcactcattctgtaaaattgtctttttagtttcttaataatgttctttgatggacaaaagttttttaattttggtaaagttcactttatccattttttcttttattgcttgtgcttttggtgtcatatctaagaattggttgtcctgtcttttaagtgctttatgtttttagctcctaggtcatttatccattttgagttaatttttgaatattggcgtgaggcaagagttcatcttcattctttttcaagtatatatctagtaattctagcattatttgttgaagatacttttctttccccattaaataaccttggaatccttgtcgaatatcctttgaccataaatgtaagggttttttcctgggctctcaccttaccccattatgtatttctgtccttttgccagtactacattgttttgattgctgtggctttgtagtaacttttaaaaatgggaagagtgagtactcctactctgttctttttctttttcttttttttgtttttgttgttgttgttgttgttgttgttgtttttgagayggagtcttgctctgtcrcccaggctggagtgcagtggcgcgatctcggctcactgcaagctccgcctcccaggttcacgccattctcctgcctcagcctcccgagtagctgggactacaggtgcccgccaccacgcccggctaaytttttgtatttttagtagagacggggtttcacggtagtctcgatctcctgacctcgtgatccgcccgcctcggcctcccaaagtgctgggattacagatgtgagccaccgcaccyggcctactctgttctttttcaaaattgtttttagtatttaggctccttgcaattccatatgatttgagaatgggcttttctgtttctgcaaaaaaagacctttggagtgttgataggtattgcgtggaatatgtaggtctctttgatattattgccatgttaacaatactaagttttccagtcttaaatgagcatgggatgttttttcgtttactctggtcatcattgatttcatattctattgttttgggatttgtccatctcccttttaagttctatcagttttttatrgtatttgaagctatattaaacaatttatatttatcatgtcttcctgatatattgactcatacatacatttttctctgtctctaatagtatttcttgaaacctattttatctgacattatagtgtcattcttttgagtaacatttaaatggtagatctttttctatcttacttgcaacccctatatttaaagtgtctytcatttatggttattagttgggttctgcctctttatacagtgattggagtgtcattagaccctttaaatttaatatatttttgacatggtatgccatgtcataccagattcaggtatgccacattgctatttttttatttgccctatctgtattttattctactttcctgcattttatattatttgaactttttttttttataatattgaatgctttacgaatttccgtgtcatccttgtgcaggggccatgctaatcttctctgtattgttccaattttgtctttttaggtacatccccttgaattttctgaatatgtgtgtttttctagggaatgtgttacgtacctttaccttatcaaaatctacttcaagttaatattgaaatttcaagtaaaatgtagcagccttataacagtataattccatttacattctctccgtccttttgctgttgttgccatatacattgcatctctatatattatataccaaaaatagtgttaataatttttgccttaaaagagatattggcagccgggcacagtggctcacgcctgtaatcccagcactttgggaggccgaggcacgcagatcacttgaggtcaggagttcaagaccagcctggccaacgtggcgaaaccccatctctactaaaaatacaaaaaaaaaattagccggacctggtggtgggtgcctataatcccagctgccttgggaggctgaggcacaagaattgcttgaacccgggcagcagaggttgcagtgagctgagatcgtgccactgcacttctgggccacagagcaagattccatctcaattaaaaaaagagagagagatattggctaggcacagtggctcaagcttgtaatcctagcactttgggaggctgagatgtacggatcacttgaggtcaggagttcgaaaccagcctggccaacatggtgaaatcccatctctactaaaaataccaaaaaaaaaaaattagccaggtgtggtggcgggcacctgtaatcccagctactcgggagactgaggcaggataattgcttgaacctggaaggtggaggttscagtaagctgagattgcgccacttcactccagcctggragacagagcaatactctgtctcaaaaaaaaaaaaaaaagatacgttttttaattaaaggaaaatacctaaactcaggatttagattactttctgatacctccaggaacagttaagggatcccatatgtattgtgtctatgttaatgcttcaaagacaggagatctacggtaaacttgagtgattcttggctaaaaactaacctaggaatattatgcctggctggttttcagatgagatgagcactctttaaaatctccacagatctctgttctttttacagataacccaatcagaagagcagaatgtgagtgagcccatgacactgttaaagttaacttacccacatacttctgtaatactggattaggtatttattcttcaccccaaactaggtcagattaagagaacttcattactaatactaatagctctggaaggaaaaataaatcaagatggtcttgatggcattttaatttgcattagaaatatggtcatgcatcatttaatgatagagatacattctgagaaatttatctctagtgggttttgtcattgtgtgaatgtcacaaagtgtatttacacacaccttgatggtgtagccctctacacacctaggttatatggtatagcctacaagctacaaacctatgcaacatgttactgtactaaatactgtaggcaattatatcacaatggtaagtatttgtgcatctaaatatatgtaaacatagaaaaggtacagtaaaaatatgatataaaagttttgtggttttttgttttgtttttttcttttttgagacggagtctcgctctgccgccaggctggagttcagtggtatgatctcagctcaccacaacttccgcctccctggttcaagtgattcttctgcctcagccccccragtacctgagactacaaggcrcgtgccaccatgcccggctaattttttgtatctttagtagagacagggtttcactttgctggccaggctgatctcaaactcctgacctcgtgatctgcccgcctcagccttcagaagtgctggaattaacaggtgtgagcaactgtgcccggccaaaagatttttttaaatggaacaccgatatagtgcamttaaccatgtatgcagcttgcaggactgtaagttgttctaggtgaatcagtgaatgtgaaggcctgggacattttactactgtagacttcataaacactcttaaattaggctacacctaatttatttcatacatttttctttcttcagtaattaaccttagcttacagtaactttataaactttttaattcttttcacttttttattcttatgtaataaaacagcttaaaacacaaatacaccatacagctctacaaaaatattttctttatatccttattctaaagtcttcttttatgaatttttaaattttctttctttttaattttttttwattaaaaactaaggtgcaaacatgcatattagcctaggcctacgcatttcaggatcatcagcatcattgtcttccacctccacatcttgtccctctagaaggtcttcagaggcagtaacacacgtrgagctgtcgtctcctatgtggagctgtcatctcctatgataacaatgccttcttctgaaatacctcctgaaagacctacctgagtctgtgtgtgtgtgtgtgtgtgtgtgtgtgtgtgtgtgtgtttggtttggagttgttctttgttttttgagacagagtctcactttgtcacccaggctggaatgcaatggcacgatcttggctcactgaagcctcgacctcccagattcaagcaattctcccacctcagccccccaagtagctgggactacagacacgcacatcacacctggctaatttttgtattttttgtagagayagggtttcaccatgtcgcccaggctggtcttgaactcctgagctcaagtgatccacccacctgagcctccccagagtgctaggatyacaggtgtgagcccctgyccctggccctgaatctgttttgcagtttttaataagtagcaggactacattctttttttttttttaagacaggctcttgcctctgtcactcaggctggagtgcagtggtgcaatcactgctcactgcagctgtgacctcctgggttcaagtaatccccaatctcagcccctgagtatacaggactacaggcgtgtgcacctccacacctagctaattttttaattttcagtagtgatagggtctcactatgtggcccagtcagatctcaaactcctgggctcaagcgatcctcccgcctcagcctcccaaagtgctgggagtacaggcgtcagctgccatacccagcccagaaggactacattctgaaataatagttaaaaatattgtaaatacataaaccaataacagccatttattatcattaccaagtcttatttatatactgtctgctatacttttaaacaactgctagcacagtaggactacagacatgtgagtgatgtattgygctatgacatcactgggtgataggaatttttcaactcctttataatcttagggggccaccatcatatatgcaatctatcattgaccaaaatgtcactttgtgatacatgactgtatgagaaaaattaaagaatggaaccagtataactgtgcattaatgtgggagtggataaagtagtttatacaatgaatgttgtttagcagttaaattgaatgagctagctgtatatgtttcaataaagaaagatgtctcaaaaacaacatgaattgcaaaatgaatttcatgaagttatatgtagttgagtttcccgtatttgaaaagcctgggaccagaagtttcagttttttggttttttttgggggggattttggaatatttgcatatatacaatgagatatcttgggatagggcccaaagtctaaaaccaagttcacttctgtttcatatacatcttatacacatagccttaaggtaatataagccatattttaaataatttcatgcatgatgtaaagttttgactgtaacctgtcacatgaggtcaggtgtggagtttctttttgagtactgacatgacatgatgcttttggcatcatgttggtactcagaaagttaaagattttggagcatttcagattttggacatttggatttttaaaatactcgcccaggctcagtggctcatgcctgtaatcccagcactttgggaggctgaagtgggcggatcagttgaggtcaggagtttgagaccagcctggccaacgtggtgaaaccccatctctactgaaaatacaaaaattagctgggcatggtggcacatgcctgtaatctcagctacttgggaggctgaggcaggagaatcatttgaacctgggaggcrgaggttgcagtgagccaagatggcagcactacactccaacctgggcgacagaatgagactccacctcaaaaaaaaaaaaaacctaaaaataaataaaataatacatgtatggataatagatatatagtaaatagatatatactgtatagtaaaatcaccaactacagaataatggcttctatggaagttagagtaaaggaaatagggtgagtctttagctaattcagtagtgtttggttttgtaagagagagagctgaagcaaatatggcaaaaaaattaaaatctaaatatgattgatgacacattagttatatttttatgcatactttgtttgaattttttttwaatttcagttaaatttaagaaaaatcagttttccaatgattagtgcyaaaaagaattattactcattaaactctgatcttcctcacagaaaaacatatgtaatgcaagtaaaattgattttttcccgcaatatttatgatcctagatgccagcctgttattgcgctccaggccactatcactccagccaacctcagtatcgcccagtcccttctgttcattacaattcacatctaaaccaaccactgccacaacctgcgcagcagacaggtgagttgtgtttcttatgtcataacttctgagccacacttttttccatcttctatttcagtgttgctcttaagatagtacctactcagtctctcaggatctcgaatatgttcatacatatgagtttgcaaaccaatgagattaaaagagtgagcaaatcttagcatcctctggaaaataccacagtgtcacgtctacatgctaaagggttgggagctgtactgggaatatcttaagcagtttgttaagtggctgccatctcttactgccattgagattgaaactgtctttgcagcctgataaatcacctatggtaacagcaaaagagaggcaaggcgaggcaaggtgacttatgaatggctaaccagaagcaaagatcaaaaccacctaacttggattgagaaccctagtctagggatgatattttgatctcttagtaggcatgcctttaaaagaaatgatgtacttagcatattttctgtgttttgcttttcagtttattgattgatagtgaaaagtatttttaaaccaaatacaatctaaggccacttaaatgaaatttattaaaactcagcattgtttttgttttagcactttgcagattttcttcaagcattcagtgaaaacaattttgatctcagtgtataaaactatcttattgattttttaatgaactcatttctctgtatgcttctcacctagatgtgtacttcccagatgtttaataaggtatttattcagccttttataactctaggagttgaagtggaattttatcattggtttctttagagctttcttaactgcttatcactattggaggctccctgactatgtgagtgtgactcactgaggaacccataacctccacctccactgaggctgtttactgctcttgatattgtgtgaaactcgtcagggttaccaccagtttaggagaagcatctctgcactggcccatctgatgaatagtagtcatacttctctttattgttgcrgtcttcagtgatcatgattcactaactttctgtgctagatatagttcrtgcttagcatagccatgcaggataacttccaggtccttaatctgttacccttaggagttgtctcgttgttagtttacaggttctcccctttttagtatgttactagccttgtattgtacatgtgacaaatgttcttccaaagaacattgaatacaaacattggtcattttagccaagttagaattttagttccaagctacctaaaatttaataacacagtccacgtcaaataatgtaaactagtatatgatataatttcaaaaggtatcaaaagttattctctattcgtgggaacattggttgtggtactgctcattagctttatatacactggtgttttattcagaaacaattttctgaatttttctggacctcaagtaatagaattttcatattgttttttcttgatttttttcttccaaaattataacacagactgtagctgatgccataataaagaaatgtmccttcatgctactcatttaaatatccttgcgtgtgactaattaacttaattcattagtacactctattaataaggcaagcaaaaatcctttgttctgtgtttgtgttagcttactaattttgttcttcaacatggcaaaatttttatccctgtccatggtcaaactgcctataaaatcactttcaatcacaggttgggactagtgtgctagtatrtatgcctctctgccaaaaaaaaaaaaaaaaaaaaatatgacacttaatagaattcaactaaatatgcctgattggaggtgaaaacatctatgtgacagatagcatgtgtttatcattggtcatatttttaactatggggttttctctgatgctagttatgatgagaaggaggaaacaataaatcaggttgcatctggatagtgctacaggcacaaaamagagaatcatgtctttgaaaaatgtttgacattgtgtttgactcttatgagtcagtcataatataacactttataaaagctagacttgtcctttcagctgttttatatagtatcctcttaacttacagcttaagttagttgactcattcagtttgaagaataaaaggaataaatcctcaaagcattcttatctaaaagagaaaggaattttgttatgctaataagtatcatagaaaattttcctttaaagaaaagttcagcagggccagtgccaactgttgtgttggtaattgtattgaaccttttcatagaattagtggggatttgaactcttttttaaaagttataatctaaagacttttttatagttagctcatcattaatttttatgtcaaaacttgcagaaggccaggcrcggtggctcacacctgtaatcccaccactctgggaggccaaggcgggtggatcacctgaggtcaggaatttcagaccagcctggccaacattgtgaaaccctgtgtctactttaaaaatacacaaaaaaaattagccgggcatggtggcgcacacctgtaataccagctactcgggaggctgaggcaggagaatcgtttgaacctaggaggcggaggttccagtgagctgagatggcgccactgcactccagcctgggcaacagagtgagactgtctcaaaaaaaaaaaaaaaaaacttaacagaaaagtgtgcatttatgtttgtatgtgccctagtgtagaaaagtaaaatgtactgggaaattaacatgatagtttattgtttttgagtttttttacaggtatatagcaattactgtctcataatttacatttttatatggaaacatacttctgggtttccttttggtttttattttcttacctctctacattctactatcccaatctgattaaaaatgagaaatactttttcatatctcttatatttgtatttcttgtcaaacaacacttgcttaccccacagtgtcaagaagcatgtttttttttaattacataaaagggtgaaactaattattcaaccaaataatgaaaacactagtagacttggagcaattttttttcactgtggcacaagtaatgtttaaaagtttgtatttgaacttaaagaaattttgccctaaattaacaagcccaactgagcaaagtatttttagaccagatagggtatgggcagtagaaatacaggatctttcattatttttcctttggtggatagggaggaggwtggggaaatatctcaaggataaaatgctctaggtcttttatccatgtgtcccagtggaccacaactgaaatcaggactaacattactgctggggaaatgaatgtactagtcttttgttatgaatgtgaaactactgaactgttcattcaaaacaaggttgagtaaacccctgtcaacagaaacagaagaaaccctggctacacacataagactttctgaacaatgcactgtataatgggaaagaacaacaaaataaaagtcagaatcctgatggcccttagtcatttgtaactggtgttaggcatatcacttaaagccactgagtttcagttggactcatttgcaaagtatggaatttttactgtgttgtctgttgaagcctctgtgtactgtaaaactccataattctttgtgtctcatgtgagtcatttctagttctaaaaggtagaataatagagaattggtttgtaacagcttggcaaccaactgtcaataactggagtcaatgaaagcaactatttcaaaagatcagattacttaccagtttcactaataaagatttattactttaaacctttatcataaaatgtatgctttgaatactgtgaagtayactgcatataaggagtgtggtatagtataaagaaactttctgcaggtagtaattatagtgaagattttaggtttacaaagccctagctgttttctgtgtagcttttattattcttatgactcttgacaagtttgtagcttcaccatatacatttaatattttgcaataattggccttgttcctgagctgttggattcggggccgtagcactgtctgagaggtttacatttctcacagtgaaccggtctctttttcagctgcttcctggcttctttttactcaggtttccactgcttttttgctttttttaatgctgtatgaaggtgttaacatttgtttatatttttcattaattgtaatacctttaaatcatgcatcatactcagaaatagggattagaatttaagtgacatctttggcctaatataatttacctgttaaaaatttgtgaaagctattgcttatttcttttccaaagtagatttggatgacaaattcagtttggttttgagcttatctaaaaagcttaatrttttaagcataccaaactcattagcagaagtcaaatatgtctctccctattgctacacaactttttagggatattgttatatatgaaagcatgacatcaaacggacctaatacacctaaatgcatttgaagctacttggtctcggttcttaccaacgatataatttaatttttttttccaaacgatgatgttgttgcatacctgtggaaagcaaaatgattctgtgaaactatacttttagttttgcaaccatttgataacttcaaagattatcaatgtattatatctttagtcttagctttccagataacccagaatcatatggttccaagttgattaagctttgttaccagcagactatggtaggatcctgatgaacgacactatggaagaaacttgttaggataaacagtcttcaatgtgtgcatattgttgacagaatttgaaggcacaaatttaagagtaactagggtgtaaaaggcgagcaaagaaaagtcagcactactgggtaagcaggtgagggggcttattgataggagagtcggctatgtcaaatagggactcaaggcacaaagtcaatttctttaytgacaactttcaatccaagtaataggaattttgtatttgtaaattactaggtagtggctctggctattcttgttttttcattgatttctgtgagcatttcttagtatgtattgtgtgattcagcatagattcagacattgtataatacctacaaatccacctatttcccttttcccttctccattaacctgccgccactgaaatctggagccaaatatatctggtaagtacccacagatttccttgagttgtatagactcttccatggaatagttctttaaatagctgtgagcaataaactctgtgtgactgtttttgttagaattggtttttgtatatgtatatgtttatttcaggcacaggagtgagagaagaggggatgagagatgagaagggataatcaagtgtgatggcaattgcatctccttccaaatacacccatggggctggctttagttgaacttgcccacctactaaaatagtgccacagacagaagcccaagattataagcttgaggttttaacaatttggtcttgtagatgcctagttacaaataaatttggctttagtaaaatggctcatctttaaaaaaaaaaaaaaagaaaactaccttcacagtgcttctattgtacaagcacagtctggaaaaaaaattaataggtactattaagtgaaataaccttagattcatgggtattctaagcatttytttaatactttttgtaatttttctgattatttctgtgttattaagaatgctttcctttagaacaaatgctagttcagatcacctatataaaataaaatcagcctgttaatgcctgttcaatacttttgtgctgagcactgcatttccttcctgctctcttcttggttaaagtgagagttaaaaatagaacattctgtggagccctccagggaagttcctgaaccatcagtttatattgtcctagttctcttagcttgcagaattgattgtgctttcctctgaaagtgctgaaagaaatgggataatattgcaacagtgcagtcctttaacaaaacagaatggtagtgttttaaaaaaaaaaatctatgttgagatctggatatttattttgttgtttggtatcacttactattggcatttcttactttacaaaatagaggctttcccacaatattgacgtaaattcctataaaagatatagtgttttcctctactttccagattaaattcagatgtatcacaggaagaattttttttaattctaatatactaaaatatactttttagtgaagaaagaataatttatgtggtagccaagttggagtcgggatactggaaatactcttcttgtagcatttttgaaacctgttgatacttttcattctctagaaatctacttctccttcctaatcctcagccttctccctcttttccagatcattggatttttctttctcaaacttggcaktcttcaaactatacttttgacactatgagaactctgtacccactcttgcttttgtctgaataattagacaaggaacctaacctacaatgccacttctctaggtgtcactctgtaacggttcatgcccagcagtctgaaatttctttgtttaaacaaaagttcagaggaattcatgagcaacttgaacagttcaagatgtaaattttattaagcaaatgtacataatgtgaggcatacctgtaattaaatgatcctttattttatgttaacaattattttattaatgattttgtcttacataggcaagagtaaggttcttatctttgattggattaggagaatgatgtgggcttttttgtttttagtgctttccagctgagtatttctagttttgcttgtgattatagtamttttaaccaacatagatcccagttttattttctttttcattggaacaaatgttagcctgttaatgcctgttgagtacttttctgctaagcactgcattagaaaaagaccaataatcttttagtaatctttaatgttctgctctttagagaatataattcaaaattatatactttttagccagttgctgtgttgtatgttataattattagaatgagtgataaaacatttcatcatgatttctggaaaaaacattcatattcctgtcctaatgccagtcgaatttcccttctggggtaccgatcattctgagcatcaaatgttaaatgacaattttagttgtgttagtttagaacagttcttcagaccctgatggctttctacccagtgtagtttaaacctggtgaattttcctgccttggatgtaaaaatgaatgaaatgctactcagtggatggaaaaaagtcattgcttcacagaacttcaagacttcgcccataaaacgtagcagctctccttgcacaaaatgtgtccaggttaaagctggcactgccctgctgagtaaagtctgacttcttggcaaagcagcctgactttgtggagaagacagccagtatctatgaaaactctgctagactaatcttgtatagactcatctggaatgtggcaacagactttttgagcaaaagcagcctccgaggcaaaacagcaaaactaaagcccaaagggaacattggagattcacttggaaatactcaggctgagagacagaactgtgggatgtggaacctgaaatagtgtcactatttgagccagttcttctccttcccaattgtcttttgttatgttttaatatttttagagatggagtctcactgttttgcctagactggagtgcagtggcccttcctaattgtttaatacaatttatgcgtataatctaattatagtaaggcaaggaagtgtaactttgaaatacatcagtagtaaaccacgcatcttgcgggtagtggacaaaccaagggaaggactgttcctcccacagagaggacattgtgggctaatcatatgcttatttacacctgctcttttttaaagcccccaagttcatgtggctaccatcygaactaactacccaaaaattttcactctgattcctattttgaataacatgcttatactcaccaataaatctttagttcaaatgaacgaaaagtttccttgttgattgacattatttccagtaattatctgttttcctgtaattaagtttatcttgagacttargtatgttaagctacagtaaagtcttcattaaccaaaattatcagaaaatgaagcaaggccaggttctgcttatttgaacaatattactgtaatactttttcttcttcaacatgtgttcctcaaaaaagtaaattttagaatcagacagctgtgtgcagctctcagctacacatttgatagctgttgatcatagagaaggtatgaacctctctgtgccttttgtttcctcagctgaaaaacagggataataattgtatctatttcataagattgtgaacactaaatgagttaacatatgtaaagtactcagaacagtgcctgaaacttaataaatatcatttgaggcttaggtattaagattagcttgtgtgactgggcgcagtggctcacccctgtaatcccagcacttcgggagactgaggtggtccaatcacctggtgtcaggagttcaagaccagcctggccaacatggtgaaaccccatctctattaaatatacaaatattagctgggtatgctggcacgcacctgtaatcccagctccttgggcaagagaagcacttgaacccagggggttgaggtggccataagccgagattgcaccgctgcactccagcctgggcgacagagcagacagagcaagactcagtctcaaaaaaaaaaaaaaaaaaaaccaacaaaaaagattarcttgtggtatcattgaagcaaagataattatattttaaatgaaaatttaaatttaaaatgaaaatataattttaaattatattttaagtgaaaagacagggatttggggccaaattctagagcagacacaggaagctgacagagtttgctctaaaatgtttatattttttgtccttttagctactcaacacatgccttcatcctgaaagtacagtaaagatcagttgagttgtttgatgttaaacttgaggtctaaatatgttttgaagaaaattacttaaatactttcttcccatacattgtacaatttctattgataagatgtggaagcattatatgaaaaaagattttgaaatagtctgtgtcatataaccccatttctataaataatgaaaatgaatatatatgttgccctctgcatggaaaattaggctagccacatataaaaatgtaaatggggagtatctataagtgattattttcccatatagactttttctatgtttgtatttttttccaaattttctactataaaagtcttttttatgctctataaggtttttataaaagatattaagtctacatttttaaaaatattcaggccaggtgccgtggcacacccctataatctcagcactttgggaggccaacaggggcggttcactctgagctcaggagttcaagaccagcctgggcaacatggcgaaaccctgamtctactaaaaatacaaaaattagctaggtgaggtggcgcgcacctgcaattccagttactcaggaggctaaaacaggagagtcgtttgacccaggaggcagagtttgcagtgaggtgagattgcgccactgcattctgtcctgggcgatagggtaggactctgtctcaaaaaataatagtaagtaaataaattaaaagtaaaaatattcaaataataccttcattacaaactttacatactagatataaagttaaacagtttgtattctttctttgagttcttcctaagcactttgaggctaactatatggaatctgtgatttagctgctgtacagttttctaggagagacttaatgagtgatctagaaattccagtctgatgtgatttgtattcgtgggagtgtcattttaatgaaaaggtgattaaatgtgtttaatcttgtaaaccagtgttacgttaaaatttatttttttaattttaattttaatttttttaagatggagtttcgctcttgtcgcccaggctggagtgcaatggcgcgatctcagctcactgcaacctctgcctcctaggttcaagtgattctcctgcctcagcctcccaagtagctgggattacaggtatgcgccaccacgcctggctaattttgtatttgtagtggagatggggtttcactatgttggtcaggctggtcttgaactcctgacgtcaggtgatctacccacctcggcctcccaaagtgctgggattacaggtgtgaaccaccgcgctggcccaatgttacctaaaaatttaaattcaggttgggcgccatggctcatgcctataatcgcagcactttaggaggccgaggcgggcagatcacctgaagtcaggagtttgagaccagcctggccaacatggtgaaaccctgtctatactaaaaatacaaaaattagccaggcatggtggcacacgcctgtaattccagctactcrgcaggctgaggtatgagaattacttaaacccaggaggtggaggttgcggtgagccaagatggtgccactgcactccaacctggccgatagagtgagactctgtctcaaaaaaaaaaaaggcatacgcaaaccatgagagaacaactaaccagaaatgtttatgttacctgtagagttttatgagatgtggcataagagaatggacaaaatcgtaaagggattaataattaagatagattcttagcgaaggcatttttttaagtgcttrgcatcattatttttaatagctccactgtgttcaaaaactcaatcctagcttatttatgctacttctgaatgaagtcctaagatattagtgttttttctcctttcacagtctttaaaatctagaacttcctggtagttcttatcactcttytatgtgtaaaacctttgcttcttcaccagtattctgttgtaccttcatcttccacttatcacttcacataccatattcattcattcatgactattccccattaaaacatattaactgtcttactttttccaaaccttttatttttgctggaatgagcttttcctttaagtccaagcccaaatgtcactacctttataaatatcagtcaggactaatttcttcctctttttttcataagactctatttatactgctatcctcatacggtatggtggctaaaactgcctaatttcaaagatagggaccatgtcatatctatctttatctaacccagatggtgtcctttttactactatttgtaacaaatgactagatgctgagatcaactgttttatatttcatgtcaaattttcaaaatgtacgtggtgtttgtaagagagtgcgtgtgtttgtgtgtgtgcttgtgtgtgtgtgtgtggcaattagtgggcatggatattaatggagattaggctgctttaaagaataagataccaggccagccacggtagctctcgcctgtaatcccagcactttgggaggctgaggtgggcggatcacctgaagtctggagttcaggacyagcctgtccaacatggtgaaacccccatctctactaaaaatacaaaaattagccagacatggcagtgcgcgcctgtagccccagctactggggaggctgaggcaagagaatcgcttgaacccagtaggtggtggttgcagtgagccaagattgcaccactgcactccagcctgagcgatagagactgcatctgaaaacaaacaaacaaaaagaataagataccattggaaatttactcatgcagctttcatgatgtaaccaggcatggtggtgcacacccgtagtcctagctcctcaggaggctaaggtggggaggattcattgagatgaggagctcgagggtacagtgaaacaaaaattctgccaagtctgtcataagaagttatwattccagtctatacagaacccaaattctgatgctgcaatagacgtgtatgtgttgaggtggcatttccaacacaaaaaaaggtctcatgttcacatttcatttccattcctgtgttattttttaagggtggaaatttgtcattgtatgttttaatggtgtttggaatttggggtataaatttgaaatacttgtcatttgatgaactgaaaatagtgttaaatgttaattgttagattaaaaaggaagaagtttattctgttctctgcctttacctgcctgtaagtttaagtagtataggaaattcacaaggaataaaggtttagaaaacagcatattatcaatcactttattacagatgagaactagaatacacagtattctgtttttacaaagttagactggtgagaaggaagtcattggaaacatggccataaagtagttttgccatagaaataacatcattttacaaaaacccttcactgttaagggattcactataactgaatttttactttggttttggtttttttctgtgtttttggttttttgtttggttggttggttggttttgtttgtttgttttttgagacaagggtcttgcgctgtcgcttaggctggagtgcagtggcactatcttgtatttttttgtggagacaagatttggccatgttgcccaggctggtctcaaactcctgagcttacccacttccatccacccaatccatccatctcccaaagtgctgggatcataggtgtaagccaccacacctggccaagatttttagtttcttaattttaatgtgttgctttgttactggatataccttgtggttatatttttaaagaagatagatgctagattttattcaattatttagtccctgagcagaattattaaggctaccagacaactacagtgatgctgctgtctataatcaatacttgaaattgccatgtctgttgctttaggaattagtgaggatataaatgaaaactgataacaaaatgtatttatggtattatcagggaaacaatttcattgccctttagctgttaaagtctgtataggtggtattctagttcagttcatctttgtaaaaacttttcagtactctgaagctagatgattatttttatctagttctttaaaaaataaaaaactttgtgggtagcatctagtaatttacatgagtctttagctaattagtatacctaaaagaatcctcttaggatcargagacaaaatacaattcgtattctctacttagagcttatcattgtagattcttgttaagtaaataagtttacttgataaaagtaaatttgtgcacttaacttaccacttaaattaccaacattcagtttaggtgtttgctttgtgaccttgagcagattacttgagttgtttaatgatttgtcaagtgaccttaatcatacaatgaagaaataatctaaaaaattacagtataactccatttgcctgtgtctttgacacattcaaaagtggctctctcccctgccttttttttttaatccccagcagggacagtttcatgggaatggaacctctgcagatgcatagagccccatgcttgtgttaatattctgttgttaccaacttgaaattcttaatagttgttgtttttttttttttttaacaaagggccctacatattttccatttactctgggctcatgttatgtagcaactcctggtcctgagaaactagttatcataatcgattgtaatatgccctgaatagtaattgtcctatgttatctaagtgtgtgaccctataatctttgcaattgtagaagaaatctttgtaggcagattttatttcaatatattttagtgagggaatgtaggtaacttgggctaaaatgttatttcataatagatggttttaggggcttaccatttaatcaaaattttatcattttagagcataaaagtactcgcttaaatttttttttwaatcttactagatgaaatgaattcagagcaggatttaactcattgtaccattacaggttatcaagttatacccaaccagcagcaaaactaccaaggaatagttggagttcagcaaccccagagtcagagcctagtcagtggccaacccaacagcattggaaatcagattcaaggagtggtcatcccctatacttcagtgccaacatatcaggtatattgtctcttttatgtactttgggtagagatgatttcgaataaattaagtgcacaactacaatacatcttctatgctctccttttaatacaggaaaaacayttctgtaatatacaaccttttaatacaggaaaaacacttctgtaatatacaactttatagtcttaagagttttattagtcgtagaagcttggttttatcctcattttattgcattattcatttrttaatgtttaggatctgaaacacattgatattggcaagttaatattgtctrgcattgtcttatgtttccagcaatataggtagatgagcaaatgtcttattctattcctcagctctttagaaagtcctcattgctgggagagaggaataggagggaaaatagaggttagtggtagatatttgaaatagtgagatacagtatagaccatgaatccgtagttgtagaatagggaagtatgtgcagtttcctgtgctgtgactgatttttttccttcctctccatcccaaaaagcgatgatatgtctcatattttaaattgttgtagatattaggccaggcacagtggctcacacctgtaatgtcagcatttcaagaggcctaggcaggcagattacttgagatcaagagttccaggtcagcctggccaacattgtgaaaccctgtttctactaaaaacrcaaaaaatagctaggcaaggtggcggggcctataattccagctactcgggaagctgaggcaggagaattgcttaaacccaggaagtggaagttgcagtgagtcaccactgcactccagcctgggcaacaggcagactccatctcaaaaataaaaacaaaatgttacagattttaatttatagttctaaagcagaaatacctattatttgatgaataagcacgtgtcttcaatataatatgacacatttttcaaaaatttgttttacctttatatttatggagtaacttgcaagagggtttattttattagcctcattgtttttcatagctgagtctgattttaagaactccaggccagggccaggtgcagtggctcgtgcctgtaatcctaacactttgagaggccaaggtgggtggatcacttgaggtcaagagttcgagaccatcctggccaacatagtgaaaccccatttctttgaaaaatacaaaaattagccaggcatgttggaaggcacctgtaatgtcagctactcagaaggctgaggcaggagaatcacttgaacccgggaggcgaaggttgcagtgagctgagattacgccactgcattccgggctaggtgacaaagagagactcagtcacaaaaaaagagagaactccaaagaccactttcattcatctcaacaaggagagaatagcctagttgggaagatagggaatagcctagttgggaagataaaatacacgtattttgtgtattttatctgaacacatgtaaacaaattggtgatagtgtacagactagtaactgagaggatcatgaaatacagcaatgaacaggttaaggacttgatttgaagccttctgggaagttagaaacctttagctcttcaaagaaaatgatgggcgtaaattggttaagatgacattctgagaatgaagaaggatataagcaaaggtgcaagcatattccatataatttcagaaaattgaaattaaagtgtgaaatgtgaggttgtcaaatgttgttgagcaccaagtgtatgtccacttttgagaaccctttaccatagaacacatctacaaaagaaagaaaagatacttcatgaaaactgggctttccatcttcattttctctcacatcccccatgcttctgaccccttctcctccatccttgagcctaggcacatgagcctgcccttcgtctgtttccccatagttaagcattaaacaggattgacaccaagcctgaagccttcctttctcaaagactctggttctactatctaatccaatacagagttcagcatgtaagatctgcccttaatctttgggggcttacatctagtaagagaaatgtcatttttaaacaaattacagcctaattagtatagtttttttttaattagctggatattgaaaatattccagagctaaggtagtggtcataatttttacaccatacatttttacattttaacattattttctcattgtatttaatgtaattctcacattggctgaatattgtaggaagtattgctctggccagcaatcaataatagtcatctgctttaaagtgtggctcctactacatttgataaacaagctaggtagtgataaactgttatctaaaaaataagccagaaaagtcatctgtcctacacctcctgagtcagagggcatgggtttgaattctgactttccctccagtgtattctatgcctgtacactctctagtagtggtcggtcgcttgctctctctcgctcgctctctctccccctcyctccctccttccttctctttgtttttgagacagagtcttgctctgtcacccaagccggagtgcagtggtgtgatcttggctcactacaacctctgcatcccaggctcaagtgattctcatgcttcagcctccctagtagctgggattacaggcgcatgccaccacgcctggctaatttttgtatttttagtagagacggtgtttcaccatgttggccaggctggctggaactcctgacctcaagtgatctaccctccttggcctcccaaagtgctgggattacaggcatgagccactgcacccagtcagtcattaccttttaaatcatagagccaggtatagagaacagtgaagtgattctagaactgagtttctggagccacagggtttgaattctgactttcctacttactaatctaaggtcttatagctagtaagtgggaaagtcagaattcaaattcctgccctgtatttacccatctataaaatagatgataaaagtaccttcaggcctggcgcagtggctcatgcctgtaaccccagcactgtaggaggccaaggtaggtggatcacctgaggtcagaagtttgagaccagcctggccaacatggtgaaaccccatctctcctgaaaaataccttcttaggttgttcagaagccttaatgagataatacacataaagcacttagaacagaacttaaaacatggcaataagtacccaataatgttaaccctccctatcattactattattaacgtcatcatcatcatcagtggttatagtggttayactggcttgcttttttttttttttttttttggagacagagtctcactctgtcacccaggctagagtgcagtggctcattctcaactcactgcaacctccaccttctggttcaagcaattcttgtgcctcagcctcctgagtaactgggactacaggcacgcgccactactcccggctaatttctgtattttagcagagacggggtttcaccatgttgtccaggctggtctcgaactccagagctcaggcaatctgcccacctcagcctcccaaagtgctgggattataggtgtgagccactgtgcccagcccggctttcyttttttttttttttttttttttttttttaaataaagatccttcaggccattgaatatacattggctttatttaacaaaatcactgtaatccaactctaatattgaggtacatttgtaaattaagaaccctttatgcctgtgttgtttctatcttagaaactgtagagtggtagtacagaattgtgttcgtgtgatttcatttagatgatatagaaaacagaactgaaagatacactgtttactgaatgcctactataactagatactttagttgtgctatctcataatggaaataatacctcctttgtaatggaggtggtgtttccatttcttctgataagaagctaaggagcckcagaatagtcacttgcccaatatcacttagatagatggctgatatcacatgtaggtattttaagctccaaagctctcactttttatgacccactgcgtctcactgccatcctgcctgatttttacttagttctacctgaggtaaactgtgttactctttctatatcaaatggccatccttatgtggaaagtttctttttcataatttaaccttttcataatttaatgcatcagcctacagtacatacatttacaaatgctagccagaagcaatagctgacatagaaataaagtggtagtgctgtggctaacaggaaagcctgttggcagtgttagcttatttctgactgctcatgctttaaaagtttatggtggctgctgggtatggtggctcactcctgtaatcccagcactttgggaagccaaggtgggcggatcacttgaggtcaggagtttgagatcagcctgaccaacatggtgaaaccccatctctactaaaaatacaaaaattagccrggcatggtagcgcatgcctgtagtcccagctactcaggaggctgaggcaggagaattgcttcaacccaggaggcaggggttgcagtgagccaagattgcaccactacrctccagcctgggcaacagagcaagaattcatctcgaaaaaaataaagtttatggaggttgaaaacataaacatttacaaggccttgaaaaaaacctttttctcttgaaattgtctttcaaattttaggtttcactgcctcaaggttctcaaggaattccccatcagacttatcaacagcctgttatgttccctaatcagtctaatcaaggatctatgcccacaacaggaatgcctgtttactatagtgtcattccacctggtcaacaaaacaatttaaggtgagtatgactgagtaacctaatcttccagcttctcattgtttaccaggattatggtctgttgctagttttaaagttgactaaggggcattacttgagaacattctctaatgtagaatagaaaaaaactataatacagtatactttttaacatatttctttcggctaggtacggtggctcacrcctataatcccagcactttgggaggccaaggctggtggatcacctgaggtcaggcattcaaaaccagcctggccaacatggtgaaaccccgtctctactaataatacagaagttagctgggcaaggtggcgtacgcctgtgatcgcaactgctcgggaggctgaggcagcagaatcttttgaacccgggaggcagaggttgtagtgaaccaagattgcgccgttgcactccagcctgggcaacaagagtgaacttctgtctccaaaaaaatatatatgtatatttctttcagtaaaatcagtacaaggaaagcagtccatataaaagctaaaggcaagtcagatctctcttgtgcctaaaaattaggccaatcttctgttactcacacaratggagtaacagttggagtgtaatatttaaggtttttataggggtctggaaaaattgtatttcctgtgtataactttagcagtgaaatatcttgctggaatatttcaggctttgggaagctcatttttcatcagtaagggagggaaggcatgtaagagaagtaaatgatagtagttctacattaaagcaagtcatgaagtattccatcaacagaaatgtctctgacaagccatgtgttgaaaatactaatctttcattgaattgggtccctttagttcattgttcagaatgtattaccaaaccattcatttattctcatggcatccctgtgttaccaagcaagtccattctgcctgcgtatagcaagccaatcactgtgacaacgggttttgcaaaagagaaaatattttattcacaaggctgcttgtgaaaggagatgggaaaacaaatctcaaatccgcctctgaaaatagggcttgtgggtacttaattttaacattattttctcattgtatttaatgtaattctcacattggctgaatgattgtaggaagtatttatctggccagcaatcaataatagtcatctgctttaaagtatttaaagtagggtggtctaaagygtgagaaaatgtgattgatgggtgggaaagttgattggcaggttggaaaaatgaggtaattggggtttctgcacaagcataatcaagctacatggttcttcataggacgtgtgtgcagaaaatggcgttagcatgatctgaagatggagtagttttaggccctctgacgccaaaaggtcactctctgggcacctgtgcaggcctagttaaagggttcatgatctcaaccagcttggactggacatgagctgccccctggatcctgaaaaacagctttaaatacctgttatatagttacccacagtcagaaatgttatctataaggaaaacagtgggagtttagttatatacttcttggccacatgacttgctagtgggagttttaagattagctaatcccagcccctttgatgcaaaactgctacamaatgaaaatagaaatatgtacttggttaaatttcgcatttgttgtgtgagtttaaattttataaataaggaaaaaatactccgaatctgagttttttaccctgataaatctaagtttgggatctagaatgccagttcagtttccaaactgtcagttagaggcagaaatctgtgctaaagtagggtgaaatgaggagtgagaaaattgatgatttatctactttttgaaccaaagtttaattttttatttaccagagaatattgccaaagtcatcatttctatgtgggkcagaggctgagagatgggtattaagttacctttgtaggcctgcctactgggaagaggggctttcawaagggaaggatatcaagcctataagaacctatgtaagatggcttaggctttcacaatttttcacgtttgttgtacttgtcagtcccttgaaacaaaaaagattttgtgtgcttgacttgtgagagagcttgccataagagtgtggatacaggtgagagagcataattatgttcctgcccctatagtgagccttattttaagcataagagcagaatccaaaagctgtcaagcgagtgctgatgactacactttggaaagatccttggttttagtccctgggcatgcttcacaaagaaaataaaaaatttttaagagctagctttggcctgagggatagcctgcagcacagaaattaaaagatagatgagattctccaacaacctccaatgtgaatcttgattaaaagtttttggtgttgggcatggtggytcacgcctgtaatcccagcactttgggaagctgaggcgggtggatcacttgaggtcaggagttcaagaccagcctggccaacatggtgaaacctcaactctactaaaaatacaaaaattagccaggcgtggtggcgagcacctgtaatcccagctactcgggaggctgaggcaggataattgcttgaacctgggaggcagaggttgcagtgagctcagattgcaccacagcacttcagcctgggcaacagagggagactctgcctcaaaaaaataaaataaaaaaagtctttggaattacccgcagcttggacccaaatgaggcagataaacttgaaataaggtagatgtaagctgacagtagtgattggtcaccatgtgacaaactagcattgatctgttccaagtatagagtaccaatgtgagaaattgaatgagttgtacgtgaagcagggaatgtgtattctgtcagactcatcttggtacattttggactagttacttggtaggaagtcaagtcatgtacagaattaaagttctctgactggctgcagtggctcacgcctgtaatcccagcactttgggaggccaaggcaggcagatcacttgaggtcaggagtttgagaccagcctagccaacatgttgaaaccctgtctccactaaaaatacaaaaattagccgggcgcggtggtgggtgcctgtaatcccagctactcgggaggctgaggcaggagaatcgcttgaacctgggaggttggggttgtagtgagccgagatcatgccactgcactccagcctgggcagcagagtaagaacctatctcaaaaaaaaaaaaaaaamaattcattaaagatctctttgggtgaaaaaaaattcataattaactgattaattttttaaaacatagcagcattctttacagaaaatgtcatttctgcttctgggcaatatttagtagacaaatcaccataatatttcaagtttacttggaaccatcacttaagaagtcaactattggtaatttttattaatcagatagttgaattaccatctaagggctaatgaatagaggcaattcagaaatctagacttagtggcttatataaattatattttatcctacatatttcagtatatttacatgaaaagcaggggttgatctaattactgaagcaccagctgggcatggtggccaggtaacagagtgatactctgtctcataaatacatacatacatacatacatacatacatacatacatacatacatactcaagcacctggaacagggcctagcatagagtcagagcttggtaaatctatactgaatgaacatatttcttttgttttgttttgttttgtttttgttttttgttgttgagacagagtctcwctctgtcgcccaggctggagtgcagtggcacgaactcagctcactgcaagcttcacctcccaggttcacgccattctcctgtctcagcctcccgagtagctgggactataggcgcccgccactacgcccggctaatttttgtatttttagtagagatgaggtttcaccatgttagccaggatggtctcaatctcctgacctcgtgatccgcccaccgtggcctcccaaagtgctgggattacaggcgtgagccaccgctcccagccgaacatatttcttaaatgtcaaaggccagcttgcacatgtgtatatgtacatagacatcattaactgttggactcaattttattttgtttctataacctctctatgctttttaaatttttcatcaatttttaaaattacaaaacaaataatgctgttaatataagtgaagcaatacagagatgtgtaaagggaaaggtaatcatcatgccctgctccaccccccatccccaggtaaccagcattcacaggctagggtgtgttctgtcacattggcctcctggctacacaaacaatacacgcataaatactcatatgaggaattgggtggtgagttttagtgaaatacacattctcttgckttttttttttcttttccattttattctttgtttttgaggtgtctcactctgttacccaggctggagggcagtggcatgatcatggcttactgcaaccttctcctaccaggctcaagcaatccttccacttcagcctcctaagtagctgggaccacaggcacgcaccaccacactcagctaattgtttatatttttggtagagatggggtctcactatgttgcccaagctggtctcgaactccaaggctcaagcagtcctctcacctctacccccaaagtgctagggtaacaagcatgagcaactgctcccagcctgcatttttttcataataatgtatcatgaacatcagattagtaaatactagtataaaacatcctgttttgtttttctaatttcttgacaaacataattttatataagtaatattatgtcatcctggcagttttttattgtcctaaccttctctctccctaccctaccactggaccatttcccacacacacacatgctagttaacccgtgtttctctcctggtttctgtccttccttcctcactttccttcttgtgcttattcatatactaacacagatatggtacggcaacatgaacaaaatagcacacatacacacactcaaattgagtttataaatagttttgaatataaaatgtctacaacttggttttggtttcttgtaggagcatatcatgtctgacatgtgatgggagaatccattcacatttaatattacaactgatataccgaacttttttccaccagcctgtatttgtttgtgtatttcaccacactgtacttgtaactgatgactaattggttagtcttctgctgttttctcagatatttatctgagaaatttctctaaatacatgctatattcattgagactcttcatcatggaatcccactgatctgataccagggaatatgctggtccaataagctaatttttcagataactaaaactcatgcctttaaatattagttattaggtggcatgatatggttagaaaaatgggctttggaatcataaaaacctgtcttcaagccagtgtgaccttggacaagttatttatttgtacttttgttttctcatttgtaagacagaaataccttccaggactggtggaaggaattacatgtctagaactttgtatatggaaactgcaaatttgccagctgtatatctgatatccaaaatattaaggaaatcctgtaattcagaaaaaaaaagggttaaagagttgaatagaaatttatccagagaagacatacaaatggcaaacaggccagagaaaggatgcttgatatcactaatcattagaggaatgcaaatcacaaccgtaatgagatatcacctcacacctgttaaaatggctgttatcaaaaaaatcaaaagctattaagtattgataaggatgtggaaaaaagggaacccttgtaacactgttgttgggaatgtaaaatggtgtagctgctatagaaaacagtacagaagttcctaaaaaaaataaaaatagaactatcatttgatccagcaattccaaatacttctagatatttatgcagaagaattgaaatcagtatctcgaagagagatttacatctccatattcattgcagcattattcacaatagccaagatgtggaaacaacctaaatgtcaattggtggatgagtggataaagaaaatgtggtatggctcattcctgtgatcccaacactttttgaggccaaggcatgaggatggctcgagcccaggagtttgagaccagcctgagcaacayagggagaccccatttctacaaaaaatttaaaaagtagctgggtatagtgacaaatacctgtgaagctagtctactcaggaaactgagttgtgggaagataacttgaacctgggaggtcaaggctatagtgagccatgattacgccactgtattccagcttrggcgacagagccagaccctctctgaaagaaaaaaaggttatatatgtactgtaatggaacattatttagcctttaaagatggaaatcctgccatatgtaacaatgttgatgaaccttgaggacattatgttgagtaaaataagccagtcacaggacaaatactgccttattccacagtatgacctctaaaatagtcaaacttggctgggcgcagtggctcatacctgtaatcccagcactttgggaggccaaggcaggtggatcacctgaggtcaggagtgtacaccagcctggccaacatggtgaaacttcatctctactgaaaatacaaaaaactagccgggcatggtggtgccggtagtctcagctactcaggaggctgaggcacaagaagcacttgaacctgggaggcagaggttgcagtgagccgagatagtgccactgcattctagcctaggcaacagggcaaaattctgtctcaaaaatacagaaaataaaatagtcaaacttgtagaagcagagagtagaatggtcattgccaggggctgcagggagggggaagtggagagttactcttcagtggatataacatttcttttatgcaagatgaatgaactctggaaatctgctatactacattttgcctatagtcatattgtgttgtacacttgaaattttattaaaagggtagctctcgtgtwtaaaacaaacaaaaaaagaaaaacagttatggtgtctttgaaggatttgtgacatccattttaatagttcacatgtctttagcacttaacctgtttctgagctctgttccagatcattgtaatgagtgaatacttctccaaaaagcaagtatgaaagcttgaagaaatcatagagaatcattagtttatccttaaagcaacaaatatttttattttggctcttactcccaattagactaaatgtagtaagatgtgaatttttttagtgtgacttttttcctgattaatatgttttctgtgtaacatgaatctacgtcattgttcttttctggctcgtcaaaccaataccttttcaatgacactacctttttgggtttaagaaaagttatctttttgtttacctcactgaatttgaagtctacatttttacaagaacactcagctgagaaatgaaaaataaatcacattaattttcagagttacataaagaaaaatatgtgtagcagattctcagtatttgtagactttgtatttgcaaatytgcctatttgctgaaattatttgtaacccctaaattgatacttattgtactttctttttcattcgtggacacgttcagtgtggcaaaaaagtttgaatcatcaggcaagcacattcccatctgaggtcaaacaaggcacatgctgcctccctgtttcagttcttctattataaacaattgtccttttcagtctatttagtgccacgttgttcacactttttgggtttttgtttgaaatggctcccaaacaatgctgattttctgtcttgtgttactaagcacaagaaagctctgctgtgtgttcaagcatgrgttggtactggccatcagttcagtgttaacraatcaacaatacagtacatccagaaaaagaggaaattcacagatgtgtatgtgaggccactctagaaagtcctaaaataacatccgaaatagatgacaaagttatgaaaaagatggaaaggcagctggattggtggattcataagatgatgaatgagtttatcttcctgttttgggggattttttttttcctttctcttggcttctcaatatgataaccaagtttttaaaaaaccatagtggacagcattgttgtgaaactgaaagccaaagaaattcatgatcatgttacccagggtcaggaaaatggtaaacactcctcaaatagtgttttgttatcaagaaatactgcgaagggccaaggacggtggctcatggctstgatcccagcactttgggaggccgaggcgggtgatcacttgagaccaagagttggggaccagcctggccaacatggtgaaacaccatctctactaaaaatacaaaaattagccaggtgtggtggcgggcacctgtaatcccagctactcaagaggctgaggtaggagaaacacttgaacccaggaggcagaggttgctgtgagccgagatggcaccactgcgctccatcctggatgacagagcgagactccttctcaaaaagaaatactgcagagtttttacatttctagaatctcatttgtcttcacagtgtccttctaaaaaggataagaatatgtatttgtttttattttacatgtagacactatgaaatttcaaccctatatatcttcatttaattggtctggccctgatcttaagcctgagcaacattattttttgatgccctccaggtgattctagtgggagccaagaattgaaaccctctggcctacactaaccagccctttagtctggtttttattcatgccttcagctgtccacaagtagctatagcccagtaaaactttacacattagcagagaagtcatgatgtctatcactgtttattagtagattttcatctgaaatccagtatcctgacataaaactataaattactacatatcaacaagtttataaatttctagatcttagatggaaagtgtatcttaaactctaggttacagggtcttgatccatacagtcttactatgttttagatgctaaatggactctagtagccttcattttattacaagattataaggaataagattcctataagaacacaaagtgagtctttgttttgaaaaatgtcttacttagcttgggttgcttagcaaaattgttttcttacagaggttccttgtgtagaaaggtagaatttgaattattatgtctactttcagctcatcctttcagttcactgaggcaactttgtgtttggattggattgtgttgttacttatcattatgaagattgagcacagcctgatacaagtcaacatatactgtcactttaagcgagcaaagtactagtcagggacactaattttacaacaactcatgagatttttctcagtccttagtgtggagagaaaattagtttgataccagcagccttcaaaagtgggcaagtgagttggatatcttcaaaatgctctcatttttaccggttcttctcctattttccctttcattttcactatttttatcttgaaattcaaaacgataatacctttgtctttgatctatattctcaaaggggtagcatacagacaggaacttgaaaagactatagcctttttttaagaacctttaaaaaatgtttcacagaatctttatgaaattatgaaaaagaaaacctacttttaagtctttttcccttttttctgtccacagtctgtttttcctcayttttgtatcctagtatttctctagtgtcccttttgtcctacttgtgatacctctcttgtattcattttatttctcctaagcttctagtttgacattttcagttttttgtttgcctcagctatcctttgaaataattgttgataataagtctgtcgatctsaactatatcttttggtaaagttttacttctctcgttattaaaaatgaagttactaacagcttagagaaataaaatgtaataaataaaattttgattttgcaagataagttcaagagatgtgctgtacaagactttgtctacagataaatattgtattatacacttaaaactctgtgaggatagatcttgtgttaagtgtttttacaccaataagaatatgttttaaactgagcaaaccaatataccctacagcatatctgcactgataacctatgtatgattttgtagcactaacagaatagatgaagaaagatactgttgaaggaataaaatgtaaaagaaaaaaagttactttcactgctaaaacattgccttttcagaacattcatttcttctttagtggatataaaagaggttttttttgtttgtttgttkctttttttcttttttaccatttttgtgggcatgtgtttattagcaaaatttattagtaaattgttttattcaccaaaaaatgttaaaggagaagggaagagggtgctttagctatttcatttttgtgaactcaccaaaatgagtgataatggtaatactttggatttaaattatttaggtacctttaaggaataggagaggcaacatttcatgaaaaaacctctttatccataattgatcacaccgagtatttgtggtgcttcctcagcctctcaatgagtttctgtttttgaaaaatacttctcttatatctgtattttgtctattaaaacagtctttcctctatgtaccttgtttaggtctttctggttaaacatacatagtcattgtagaaaatttgaaaatatttgaaatttcaagtgtttgatgacaaatcaaccacagccttagcacccagaaataatcactgataaattttgatgtacctcaccaaagtcatttttcagtgtgcatacatatatatgaactatgttagcaatcaaattttttaacattttattttatactttgtaaaaactccattattaatttttcttttaggctgggcatggtggctcatgcctgtaatcccagcactttgggaggccaaggtgagtggatcgcttgagctcaggagttcaagaccagcctgggcaacatagcaaaaccccatctctgcaaaaaatacaaaaattagctgggcgtggtagctcatacctgtggtcacagctattcaggaggctgaggtrggatgagcccaggaagttgaggctgcagtgagctgagatcaaaccacttcactccaacagagagaacccctgtctccaaaaaaaaaacagaagtaaagagattttctttttaaattaaatatataagctggatttggtggtgggcccctgtaattctagctacgtgggaggctaaagcaggagaatagcttgaacctgggaggcagaggctgcartgagtcgagattgtgccactgcactccagcctgggcaacaaaacaagactctgtctcaaaaataaataaataaaacatatataaatatctggagttaaatagtaaaattctacctccattgccctttctggaaagcagtcactatacaccaatataatcactagagtttttgtttgtttcttttttttttattttgagatagagtctcactctagcccaggctggagggcagtggtgagatctcagctcactgagcaacctctgccctccaggttcaagcaattctcctgcctcagactcccaagtagctgagattacaggctgccgccaccacacctggctaatttttgtgtttttagtgtaggyggggttcaccatgttgtccaggcaggtctcgaactgaacctcaagtgatccgcccacctcagcctcccaaagtgctgggattaccggcaagagccaccacgcccagccatttttttttttctaaggtgaagatcagtgttgtttttgtttgtgtcatgtggagtctttatgaatcttttattctgcaattcgcttgtcttattaaacattatgcttggccgggcacagtggctcacgtctgtaatcccagcactttgggaggccaaggcgggtggatcacctgaggtcaggagttctagaccaccctggccaacagggcaaaaccctaaaaaatacaaacattagctgggcgtggtggcacatgcctgtattctcagctactcaggaggctgaagcaggagaatcgcttgaacccaggaggcagaggttgcagtgagccaagatcacgccattgcactccagcctgggccaaagagcaagactcggtctcaaaaaaaataaataaacattatgcttaaacttttttccatagagcatctgaattttaggttaggatagaaaaaaattagtttgagactctttaaaaaaaaaggccaaaaattagtccagtagcggtctttgaagtgaacttgaagtgggaagaacccccaggcagaaggatatcgtattatgtgcatcaggtggtggcaccctcagctgtggtagtggcagtaggagggggattaatctggggtgcactttgaaagaagaaacaaatattttatgttaagtgaggattaaggaaagatttgagatatcttaatgggtaatgccccactagcagcaatacatgttgggattgaaaatcagtgtaactgttatttgggtatcatttactttaacatacctactagatctaaggtcggcagactttttctgaaacacgccaaataggaaatatttgaggctttgtaagccaaaatacagaattgtggattctatttaggtatttatataacaaggggaaaaataagtttccataaatttttattgctaaaattcaaaatataataatgagcacaatggatttattttgggtggcagataacattttacttaattggggttcaaagttagtgttctttgtcatcaagttgatttcagatgttcatctgtaaaaaccattcttagcttggaggcaatacagaagcaagcagtggtctgggttttgcctataggccatagtttgccaactcctgtactagatggttgatagccagcaaaaaaaaaagacaaagaggcagtggtcacaaatgaagaccaacaacttaggaaaaaggagtgtggaagccaacatacaaggagatttcaaagattaatagtcagatgttgtagggggtgaggaaggaagagagttgaagaccattaaagggaataaaaaacactggctgtgaccagaagaggtcatttgtaaccttgagatagtatgtggtaaagtaaaaaggactcttaagaaaaaaataacaagttcagatggttcatgaagtattatggacaaaaggtcatagtatttattcaaaaagaggaaagatgtaactactttgaaaactagaagagaaagaactaaaggagaaaagaattcttaggccaggtgcagtgactgacacctgtaatcccrgcactctgggaggctgaggcatgtggatcatctgaggtcaggagttcaagaccagcctggccaacatagcaaaaccacatctcctaaaaatacagaattagccrggcttggtggcacccgcctgtgatcccagccacttgggaggctgagacaggagaatagcttgaacccggaggcagaggttgcagtgagccaagatcacgccattgcactccagcctggggaacaagagcgaaactgcctcaaaaaaaaaagaaaataattaatttaacatgagacaaaaaggaatgattctctaaatcttccctacctacttttgaattattcttcagtttagatttttacagyttttattcctcaagtaacttctaaacttttcccaattgtttttaaaawtccacagtgactatttttactgcctaaggttttgaatggctattgccaaacttgctgttttagatatttcttgaggccacaagcaacctatataacaagcagtcccctgagataggccaacccagtttacaaggtagaagaggtatgtgttggaagtgtccctctagcatatcctgtgtattttattttttgaataatttccaggtcttgggagtgtgctgactttggcatcttacgtggtatcagggacaatatgagggatattgaagaaaggatctttaaaacttgcatcctcctgacttctgtttttagccaaaatggagtaatatagactggatttaactcctaccttaaccaaaaagccagaaattatgtgaaacagtagtttctagatattggacatgggacattgaagaacagtaaaccctgagagggagaaacaaaagaagtgagtcttaggattgccccagcttagtgccacaagaatgtttcccagacacagctcagggagggggaacccaaccagagtctctgagttaggagatggagttgggacttaaggaagccaaggtagctagagtttacagggcagaatacygaagagaagagagctctagagatctctggagggacctccttgagtcttagttgaagagattggtgcatatgtttgcaaamactacttgaggccaggaaaagaaccactcaaaaggagcagacacaaacaatccctggaactcacccaaggacagtaatcatttgtagtcctaccagccactggcaaaacttcataatacaggaagcaacaagtagaggacttaaaaggacactatctcaatatggaggaaaattggtcctagattaaaggctgctctgtttggctctaagcttcctgttgcccgccccccaaaagcatttaaaaacaaaaggctgctgtcgtcctgcctgaaaaatcataaaagcaaaacccaaaagaattaaattatttccagacaagttaactrtggtccagaacaaagctcaaaaatactgttacaaattacaagagtatccaacacccaacaaggttaaattcacaatttagtcttgactccaatcagaaattacctgtctccaatcaaaaattactgagaatgcagagaatcaggaaactaaggctaataatgaggagaaaaatcactgagttgaaactgactgtgaaacaatgccagtataaaaatcagagagggaaaatgattaacaaagcatcattgctcttaaggggctaattcatgtgtaacaggcatcctcaaaagagagaaaagggaaaaaaaatatttgagtaagtgatggttgaagtttttcaaaatttgatgaaaattataaacccacagatccaacaagctcagcaaatccaagcaaaagaaatgtgaagaaaacatcttaaaaagttatagagaaaatcttaaaagcagccagagggggaaaagagccattgcatacagaggaacacagttaagaatgtcagccgacttagaagcaatacaagccagaagacagtggagcaacatctttatttgaagaagtgaaagaaagaaaacttgcattctatacctgtaaaaatatttttcagaaacagagatttcaaacacacaaaagctgaattaattgccagccacctcgcactgtgagaactgttaaaggaagtttttcagacagaaggaaaatgataccaatggaaattggtggtacacaaaagaatacaaataaaaggtaagcaatatacaggcttaaaaaacaaatatatttttgtccttctgacaagggctcgtgtgtataataaatcaagaattctcaaaccaaccacctggggaaacagtttgttttaaacgttaaacccaattattccacttccaagtatttaagaaaaatgaatactagaagaaacccaaatgtccacccacaggtgaatggatacaatccatggtatattcatcagtggaatattacttagcaataaaaaaagatctgttgataacagcaacatggatgaatctcataattatcctgagcgaaaaaagaaaaaggccaaaaaatatatataaaccacattattccattgatattatagaaaataacaacctaatctctgttgacagcagacagatcagtggttgcctggagccaggaggctgggaagagtttatggggaagaagggaaggtgggactacaaaggggcacaaggcaactttggtgaggctttatggtgtgcatatacataaaactctttaaattatatactttatgtgtggtttattttctataaattatacctcagtaaaactataaaataatctgagtcttaaattttttcttaragactggttcttgctgtcatttaggctggaatgcagtggtgtgatcctgactcactgaggcctcaacctcctgggctcaagcaatcctcctgcgtcagcctcccaagtagctgggactacaggtgcacgccaccacacctggctaattttttaattttttttaaagataggatctcactgtattaccctgctggtgtcgaacttttgggctcaagcaatcctcccacctcagtctcccaaactgctgggtttacagatgtgagccaccttgcctagccttcttttctaatagtttaaacaaagactagttttggataaagtgaaaagaaatactgtaaaactaacaaattattaaaaacaagagtaagaatttgtgaggttaagataggccacmgggcatttaatggaggaataaaggtagacttgaactaactgtaaaacctgttacagagtcatattgaaatgttaaaatttaatcaaaagtgtttttttcaaaaagcaaatgactaaaaactcctttcagccagaggtgagagatcggggggaaacaaaaaaacaataaaaagaaagtccaaatacctatgttgcaccagcctgaccaacatagtgaagccccacctttactaaaaatacaagaaattagctggaagtggtggcatactcctgtaatcccaacaaaatacatgtaaaacctttatgcccaaaaccatcttgtgatgtggaagatttgtactccctatggtttatatcttagaacagatgtcagaaaactacagcccacaatcaaagaatggtttttaaatttgtaaaggattattattttttaactcctaagtgaccatgtgttactcagagttaaaatatatactagctggctcttgcagaaaaagtttaccagcatctgccttaaaaaaaccttggcagataggtatcagagacatgtttatgaatgtttgtagcaacaatgtttagcctaatactggaagtaatccaaataaaatggaatagaatgtgtaagtatattttgatgtattcatttcagacactactatacaacaaagaaaattactaaagtacaactacttgtatccaattggttgagtctcacagatatgatactgagtaattaagaaacagtcataaaataatctattattccatttatttaggatcaaaaacagtcaaaactcaactatgttcttttgggatacatrtatatgtggtaaaattatacaagaaataaaaagcaagtaagtactggttggacaaagtgggtcacgcctgtaatcccagcactttaggaggccaaggcaggcagatcagttgaagccaggagtttgagaccagcctgaccaatatagtgaaaccccatctctaccaaaaacaaaaaattaaccaggcatggtggtgcatgcctataatcccagctactcaggaggctgacgcataagaatcacttaaacctgggaggcggaggttgtaatgagccgagatggtgccactgcactccagcctgtgtgacagagcaaaactctgtctcaaaaaaaaaaaaaaaaaaagtaagtgctcttcacaaaactggtaggagggggttttgatgttagaggtgcatgagacgggaaggcagggatacttcttttttttcttctccctttttttttttttgagacggagtctcactctgtcacccaggctggagtgcagtggtgcgatgtcggctcagtacaagctccgcctcccgggttcacgcctttctcctgcctcagcctcccgactagctgggactacaggcacccaccaccacgcccagctaattttttgtatttttagtagagacggggtttcaccatattagccaggatggtctcaatctcctgacctcgtgatccgccctcctcagcctcccaaagtgctgggattacaggcatgagccaccgcacccagccaaggcagggatgcttctaagatactagcaatgttctgtttcccaatctgaatgaagttacayagataattattttgttattatacttaatttaaactgtaatatatttctaagcactctatattcgtctgttctcgcattgctataaagaaatgcctgagactgagtaatctataaagaaaagaggtttaattggctcacagctccgcaggctgcataggaagcatagtggcttctagggaggcctcgggaaacttcaattatggcagaaggcaagagggaagcaggcacrtcttacatggctggagcccgaggaagagaagagtggggggagcaccacacactttttaaagaaccagatctcatgagaactcactgtacagtaccaagggggaatggtgctaaaccattagaaaccacctccatgatccagtcacctcccagcaggccccacctccagcgttggggattacattgtgaatgagatttaggtggagacacacatccaaacaatattacactcagatagatagatagatagatagatagatagatagatagatagatagatagatagatagatagatwagatagataagatagattgattagatrgattagatagatagatagatagatagatagatagattagatattccaaaccccaaaaaatagcaaaatcattcgaagagaggcctaaatatatagaagactttaggagaaaaaaagctaacagaatgggaggagaggaattgaagacaataaatagagacagcctttgaagagaattgctttcataaggataagcgttgaattggattcgtatatggagaggatgaagtcaagacagaggatccttttttgattgaaagatagatgcatgtgtttgtatgctgaagggaaaggcttagtagatacagaagatttgcctctgcaagggacaagagagagagttgtaaggtccccagggagggtgagagccaccacaaaaatggaagcgggttagccttagataacagtgcagaggatttcatgggcagtaaacgaggacaaggagagtataaggatacagatatgggtagatggayagatatggcagcaagagaaattctcttctgattgctttgcttttctcagtgaattagtcaagatatcaagtacattatcagagtagaagaatgttctaaagttttgtaaatgtagaaatccattacagctatattaagactaatattcaaaggaaagaagcaagatacaggggaaatgtgacaagtatgcctaataaaagcttattatatagaacatttttatcacttctctatgttctaagatggtaacagtgagactacaagtaaataatccatagagataaattgttactcgaagaaaactgatagtaagttttcacatgggaaaatgttgtcttaccagcaatccaaaaaatgagaattaaggcaacttgaacacaaaaagtaggctaaaacatatagttagcaatactgtgcatagagacgtttaaacattactggttgctaggcatatcaagcccatttttctataaatcagtcgggatatttaacaaaatgcaaaattgctgtacttttaaattctacctctaaaattttatcacaaagataatccaccccagaatttaaattgtggctaaacaaattataacagtgctattattaacataagaatccaaataaaaagatgcaaaaaaaaaaacatggagtaacctggtaacctttgaatagtttaaattttcttctccatttatttttctgctaggctgattaagtttagcttaagtcatagtgagatttacttagttgtcacagaccgtttctcagatagtgggaccagtgagttttaaaggkgtttgttctgtgttaattgctccagtatcttcaattcagaagaataaatgtttgatattcaggctgctatagttcacaaatggattttattgatgacttacagcattttaagtgaatagagcacatgtctattaagtaatattattaagttcaggaagcttgcttaactgccattgacaataagatgtagggtggtttaaaaaggcagaaaaccaaatgacttaacacaccttgacaactgttcataaattttcaaagacatcgcttctagtagtcactaaaagctgtagtagatgtatgacttgcttttcaaatgaatcaattattgcttgagaagaatacacttgttcctattctcccatctaaaaaataatttgaaatagcagccatgaaatatttacaaaaacataaagagaaaagacacatgatggcagtttattttcatgtggaatttcccatgctattaattttcctaagtctcgaccttttgtgggtgatttcatacaacaggattttgtaaatacttttcatgtacagtagtcccccttatccagagggtatatgttccaggatctcccagtgaatgcctgaaaccatggaattgaaccctgtatgtactatgttttttcctatacatacatgcctccgataaagttttaatttataaattaggcacagtgatagattaataactaatgatagaacaatgataacaatatactgtaagaaaagttacaggaatgtggtctctcaaaatattgtacattggcctggcacagtggctcacgcctgtgatcccaacactttgggacacagagatgggagaatcgcttgaggccagtagtttgagagcagccttgggcaacataacaagacctcatctctaccaaaaaaaaaaaaaaaaaaaaactataaaaattagccaggtgcagtggtgcacacctgtagtcctagctacttgggagactgacctgataggatcacttgcaccccggagttcaaggttacagtgagctacaatcttaacactgcactcctgggtcacagagcaagaccctatctccaaaaaataataataaagtaaatatatacacatgcatacatataaatgtactcatccttgtggtgatgtgagatgatgaaatgcatatgtgatgagatgaagtgaggtgaggtgaatgattgtaggcgttgtgacataatgtttggctactgttgactctccaacaggatgtcaggaggaggatcatttgattcaggtgatctagatcatcaagtcgtgacagtgttgatagctaaatgtcaggagcaaagagtgtccrtgactaacaggcagcatggatatgctgggcaaagggatgattcacatcttgggcagcacaccatgagatttcttcatgctactcataatgacatgcaatttaaaacttataaagtgtttatttctggcatttttaatacttttggaccatggttgactgagggtaactgaaaccaaggaaagcaaaaccacagataaggggtgactactgtgtgcaccatttttattcattctgccatgtgcttatttatcttgtttttaaacagctctattgagatataatttatatactatacaattcacttaacatgtacatttcagtagcttttagtgtatttmcaaatgtgtgcaaccatcaccgtggtcaattttaaaacattttcatcaccctcagaaagaaaccctgaggtggaagcaactcaagtgtctatcaacaggtggataaagaaaatgtggtatgtacatacagtggcttgagccaggagtttgagattgcagtgagctatgattgcaccactgcactccaccctgggcgacagagcaagacgttgtctcagggggaaaaaaaaaaaaaaaaaaaaaaaggctgggcgcagtggctcatgctggtaatcccagcatttttggaggccaaggtggttagatgacctgaggtcaggagttttgagaccagcctggccaacatggcaaaaccccgtctgtactaaaaaatacaaaaaaatggccgggtgtggtggctcacacctgtaatcccagcactttggaaggccaaggctggcggatcacaaggtcaggagatcgagaccatcctggctaacacgatgaaaccccatctctactaaaaatacaaaaaaattagccgggcatggtggcaggcacctgtagtcccagctacagcaggaaaatggcgtgaacccaggagggcagagcttgcagtaagccgaggtcatgacactgcactccagcctgggcgacagagcaagactccgtctcaaaaaaaaaaaaaaaaaaaatatcaggcatggtgatgtgtgcctgtaatcccagctactcgggaggctgaggmaagagaatcacttgaacttgggaggtggaggktgcagcgagccgagatcgcactccagcctaggtgacagagcaggactcctgactcaaaaaaaagaaaaacatatagagtaaagagatctcagtctaggaacagacttaagaggtggcaaaagagagcagcatagaatcaactatactaaaactgaaattattgtttagcaggtgttttctatcacttcattgacccactaaagtgctgtctctaacagatctgctaatacgctgcttgatgatggctggttcatcctaatgcgctggtcagaatatgccccatctcaagatcagtcattctccaggagcatcagagacatctttgtggtgaattgtgtttatgatacctaccctccaatttctcaagccgaaggcatcttttccattaaatatataatgtagactcttttttaggtttcatgcaaatacttgtttaagtacttaaaaagttcagagctcctttttaaggaatatattagcccttcttgcaggtacttctgcatcctacctatttattaaatgggaaataatcctctttgggcaagatttccagcccagcttctaagtttcctagtaaaacatgaagtatgttttatatgtgatactggaaggctggatttctctataattaactgcatgctgtaaatttattktagaatacaattatgatattctgcaatccagcacctgccagtggcctaactgcttgctttccttatcatcctggcagttatataatccctgggctcaccattttatcttagctgccaagaaacacaaagctacattcaatgctctatgaaagcaacaatcttagggcaggcgtccccactccctttttttaatacttcattttttagtcaaattcagtttttttttaatggctcacattagggaatagatgagctataaattaatgcttttataaatatgagcatttaaccagaaagcccagataaatcagctattagcatttaaaggaaaacccaaaaaatgacacattaaagattttgacatttattttcattaattgagcatatagtcaaattctgattaattgaaagtttatattatactaggtatatataccctcaccacaaaaaatatatataaaatggaaattactatgactttgagaaagcttatgaggcagaaagttggtgttttcttccagagactacaagcctagttgagcatctgacctgcaaatgaattggttatttattcatttatttatttatttagagacagagtcttgctctgttgcccaggctggagtgcagtggtgtgatctcagctcactgcaacctccgcctcctaggctcaagcagttctcctgcctcagcctcctgaataactgggattacaggcacccaccaccacgcccagctaatttttgtatttttagtagaaatgggtttcaccatgctgaccaggctggtctcgaactcttgacctcaagtgatccgcctgcctcagcctcccagagtgctgggattacaggcatgagccgccacacccggctgaactgaaggtttatattgcagaatatcagcataaacatcttcaaatggccatactctgacatctgctgaagttttctgaagcagattcaaattgtttcattgaaattaactttctactataacatttaaaagctaaacttttcagttttcaaaaagcattttaaagtattgtttataattacaaaatgcatgcatgcttttttttttttttgagacagagtctctttcgcccaggccagactgcagtggtgccatctcggctcactgcaacctctgcctcccgggttcaagtgattcttctgcctcagcctcccaagtagctgggattacagtcatgcaccaccacacccagctagtttttgtatttttagcagagatagggtttcaggctagtctcaaactcctgacctcaagtgagccgtcctccccggcctccccagatgctaggattacaggcatgagccaccacacccagcctcttacagagttttaatgtagctgaaatcttactgtatatatttcacttattggtcatagtaaaaattttttcatcctattaaaaattcattaatataatttaatgatcataytcttacattttatgaatatacaataatatatttaccctattgcagaacatttaggtcgtatctttttactttattgaaccatcttgtaagcaattttaattactcccttggcatgagtccttagaagggaattagtaggttaaaggatgtgactgttattaaggtccatggtacattttgccaaaatctttgattcacagtcccaatatgtactgactcygctttactgttttcacatttcataaatggcaacatgtattaatttggctctgtgattattaatgaagttgtacatttttatgtttggctgtttacactttgaattatttggccaaatctttcatcatagtttggtaaggcaagtgctaattgcatgtttaagtgctaatkgcatgtttgttgatgaaagagctgaagttcaaataacatgttcagactcatataacgaataacaagtagagttggaacacagccctgtgctcccttctgacacccaaatacatggtgctttgccctaggtcaggtattaaatgtcaaaggcattaaaatagcaatgtactgtcacttgaatttgcaagatctagtgaatatatcttaatatcaagcattgatattgcttgatattaagcagtggtgggcgcttgtagttagctactcgggaggctgaggcaggaggatcacttgagcccaagtgttcagtgcttcagtaacctatgataacaccactgcattccagcctgaggaatagagtgagaccttgtctgtttaaaataaataaataaataaaatcacactttgataaagtaagtttctaactttaaaaatacattatatttgtcattttttttatcatggcttcaattccaaaacatggtaagaatgaataactaattaactggagagaaggggaatttctctgaattaccctataatgttaaaggaataagatgagcactgtaaaaaaactcagaagaaggaccgggcacagtggctcacgcctgcaatcccagcactttgggaggccaaggctggcggatcacgaggtcaggagatcgagaccatcctggctaacatggtgaaaccccgtctctactaaaaatacaaaaaattagccgggcgtggtggcgggcacctgtagtcccagctactcgagaggctgaggcaggagaatggtatgaacccgggaggcggagcttgcagtgagccaagattgcgccactgcactccagcctgggtgacaaagggagactccatctcgaaaaaaaaaaaaaaaaactcagaagaaacctgtgggatatcctataatgtctttcatcaatctccagtgatcttgtagaagcatttcacagcagtttgtctggctctaccttacgtagagaagaggcagctcctaaacaggaaaaaaatattggtaataatttttattgcagtggccttaatacagttgaaagtggatattttgatttttttttttagtttacatatccatagttttktttttgtttttgtttttgtttttgttttttttgaacattcttgggtgtttctcgcagagggggatttggcagggtcataggacagtagtggagggaaggtcagcagataaacaagtgaacaaaggtctctggttttcctaggcagaggaccctgcggccttacgcagtgtttgtgtccctgggtacttgagattagggagtggtgatgactcttaacgagcctgctgccttcaagcatctgtttagcaaagcacatcttgcaccgcccttaatccatttaaccctgagtggacacagcacatgtttcagagagcacagggttgggggtaaggtcatagatcaacaggatcccaaggcagaagaatttttcttagtatagaacaaaatgaaaagtctcccatgtctacctctttctacacagacacagcaaccatccgatttctcaatctattccccacctttcccccttttctattccacaaaaccgccattgtcatcatggcccgttctcaatgagctgttgggtacacctcccagacggggtggtggccgggcagaggggctcctcacttcccagtaggggcggccgggcagaggcgcccctcacctcccggacggggcggctggccgggcggggggctgacccccccacctccctcctggacggggcggctggcygggcggggggctggcccattcatagttttatgtcaggacttttcaggaagtttggggataaatgggattatttgagattgatgtttcatttttctgttaaagggtaggatatcaactttgaatgactaggcctggtgctttactttaaaagtccttctttccctcctgtcttccaaaggaggagaaacttgtgaaattactayagaactgattcatctctggtataatatatttgtatttttaaagagagagtgtaaatactgacttctrtgctttcttttttctaaagtgtttaagtgatttaagagggtgtctcattgcctagtctatgtcccttgaattatctataygtctctcagaagataagtagaggcctggaactcatttacataattctaaaacttgattcttactcatttacctaacgggtaatctagtgctagaaacccactagagtggtaaaatgaaatcgcagtttgtaatttagtagagtatgggctatattgcttacttcagtgaccgacctgagtattcccttccctttgcaggatggcttgctttcacccacatgtctcagaccttagcaaacaagatcagagtgaggggcatggctcaggagagctgttcacatgggttagaacagagcctaaaaaaccttccacctctggggacctttctgttttcctcaatttcggcacatttacagacttaagctgtattatttccacaggtagctaatacttatattacacattacaaccataattaacataaatttcagaaagtactgttttcacttatgatccaaaatcactttctattaaatcctccctttatatctctttttcccttttattgaaccgctctgagttactgcccctaaaaaggcataaagctttactaattcttattaactgtcagcctgaaagacagaattaactttttattatggaaatctgtaaacatatataaatataaacagaagtatactgaacccatatatgcccatcaccaattatgtaattactaatctgttttcatataaatctctgcctcttctccctccaatattagtttgaaataaatcccaggcatcatagtatttcatatccatgagtatttcagcatatgtatccctgaaggattttttaaatcccacataatatcattttatatcttaaaatattgaggttaattcattaattacatcaaatatccagttaatatttgtatttccttcygccccgcaaatattgcttatgtttttacacatttgtcttagagtttcccatattctggattttaccgattgcgtcatcatactgtcatttaacatgtcttcctgtattctctgtaattcagtagttttgtataaagtttaatgcaattatacgagacacaggtgcaaaaagttattccaactaaattaagaaatactgtttttgtaagacagctttttaaaatgacaaagacaatagagttttagatataaattatggctctcagttactcatgaattctcagaatagtatcattctgtggtttttaactattataaaaaaattctagaaaaaacttcagagataatgttatgacaaaccccatattaatttgagtctgaaagactgctcaggccaggtgcagtggctcacacctgtaattccagcatgtggggaagctgagacaggaggatcacttgaggtcacgagttcaagaccagcctggccaaaatggcaaaaccccattctactaaaaatgcaaaaagtagccgggtgtggtggcagacacctgtaatctcagctacttgggaggctgaggcaggagaattgcttgaagcctggaggcagaggttgcagtgaactgagatcgtaccactgctctccagcctgggtgacagggcagaactctgtctcaaaaaaaaaaaaaaaaaaaactaactgttcaaaaatacagcagtaacttaatggtttcacactaatagcctttaatttttgtcaatattttgttaactatgtcagaacatgttctgttgtttcctctattcttagtaattagtctcgctctgtcgcacaggctggagtgcagtggcrcaatctcggctcactgcaagctctgcctcctgggtttacaccattctcctgcctcagcctcctgaatagctgggactacaggcacctgccaccacgcccggctaatttcttgtatttttagtagasatggggtttcaccgtattagccaggatgttctcgatctcctgacctcgtgatccgcccgccttggcctcccaaagtgctgggattacaggcgtgagcaccgcgcccagcccattcaagaatgtttatagtcatcctcctctcattatgctgtttttttgttttttccatagctcttcagtaggttacctgcaacatccaggatcagaacaagtacaatttcctcgaaccacttcaccatgcagttcccagcagcttcaaggccaccaatgtacaggtataaagaaatyagtgaaaataagatgattggttcatatgagaaatagttcgattamtttccttaggcatttctacaaaaagcttctcaatttgtgatgtgctgaaatacacccacaatattgagggtgctgtactgaatcatagttaacatgtgcagtccacttcttcctttccttctactgctgctatcacagtactatcctgattctcctttctcagaagtattgatactctctagggttatttcctatgccttctgtcattactcttccagctgttcctgtttactccaaattacctttatgataagtgagatgtttaggcctacagagtccatcttaatgcctgtttaaacacacaatacttgtagtgtgatgcactagggcttcaacctggttttcttagttaatagtaaaattttattcagaaatgtaaaattactactgttatmctagtgttcagaaacaccaactagttgctaaaatattctgactatagcatcctaaattctgattttcagctggaccaccaccgccacctggtggggggatggtgatgatgcagctcagtgtaccaaacaatccacaatcttgtgcccactcacccccgcagtggaaacaaaacaaatattactgtgatcaccagagaggacagaagtgtgtagaatttagcagtgtagacaatattgtccaggtaagatggttttgttcattatcattttgaaacgttacatttttgttacctaagattgacttataaggcttgaatttgaaatcccgtcagccagattaataaaagaatttgggccaggcgcggtggctctcccctgtaatcccagcactttttgggaggctgaggcacggggatcacccagtttcagaccagcctgaccaacatggtgaaatcccatctctactaaaaatacaaaatcagctgggtgtagtggcacatgcraaaatacaaaatcagccgggtatggtggtagcatgcatcccagctactcaggaggctgaggcaggagaatcgcctgaacccaggtgagtggaggttgtagtgagccaagatcgtgccattgcactccagcctgggcaacaagagtgtaactctgtctcaaaaaaaaaagacggaggaaaaaaagaatcagtgtttaaatattatttgctaacttctgcgtattcaaaaaagtgttttctaacttaaaaagataaactagatctaaaatttggtgaagaaaaataagcatttatcctacctttcccatatgactatatattaatgtaaccaaatagttgataagggaatgttctctgtagaataatccagttaataaatgcagaagcaatggtagaattagaaaattgccagaaaatcatcagcagatcctaaaaatattagattaaaaagttttggttgagaaactgctcacttwaaaaaaaaattttgagaggtattttaaatggatgaattagagagacagccctgaatccactgatcagttgtaacatcactaaaagtgggccagccaaacattatttacctcttcatgtggtatagaaggaagtacacagcattacttatgatatactcttaccgaaatttgaatctattcaagcctctaaccctagctactagtttatgggaaatataagaagaaacaaaaacaaattacctgatacctgataccagtgggacattttacttgacaaattggccctgttacttgaatagatggcattttgaaataggagcttggtctgttatacattaaaagagactcaagaggtataatatcagatataatgtatggatcttatttggatattgaatgatcaaaagacattttttaaggccaggcgcagtggctcatgcctgtaatcccagcactttgggaagctaaggcagacctggaacgcaggagttcgagaccagcctgggtaacatggtgaaaccctgtctctataaaaaatacaaaaaattattcggccatggcagtgtgcacctgtagtcccagccactcaggaggctgaggcaagattgctttatcccaggagttcaaggctgcagtgagctatgatcatgccactgcgctgccccctagcaacagagggagaccccaactctttgaaaaaaaaaaaaaacccaggcacagtggctcatgcctataatcccagcactttgggaggccaaagcgggcagatcacctgaggtcaggagtttgagaccagcctggccaacatggagaaaccccgtctctactaaaaatacaaaacttagctggacgtggtggcgggcacctgtaatctcagctactcaggaagctgaggcagtagaattgcttgaacccaggaggcagaggttgcagtgatctgagatcgtgcccttgcactccagcctgggtgacagagcgagactctgtctaaaattraaaaaaaaaaaaaaaaaaaaaaaagagttgtccgttagatataaatgtttgtatactgaaatatttacaagtaaaatgctgagatttgctttaaatacttcaggaaaaacaaagccagggcgatcacagttgaacctggatgatgggtacatggaatttcattatgcttttctatctatacttttatatacttgaaattttatagaattaaaaggttttatcttttgttgagaaaaggttaccctctgacaccaggctggactgcatttgcacagtcacagcttactgcagcctcaacctcctgggctcatcatttagagacagggtctggctctgttacctaggctggagtgcagtggcatgttctgggcctactgcagcttccatctcctgggctcaagccatcctcccacctcagccacttgagtagctgagaccgcatgcacaccaccatgcccaactaattttttttttttttttttttttttatagagatggggtattgccgtgttgcccaggctagtctcaaattcctgagctcaagcggtccacctggctcagcctcccaaagtgctgggatcataggcttgagccgctttacccagccaggttttaactttttttaaaagatacaggttgggcatggtggcttacgactgtaatcccagcacttccggccgggcacgatggctcacgcctgtaatcctagcactttgggaggccgaggtgggaggattacgagatcaggagatcgagaccatcctggttaacatggtgaaaccccgtctctactaaaaatacaaaaaattagctgggcgtggtggtgggcgcctgtagtcccagctacttgggaggctgaggcaggagaatggcgtgaacctgggaggcggagcttgcagtgagccaagatcgccccactgcactccagcctgggcaacagagcaagactccgtctcaaaaaaaataaataaaaataaaaaaaatcccagcactttgggaggccaaggagaaaggatcacttgagtccaggagttcaagagcagcctagacaacataatgagattccatctctataaaaaaattaaaaattagccaggtgtggtggtatacacctgtagcgctagttacttgggaggctgaaccaggaggattgcttgaccctgagtggtagaggctgcartgagctgtgatcacactactgtactccagcctaggtaacagagtgagaccctgtctcaaaaaaaacaaaaggagggggaacaaaggttattacagatcagctcacaaactaccaatggccattaaacagatgaaaatataaaactacttttcatctatataattgggaaaattcaggaagaccaataatctgccgtagtaatagtttggcaaagatcaagttataagctctgggactctctttgtggtagtgtaaattggtacagctctttggaatgcactttggagacatttttcaaaatgtagaatttgatccacagatatgcttctggaactttacccagtaaaaattaaataataagtgcaaaaatatgtgtacaatatttcttttttcctgttgtaatattgaaaaactgtgaacagtcttgacattcaccagtgggtaactgattattactgtgccatttaggaaaatgcccttaagtgtgtaatactgaaaagaataagataaacctactattgaaatggtagtttgtaaataaccagtctccattaaaaggaactagggctccttagaaaaataactgttgccagagttggtgcagggaaagtaccagatgggtgtaggccatcttggctatgccagaaagtaaggaagggatggaagaaaaatagggacgtcttgaagaatacaggatcaggagtggaggtttggggcataaaacaatgatagaaatgaatgatcatccatagaataaaataagaattcatgagtccatactgataaaaatcaataaatggaaaatgaaactgtcttaccttagtgtaatataaagtgataaatgtagaatcgtgaaattaraagatcaccaccaagaaaaccatcaggcaagagtcaccactagaggctacaaaactagtgggtgaaattctgaggaaaagcataatttttttttaaagtatctccctacaagatacttaaaactacaaaggaaaaaaattgtaatttacagtggagaaacctgataggcaccatgttaacaaagcagtcgaagtaaatatcaccaatactgtgatgagagatagacgtcaggttccttctgatgtgatccattgagaaggacacattacttctctggtgttcctttcccaaatatataacatgaactttttaatgaggagacagcagacaaacccaaattgagggacagtctacaaaataactgatcttccaaaacaaatcttcagaaatgtcaaagtcatgaaagaaagaagagactgtgctgttctgcttcagattaaagaagattaaagagccatgacaacaaaatgcagcccttgattctagtctggattctggacttgaagggaaacatttttcttatcttttgctataagggacattagtgggacacttggcaaaatttaaattaactgtagattagataatactattgtattgttaattttctggcttttattctactttgattatattataaaagtccttgttgttaggaaatagacactaattattttgggttaaaggaatatcatgtgaaattcactttcaaacagttccaaaaaacacagtgatatatatgtatatatatgggtgtatacacacacacacacacacacacacacagagaaagcagtgtaataaaagttaagatcatttgggaaatctgggaattcttttacaatcttaggaactattctctaatgaaattatttaaatatgaaatgttacagtatttaatatgaaaaaagagtgagttcgctgtatgtattctctcatgcaaaagtatcggcaatattattgccaaggtacaaaagcaagttttgaaagtaggatgtatagtctgttcccatttttgtgaaaaatggatgtatgaatgcatgtgcatagaaacaatctgttggccaggtgcgatggctcacgcctgtaattccagcacttagggaggctgagccaggcggatcacaaggtcaggagatcgagaacatcctggctaacacagggaaacctcatctctactaaaaatacaaaaaattagctgggcatggtggcgggtgcctgtagtcccagctacaggctgggactgaggcaggaggctcaggaggctgaggcgggagaatggcgtgaacctgggaggcagagcttgcagtgagctgtgattgcgccactgcactccagcctgggcaacagagtgagactccgtctcaaaaaaaaagaaaaaaaagaaaccatctgttaccagtgtttattttggggagttgcagatcacatgcttctataatgtttgaattattttctaacaagtacgtatatgtaatcaggaagaataaaaaataagcctgcccaaaatgctgacccattttcttgacgtattgtaattgcagcacagccctcaactcagtagccccattatttcaccagctcagtcgccagcaccagctcagctgtccaccctgaaaactgtacgtccctctggaccaccactttccatcatgccccaattttctagaccttttgtccccgggcaaggtaagtgcacatgaaactagtcacaacttcagagaatttaagacatccattcccagtcacttggtaatttatcttggtaatattgcctttctattttccatagagctgcatcttcacctacactcaggcatgtctatttgtgaccatataccctcctaaccttaatgtatcattgctaattaataattattaattcagtaattacttctgtttagtaattacatgatcacattaaaatcactttaacttattcttagaatccattcctctatagtaataatacacagttttctacattttttcggtattttaatttctacttagagtaatatatatcaaaagtttatccaggccgggcgcagtggcttacgcctgcmatcccagcactttgggaggccaatgcggaaggatcacttgaggccactcaagaccctgtctctagagaaactacaaaaatcagccagaagtggtggcacatgactgtagtcacagctactcaggaggctgaagcgggaggatcacttcagcccaggaatttaagactgcagtgagctctgattatgccactgcattccagcatggacagcagagcaagactcttgtctcaaaaataaaacagaaaaaagagattatccaaaaatttattcagcaatcatttattaaggaaatggctatgcccttggtgtataaagatgaataaggagaagtcctcaccctcactaacccttagtctactttggggagcagatatgcaagcagatgattataaactaatatggaaaccattttatttcctagaatttatcctaaggataatgcacacaaagatttatwtacagaagagtttatcctatagcaaaaaaaatttacaaacaacctaactctgtacatcaatgaggaatacttaaattatggtatattcatacaaggaatattatgtagctatctaaagaatcactaaaagggggcaatattcaggctaggtgcggtggctcacacctgtaatcccagcactttgggaggcmcaggcaggtggatcacaaggttaggagttcaagaccagcctggccaagacagtgaaaccctgtctctactaaaactacaaaaacaagctgggcgtggtrgcaggcacctataatcccagctactcgggaggctgaagcaggagaatcacttgaacctgggcggcagaggctgcagtgagccaagatcgtgccactgcactccagcctgggcgacagagagaggctccgtctcaaaacaaaaaacaaacaaaaaaacaaacaaacaaacacggggagcagtattcacartatggtaagtgattttgaaaaacaagttacacagacattttgaagtagtatgcagatgtctaataagcccttgaaaagatatttaacatcagtcattatagaaatgaatatcaagccagaataccacttcacacccattagaatggctataatcaaaaagacggacaacaccaaatgttagtaaagaatgttctcacttgccaggcatggtggctcacgcctgtaatctcagcacttcgggaggctgaggtgggtagatcacttgaggtcaggagttcgagaccaacctggccaacatagtgaaaccccatctctactaaaaatacaaaaattagccgggcacagtggcacatgcctataatcacagctacttgggaggctaaggcaggagaattgcttgaactcgggaggcagaggttgcagtgagccaagatcgcaccactgcactccagcctgggcaacaagattgacactgcatctcaaaaaaaaaaagaagaatgttctcccttgaaagtgggagctaaacattgatgaacacaaagaagggaacaatagacacttgggtctacttgaggggaaagggtgaggattgaaaaatacctattgggtactatgcttattacctgggtgataaaataataagtacaccaaacccccacaacatgcaaaatccacatgtgagtatttaaaaaataatgttggtaaagatacagagctactaaaattctcacacattggcggtaagagtgtacagtgatgaaaccgctttaggaaaaggtatggcagtttcctaagactttaatcatttaccacataacccagcaattccactcctgggggaaagagaattgaaaacatgttcacatagtcttgtgtacgaacatctatagcaaccttattttataatagctcaaactggacatgaccaacatgtccatcaacaggagactggatacccaaacaagttgtgctatatccttaaaagggtactacgcaacaataaaagtgaacaaagcaagctactgacacacaacaacatgatgactctccgggtcacgacgttaaccaaaaaataagacaaaaagagaatatattctatatgattctaattatatgaaatccagctgcagacaaactaatctgttatgttaaaaatcagatagtagtagagatggggtgtggaactgactgggaagggactggagggaactcttccagggatggaaatgttctttaagggggtgggggaacagggtatggttacacggacttttacagttgttagaattcatcagattcaacacttagaatgtttattttattgattgtattgtatgttaattatatctcaatttccttaaaaacttacacacacacatatgcatgagtcagcccacacatgtagaagactgaaaagatagacaccaaaatgttagaagtgatggaattaccagagtgggttttgttgatgttggtttgtttgttgttgtttgttttgagacactgtcttattccatcgcccaggctgcagtgcagtggtgcacttgtggctcgctacagccttaacctccccgggctcagatgatcctcccacctcaacctcctgagtaactgggcttacaggcacaccaccacacctggctaatttttgtattttcggtagagacagggtttcaccatgttgcccaggctagtctcgaactccttggctcaagcagtctccccaccttggcctcccaaagtgctgcgattacaaatgtcagccactacacccagcaccagggtggtttttattttctccttcgtaattctctatctccaaattttctacaaaacaaattccttattaaatttagaaaaaaggctatgcgcagtggctcacacctgtaatcccagccctttgggaggctgaggtgggtggatcaggaggtcacgagtttgagaccagcctgaaacatggtgaaaccccgtctccattaaaaatacaaaaaaaaattagccgggcatggtggcgcacgcctgtaatctcagctactcaggaggctgaggcaggagaatcgcttgaacccgagaggcaaaggttgcagtgagccaagattgtgccactgcactccagcctgggcgacagagcaagactccatcgctaaataaataatttaattaattaattaattaatttagaaattgcatattttaaaaaaataaattgaaacagtatgcgtcatacagtctggtatgaatgccgcaggaggaacacctagcccagcctattaggaggggtctttgtactgctgactataatcttatctccatatttgaaaaaaattagctggacatggtggtgggcacctgtaatcccagctacttaggaagctgaggcaagagaatcgcttgaacctgggaggcagaggttgcagtgagcagagatggtgccactgcactccagcctgtgtgacagagcaagactctgtctcaaaaattaaaaaaaaaaaaggagttatccattagatataaatgtttgtatactgaaatatttacaagtaaaatgctgagatttgctttaaatacttcaggaaaaacaaagcaggggtgatcacagttgaacctggatgataggtacattatgcgtttctatctatacttttatatacttgaaattttgtagaattaaaaggttttatcttttgttgaaaaatcttaggtgtctttatctaggggattccagaatttttaagcaatgttctctgtattctgttaatgctaagtttttgagcctcattaaatttttaaaatttcattattgtagcacttaactctgacttctttacaactattttcttttcttttttttttttgtttcgagacggagtctcgccctgttgcccaggctggagtgcaatggcatgatcttggctcactgcaacctccacctccagagttcaagctattctcctgcctcagcctcccaagtagctgggattacaggcatgtgccatacgcctggctaattttttgtgtttttaggagagacggggtttcaccatgttggccaggctgatctcgaactctgacctcatgatccgcccgtctcggcctcccaaagtgctggaattacaggcgtgagccaccgcgcccggccttcacaactattttttatacaccttcacacttcactttgcatctctgatctcagtgctaaacccccatgtcatatctgcccttccatctataggttgggaaagagtatgtcatgcatatgtcctgccagggagctgcccaggcatcttcactgtgttcacccggaaggagccttgtggaatggcaagaagtccacaccttgctgctttctgttatgaagctctcaggagaaggggtgtacagtttcctgaggatgctttcctagcacctactgataaccctcctccaaacacaaaatgtactaaatttgagaacttaaaataaatgaaaatgtaacacaaaaaccttattatccaagacaaagtttttgcagtcagcatttattaagcctttgccgtgtgatgacttcaggctttcctgagtgatagaaagcaattggaagatctccatcctcattaacccacatttactgatttaggaagggaatacttacgaataatgacacttaagaactacacaactttttctgaacaggttcaaattataaatgcaaatttcacttaaagattaagaagagcagacttaagacctaggatgtacaactacccattggttaaaactattaaagtgtgtttgagtatatgtaaatgtgtacatgcatatattatatgcataaatttttagcaattaatagtgaattggggagataaaaacttaatgtttatccagagtttcttccttcctctgaaaggtaagattttaatcataatagagtgatatggatttcagcacctcaaatgattggcatgtgtattgtagttattttggtgtatttcatacgggatgttaggatttagtgtcatagttttcttagattcttcctyttccatatcttcaaagtatccagagaagtttctctccatcctgtctctattcatgtagttcctaccatgcaccctccttcctaaccactgttattagtccttaatcttttcagaattttgcctgggctcttaaaaggatatgtggaaatttttaattcttgtttaaaatgtcatttagccaagcatggtggcttgtacctgtaatcccagcaactcatgaggtggaaggattgctggaggccaggagtttgagaccagcctggtcaacatagtgagactctatctctactaaaataaaattagccaggcatggtagtttgtgcttgtagtcccagctacttgtgaggctgaggcaggaagatcacttgaacccaggagttcaaggctgcagtgagctatgattgcaccactgcactccagcctgggttgtcaacagagcagtaccctgtctccaaaagaaaaatgtcagttatctatactttttttatgccaccatacttgtttcccctgttcatcttattttgaacaattagaaaactctggcaagtactttttgttttattttattttttatttttttgagacagtctctcatccgtcacccagtctggaatatagtggcgccatctcagctcactgcaacctctacctcccaagttcaagcagttctcatgcctcagcctcctgagtagctagaattacaggygcccaccaccaggcctggctaatttttatatttttattagagatggggtttcaccatgttggccaggctggtctcgaactcctggccttaagtaatccgcctgcctcagcctcccaaattgctaggattacaggcatgaaccaccgtgcccggcctctggcaataaaataaaatattttattgactttcaggagattccaggtatccattacttggccagccactgcagtacaatcctcctgctgttctgcayggacacattccaaaccaacaggtaggaaagacaactaacctcctaggctttgttgcagaacatcatagctccctcagagtgtaaggggcaaccctgagcccacctgttggcactgcccaagaagagctctgtgcctcagccagttggtttacacagattatcactggctccatcaggagcagagcaaaggagaagatggtgtgctgcttggcagagcagtaattctctagtgccacccaaagacaaggcagtggctagggattggggcactcttgctaatgaaggaccgtcagcaagtgatcggtcataatgaaggacaggaatgccactgccacaggcagaatccagaaggcctgggactgattttcttctgccagagtgcaaaacccaaactaaaggtgttttggtgttaatttgttaaacatccaaagtgtgtttttcagcattattaacgttgyttctcaactatttgtgggttttcagggtcagcctggcagcaggcatggaaaccgaggaaggagacaagctaaaaaagctgcatccacagaccttggagcaggagaaacaggtatgtctctgaggggcaactagatgtgggtctgcaaactggtgacagtctaaaaatacaccacagcacagaaatgggttttcctcttcctagaatcctgcaaaaagtcataatttttgccatctctgatttagggttcttggatatgttcctatgaccttgtgtcatttgagatgtgagagtatatatggtaagatgcaggtaggtttaggagggacagaggggccacagggaaatgtgtgagaggaacaagtagagtgaaactcttagcctcttagttctttgagaaagggtttgtccttacatccatgtgggagaaagtctgagtgaacaaatatgttgcctctctgtggtaaagtaccttcaagtttatattttaactttctactcagcagccttgtggtgtggttagggcaagtgcttttattttattttacaatggaaatgtgaagttcagaaaaatgtttgagatcacctaatttagagaagccactgtacaatgcctctttttatttgtgcaactaccagtaaagactatgacatcagtagcttaattttattttttttatttatttatttatttttgagatggagtttcattcttgttgcccatgctggagtgcagtggtgtagtctcagctcactgcaacctccacctcccaggttcaagcagttctcctgcctcagcctcccgagtagctgggattacagtcgcccaccagcacgcccagctaattttttgtgtttttagtagagacggggtttcaccatgttggtcaggctggtctcgaactccagacctcaggtgatccacccacctcagcctcccaaagtactaggattacaggtgcgcccggctcagtagctttaacactattagccctctattccttgcctatcgggtaagtaggaatgatttaaaagatggatgtccctggccggatgcagtgcctcatgcctgtaatcctctcactttgggaggctgaggcaggtggattgcctgaactcaggagttcgagaccagcctggccaatatggtgaaactccatccgtctctactgaaaacacaaaaaattagctgggcatggtggcgggcgcttgtaatcccagctacttgggaagctgaggcaggagaatcgcttgaacctgggaggtggaggttgcagtgagccgagatcacaccgctgcactccagcctgggagacagagtcagactccatctcccaaaaaaaaaaaaaaaaaaaaaaaaaaagatggccctaacagttttaattttgtgtattcgaatggtcatttcccatgtcatatttgggtctgcagtgcttttttacccaacttttttggtaacaggaatgtattgattctgtaccttttctattctagttgttgggaaggtcttggaaattactgaactaccagatggaataactcgcatggaagctgaaaagctttttggggaactctttaaaattggcgccaagatccggtggctccgggacccccagtcccaaccacgtcgtcaccccctctgctgtggcagtggggacaacactgccaaccctgaacgctctaaacccagtgacttggcctccacctacaccgtcttagccacattcccctccatttcagctgcacagaatgcactgaagaaacaaattaactcagttaacaagtttaagctgagaacaagcaagaagcactatgactttcacattttggaaagggcaagttctcagtaacagccacctttggacccttcgcctttatggttcccctgccctctcccatctttgattggcttggtatttggagcttctgttaacattatagagactcctaggatgtgtgttcatggcattatagcttttgaagaaaggccagtgatccagcaaagggggaaaaatatgcatttcaccccacatgactaggaatccacatcagaatgatacagagttagcaggtttttctaaggaaatgccattcaaatgcctcctaacttttatagttattttgttttatatttctaaattcttgtatcagatccaaagctctattgyacagcaaattattcttcaaaatgattataaccagttgcaccctgtatttctttttgcagccagcacaatgtgacccaacttaaaatttgggggaaaaagaatgcaggagtgaaataaccaagtcaaaaccatgtactatctccttgggggttagggatgctaagaagagcccacaaatagaggattactcttcccctgaatctctaaactcagaaacaattaccaaaaaatacataactcttccttgtagggccctttccttattcatttaggtagtgtgaacattaagtataaaataaattatgttcttaatgcctcttaaaccacttacattcaaaggggaacagaaatcattctaagcaggaaaatacttccactttttttttttcaagtatctctctaataactaaatgccacttatttgcattctccttgtggattttttgtcacctaaggaaatgcatttgatgagtgctggaaacttcttaagtgctttacagtttgttttcattgtttgcagcggatcactggacatcaaagattcattgcacttatgaacaaggaaccttcttttcaatttctgtgtaatttgcaaggctgtacaatgtgtgctgatgcaagcctttttcagttcaagagaataaatgtttacaaatataggctcactttgtcttttttttaattaaaaacaccttttaaatgagtcagttttgaagacaataacctttttggaagatttaagtcaatttcagacttacagaagatgaaaaacagtaaaccacctcattttacaaatgtcctaaacatccctttctctgtggcagtgattcctggtggacatgattcgtgttactgtgttgtctatcataaagttattaccaactgtagaaatttggagtatgaacatacttattgtcaggcaactaaaaatagaaggttatgtttggtgagataaatttgtttttagcttatgtattgcacacccaattgtccacttaggctcaaacgctttatagacatcttttccctttggttagccaagcaaagtcaccccgttgggaaatctaaaaggtaggggtctgccaactgcagctttcctggagtctggttatcttccagcccagactagggcttctactatgaaattgaagagcactaggtgttaccagactctkgtgcagatgtgcactcactttagcacatttgcaaggtcccactggtcccagagaatgccatgcctccccaccaactagcacatcccaattgtgaatattgtactcctgggatcaaaagttgaagctgtcttagaaccattttagattaaggagccatagccagggaaaagagtaagagtgtgaggtctgtgaaaatctcttgcttccaaggcttgttgaattttaattatttttgacatgcagagagtcaaagatggagaggacacgtaagtaaggctagcatttcagcaacaattcttcaatcatacatggggatggagaccaaaaaagtcacaacctcccatcctggccaacatggtgaaacaytgtctctactaaaatacaaaaaaattagctggacatggtggtgcgcacctgtaatcgcagctacttgggaggctgaggcgggggatttgcttgaacccaggaggcagaggttgcagtgagccaagatcggccactgcactccagcctggtgacagagcaagactcggtctcaaaaaaaaaaaaaagtcacaacctcatggtttctggcaattattttttttttttcttttgagaccagagtcactgtatcaaccaggctagagtgcagtggcacgatctcagttcactgcaaccttagactcctgggctcaagcaattcttcctcagcctctcgagtagctgggattacaggcacctgccaccatgccccactaatttttgtatttttagcagaaacagggtttcgccatattggccaggctgatctcgaactcctgacctgaggtgatccacccgcctcggcctcccaaagtgctggaattacaggcatgagccactacacctggcctgcaattagtttctcttgaatattccctttagaccaggcacggtggctcatgcctataatcccagcactgggaggccgaggcggacggatcatttgaggtcaggagttcgagaccagccttgccaacatggcaaaaccccatctctactaaaaacacaaaaattagccgggtgtggtggtggggtgcctatataatcccagctacttgggaggctgaggcagaagaatcacttgaacctggggggcagaggttgcagtgagccgaggttgcgccacttcactctagcctgggcggaagagcgaaactccgtctcaaaaaaaaaaaaattatctttaactcctgcagtaggaattctggtaaaccagtttttgctttaaactcttagtttaccttgtaggaattgaatactgtgcaaagtaaataggtaagacactagagctaaaaaaagatcagaggctattgtagagttaactcctagccaccaccaccacattccctgacaatcacatggaaataacaatgaaattggccaatcccaccaccattacaaaaatatgcacacgttccctaatctacattccccccttttttttttaatctaaagtytgatttcccctgtataaaaatggtgggaggtagaagcacacacaggaggcatttaagatgtgatttggtctagactggtaatctcaaagacagctttcgatgtcccatagccctggcaataatccttatcatgggtttttccagacccctgaccatttttaggggtagatattgctttttttttttttttttttttttttttttttttttttttgagatggagtcttgctctgtcgcccaggctggagtgcagtggcgcgatctctgctccccscaagctccacctcccaggttcacgccattctcctgcctcagcctcccgagtagctgggattacaggcgcccgccaccatgcctggctaattttttgtatttttagtagagatggggtttcatcgtgttagccagratggtctcgatctcctgaccttgtgatccgcccrcctcggcctcccaaagtgctaggattacaggtgtgagccaccccgcccggccagatactacttttaccaataaagtgttattctttcttgtgccaatattagcagctccagcagtcctttctttgggaatgatagaggtcagtccataacattctgtctgtttatgctacttaatattagaaaactgagaatgacttatggtttgaagctcttggtttgcaaagaacatggatatattgggtacgtgtttgtgatctaragtacaaggtgtgtttgccatggtgccacaggtaattaaaaattattaggttggcatcagagctggcaacaaaatagggatgtgagcctttcccaagctaggaaaatgttttcctgaycccactaggtagggccttatggcctgtgaatagtgtggcaacacaggcctctgagtagaacccacagttccagattagcttgggcagagtaaagtcagcatatctgcagctacctcaggaaacagctgagttggattctctacctgttaccaacaacagaaaacatgcaaacttaagacttcagcagaggcaagaccccctaatcccagaccactgcctgcccaacagataatatgttatctatagtctccaaaggctaagggcatgagttccgtcttctagggcccagtgaagtgctagcacaaaggcattayatacatgctggtgggattcaaagctggcccctggttgcttgggattctagaagacctttaacagctggtgctaaaagaacctgagtctcttgcacacacattcagcccatgaccttcaccggcttgaaaaacagatacagctgcccttgaatccacccccacatccacatatgctcaggctacacagtgcatatttgttcattatttttcccctcaatgtctctacttgtattcattttggtttgatttcacccacataagaatactggagggctgtaaagaaaaggcagtgggaacttctgaatcagaaagaaaaatgataaaagtttgttctttgggggttgaggaagaggaagcattgaaatagayayattaaatagttttttaattaattatttatttattttttgagacagagtcttgctctgttgcccaagctagaatgcaatggtgcaatctcggctcactgcaacttctgcctcccaggttcaagcgattctcttgcctcagcctcccgattaactgagaytacaagcacacgccaccacacccsgctaattttttgtatttttagtagagatggggttttaccacgttggccaggctggtctcaaactcctaacttsaggtgatctgccagactggctcatttctgcaagtaataaactytaataatatcctgtacttcctcttcaaagcatttagcacaatggtaattacatgagtaattggccaattagttgcttactgtttttctatccatcagaatgtaatctttaggacagggaaaatgtctgttgcttctgtttactaatatatccctggcaccacgagtgcctttcccagtaaacatttgtccagtgattaaatgaacaaatgatttggcagagtcaaatgctttgaatgttttttctttttctttcttttttttttttttttttttttgagagttttgctctgtcacccaagctgggagtgcagtggcatgatcatagctcactgcagcctcaaccaccagtgctcaagcaatcctcccatctcagccttccaagcagctgggattacaggtgtgagccactgcactggctaatttcttaaatttttttgtttttcttgtttgttttgttttgtttttgagacagagtctcactctgtcacccaggctagagtgcagtggcacaatctcggctcactgcaacctctgcctcacggattcaagcaattcgcttgcctcagccttccgagtagctgggactaaaggcgagtgccaccacgcccggctaattttttgtattttttagtggagatggggtttcactgcgttagccaggctggtctcaatctcctgacctcgtgatccgcccgcctcggcctcccaaagtgcctggattacaggcatgagctgctgtgcccggccaattttttaaaattttttgtagagacagggtctcactgtgttgcccaggctgatctcaaactcctgaactcaagtgatcacctcggcctcccaaaattctgagattataggcttgagccactgtgcgcagctgctttaaatcttgaaaggcatatatatgtatatgtatatacatacattttaactgctttacatatgttagttattagttatttctgacagcctgccaaaatcttgcatatatatatacatatatacattatatatatacatacatacatatgtatatatgtgtatatataatgtatatatgtgtgtatatatgtatatatacacgtatctatatatacacatatatattatacatatgtatatatatgtgtatatatgcaagattttggcaggctgtcagaaataactaacatatggaaagcagttaaatactatgtgccaagyacttgctaagcacttacaatggtctctatgtgattgatcatcacaatagccctaaaggataaattatattattaccctagtttactaatgaggcaactgaaatgtcagagaggtgaggaaatttgcctaacgtctcagctaataagtgatggtggtattcataaaccaggcaggctgactccagaggtcatgggctaaactatttatattactgcttcaagccttgctaacgcagtagttgccatttttgatttggcttattcacctggatctctatgagaagccagagaggagtaccatcctatcttacatgtgaaaatttgattgttgtgagtgaagcttggaacttatttatttatttatttagagacagagtcttgctcttgtcgcccaggctggagtgcaatggcacgatctcggatcactgcaacctccgcctcctgggttcaagtgattctcctgcctcagcctcccaagtagctgggattacaggcgcctgccaccatgcccggctaatttttgtatttttagtagagacagggtttctccatgttggccaggctggtctcaaactcctgaccttgtgatccgcccacctcggcctcccagagtactgggattacaggygtgacccactgcgtccggccctggaacctatttaaatgctgcttctcttctttttttattttatgcacacccatgaaccttatgtggtaattaaactattctcctactggtctacaggtgagtgatgatgatgctctgtataatctatcatattaagcttttttttttttttttttttttgagagagtttcgctctgtcacccaggctggagtgcagtggtgcgatttcagctcactgcaacctccacctcctgggttccagtgattctcctgctacagcctcctaagtagctgggattacaggtgcctgccaccatgtctagctaattttttgtatttttagtagagatggggtttcaccatgttggc

SEQ ID NO: 9995 - DNA, 149046 bp, Homo sapiens
cctgaatgtcaactccttcatctgcagtgaaaaaataagactgctctgtggaccagactacttagttttatttttcactgcagattatttttcactactcatgtgggcctgcccagggcattctttcccaggaggcaagttatgtggcaagcaaaatgatcaggagagtcaaacaaacagctgcagaaacggatggacgatgactgtcagaaggaggagagaagtggagggtgacagccgaggtgagtgcctggctcattcatcctcactccctctcttgaatccatgttaatcacaatttacatgaatgcagtgctttaaaattaaggtatatagagaaaccccatctctactaaaaatacaaaattagccgggtgtggtggcgcatgcctgtaatcccagctactcgggaggctgaggcaggagaattgcttgaacccgggaggtggaggttgcagtgagccaagatcttgccattgcactccagcctgagcaacaagaacaaaactgcaactcaaaaaaaaaaggtaaggtaaggcttatgcttataatcccaacactttgggaggccaggccaggaggatggcttgatcctaggagttcaagaccagcctgggcaacacagtgagaccacagctgtcccccatctctataaaaaatttagaaaaattttttaaagtgctaaaattacaggcttttttaaagtggtaggattataggccggggggtggctcatacctataatcctagcactttggcaggctgaggaaggtagattgcttaagccctggagttcaagaccagcctgggcaatatagtgaaaccccatccttcaaaaatattagctgggtgtactggcacatacctgtagtcccagctacttgggagactgaagtgtgaggatcacctaagcccagggaggttgaggctgcagtgagccaagagtgcaccactgcactccagcctgggcaacagagtgaaaccttgtctcaaaagaaaaaattatccaggtgcggtggtgcatgcctgtagttccagctacttgggaggctgtggtaggaggatcacttgagcctgggaggttaaggctgtagtgagccgtaatcacaccactgcactccagcctgggtgagacagctagacattatcttaaaataaatgaaaaataaaagtaaggtagaaagagtatttttaaaagtcttattggaggttcacatcagcactgagagataagaaatagagcagatatcatgattcccactttttgaatgcagaaactgaggcccagagaggtgaatccagcctgtgtccttcacaccccagctggctcatagaaaccatggcctgttaccaaccaagccctccagagcccagcactgtaggccgatggcggccttccctggcctgctcctggggcaggttgctgagaagcattgcctgttttggggagaggcctgcggcagcctgaggaatgagcctggcagtgggcactctcactggggcctcctccggcgctgccctcaggaagattctgtggctcccaaagccccaggggcgcctctgaccacagcagtcagtcctgccgggttggggggggctcttgtgcccagcgtaacttcacagagccagcacgttccagcctgggagggaaaccaaaaggcactttgcccaagtgtcaccgggctgaaacgacatcctcatgggcccctgtccccggaagcaatgagattggacaggtgctgagcccctgttacttcattgggatggacttgcatctaaggaacgaactgagagtgaacatttccaaatttgaggcctaagaaaagtttgttggcctgatgagctgtgacaggcaaccgtctggggaagtggaagctcagcacatcctccggttacttattacgttactgaagggtctaaaaatgactgtccttggggtgctggaatcctgcagaataaaatagtgctgaattttaattcattctttgcaaatgaatgttctcaaggctccggttggagtcaggcaccctgggaccttgcagtagtgtgctttgggtcccaggccacagcacagcccctttctttttttttttcttttttgagatggagtcttgctctgtcgcccaggctggagtgtagtggcgtgatatcggctcattgcaacctctgcctcccgggttcaagtgattctcccgcctcagcctcccgagtagttgggattacaggcgcccgccaccaagcccaactaatcagctaattttttttttttttttttttttttgagacggagtctaactctgtcgcccaggctggatggagtgcagtggcgcaatctcggctcactgcaagctccgcctcccaggttcacgccattctcctgcctcagcctcccaagtagctgggactacaggtgcccgccaccacgcccggctaattttttgtattttaagtagagatggagtttcaccatgttagccaggatggtctcgatctcctgacctcgtgatccacccacctcggcctcccaaagtgctgggattacaggcatgagccacctcatctggccttttttttcttttttttagagacggagtcttgctctgtcgcccaagctggagcatagtggctcaatctcggctcactgcaacctctgcctcctgggttctagcaactctcctgcctcagcctcccgagtagctgggattacaggcacatgctgccatgcccagctaattttttgtatttttagtagaaacgggggttttaccatgttgcctaggctggtcttgaactcctgacctcgtgatccaccctcctcggcctcccaaagtgctgggattataggtgtgagtcaccgcatccagcccatagtccctttcctctctgggagtctctggtggccccttcataatgcttttttttttttttttttaattcttggtacattttctatgtaatcatttcaataactgactgtccagtagagtctttagtttttctgtatcccttcccaaatttagaaacctgacttgaactttgggccagttgtaatgtgtcctctatgacaggccatcctgggcccccttccctttgttcctgtggccggagccctgagcaggccccatccacttgagtccaagaggccctctctcctggctgctaccattgtacccacctgctggccaggcccccacaggggcctctttcctcctgacagtctcatccccactcagcagccagagtgccttctttataaatgtagatcagatcctttcactgtatttgttcatccaacacacatttactgagcacctactgtgtgctaggccctggtacgggcacaggaaacacatcagggaataaaactacactctctgctctcctggagcttccatgctagtggagagaagaaagatacgtaaacatgtaatgagtcaggtggtgatgagtacaaaggagaaaagtaaagcagagaaatggagtagaaagtgctggcaatagtgggtggtggtggtggggggtgtggtttgcaattttcaacaggggtcctcaggcctgactgaggagctgaagaggtaagagagtgagccacgaggctaagtggggtgaaagagttggagcagaaaaggtgggaggatcaccaggcatgatggcccctctctgtagtcctaactactagagacaggctcatgcctgtcatcccagcactttgggaggccgaggcaggtggatcatctgaggccaggagttcaagaccagccagaccaacatggtgaaaccctgtctctactaaaaatacaaaaataagctgggcgtggtggcacatgcctgtaatcccagctacttgggaggctgaggcaggagaattgcttgagcctgggaggcagaggttgtggtgagccaagattgccccactgcactccagcctgggcaacagagtgagatcccatctcaaaacaaaacaacaaaagctaactacttgagaggctgaggtgggaggattgcttgagcccaggagtttgaggttgcaatgagctacgatcacaccactacactccagcctgggccacagagtgagaccctgtctcaaaaaaaaaaaaaaaaaaaagagtcccagcagagaacagcaagcacaaaggccctgaggcaggagtgcacctggtgtgtttgagaacccacagagacaccactgtggctggagcagggtgagatgtgggaagggagtggctaaggaagctgagaggtcaaggaagaagtgtggttggagcaggccctgcaggtgccgaaggcttttgcttctttcctgagatggcagccctcacgagccctggagcttccctggctgccatgagatcaggtggaagggggtcgaggctgcaagtggggacgcatgagtgggtgacaggtggcagtagtagaagtgtaagaagagctgggagtctgggtctcttctatcttgaaaatagaaccccaggctgtgctggtagagctggatgcagggtggaagaagggaaaatatttttgctgcttaaatcctagcctggcttcccattgctcgtggggtgcattctcgattcctcttccccgcctgaggtctgacatgtgctggccctggctggcctctcctgtaccttctaccaccagctccagctcatggcctgatgtggttcctcccccgaatccagcgaccaggctgccctctgccccagcgcctcctccgtggatgtctgctcttcctgaactgccctcccaccggacggctgctccttggtagcagctcaagtgtccttccttccctaagccagtttccccaaacactgcagcacaacgcccttcatttctcatggcattcttcatggcctgtcaatggggcttttgttgttttaattttccgtcttcttgtttttgttggtcttcctagaatataaaccccatgagggcagaggcgttcagcctgactccagcctggcaaagctgtcacaaatctggaggaacacacacgttcacgggcactcagttctgtgaggtactgcaagccctctctgaacctgcaaggtggccattgctgtccccactttacaaaggaggaaagagtgcgcggagaggttctacttagacccgccaagggcacagtcgttctagaaagtagcagactgggagttccaacttgggcttgctggttccggagccccttctgtgccccttccaggctgtgcctgggtgagattcttctcctaccagcacgtcttcttcctggagggttcagtggctgagctgacaccggtgggcaagaggccctggcgggcttgttgaaggactcaaaggtggcgtctgggagcctggcgggactttctccctgtcagcctagaggcacttttagaggagtgtgtctgtttcgcagtcttcgtgtctcataattcataactaaggtagagggtacacatttagtttacagtaaaacctcaaacccacctccactcccagccggccacttctctccctgttcccttctctgccctccacaggtgagaacaagtgtccggggccgccccgtggggccccaggctgcccgccctgaaactgcctcgctgtgtgcccttgggcaaccccgccctgctccgtgcctcagtttccccactcatagaggctccacaggtgacacacctggctccgggccccgatcggccgccgggccccgcggggcggaaaccccgcgccaagcctcccggaggcacctccagggcagggcggggagcgcggggaggggccgcggggacctgcgccgctggggccgcctggccgccggccggctccggggggcgcccgcgggagggcgcggccggtgcggggggcgcgggtggcggcggcggggggcggagaagcggcgcggcttccgctcccgcgcgcccagctccctcctccccgtcgtcctggtccgcggcgcccgaggggggaggcggaggcgccgggagccgcgcgaggagccgccgccgccgcgccatggagcccgagtgagcgcggcgcgggcccgtccggccgccggacaacatggaggcagcgccgcccgggccgccgtrgccgctgctgctgctgctgctgctgctgctggcgctgtgcggctgcccggcccccgccgcgggtaggtgggcgcaggccggccgggggccgcgggttgctcggacaatggcccgggcggccccgcggccaagtgcgcgggcgccgccgccgtctcggaagcgacttggcgagttgggagcgagttggggcgcgcgcccgggatccccctgccgtccccggcgtccccgccacgcgcgggccctttgtctccccacccgggccctccccggggacgctgcgtcccgggctggcgaggagggcgcccgctccgccaggtgcggcgcgggcgggtcctcacctgcccgagcccgcgggaagccgggagccgagccgagcccgcgctgggcccgtgtggcccgggccgggcaccgagcggggacttggggcgcggaggcgggcctggcccggggagccggttcgcaagcctgtttccagcggccgcgcggccgccccgcgtgctccgaggacgggctgaagttgcagcgagaaagttctgagcccgggcgcggggcggcctggccggtggcgctgctcctgtgagccgcgtggctgtgggtttccaagcggactgacacctgccaggtgcccgggcgacccgaatgccccgtgtggccgccgggtccccagatagtgtccatccccgggtcggctacgcggaggtgacgtggtcccagatcgcggggcagtgggggaggcaggcttgtgcctcagttgtacactcccgtggggagaggtagggcgggggaaytttctctccaacttttggtgtttcccagggggtggagttgaggtcaggaggactcaggaaacttaagcagtcgtgaaacgctacacatgttcttttaatttggagattgccatgtggtttttcaagcaagcctcttgctacctaaatcattctcttcggatgtgcgtgttttgtttttctggagtatggctggccaagtggcacggccgcaagtgcctgtgcacgccgcggctcctgttctgtttgtggcagtttagcggggaggacctcgggcccctttgtctgggcctccttaaggcaaacagctgtctccctgaatatttccagtgtgaatggtgcagcggggtggccctgtagtcagatcccccaggctgcagcctctgcttggaggtgtgggggacagcggggaacaggaggagcttggagtttgtttcacgtcctcctgcctctgacccaagcctagagattctatggacagtttcacccyaaatctgcctctttcaggagcgtgtttacattgtggggccttgtctggagctagcaaaacaaggtgaagacaaaacagcgacagtatctggggagtacaggccagcgccgctcctttttccggaaatgcmtgggtcaaggaggcaaaaggggttttggggaaactgtttgttttaaagggggggtttctaggccgaccgcgttgcctttcacctcattgcagttttgggttttgtgcacgttttggggtgatgttgctggagtcaaatgcctgtcgtccatgtggttcgagcccctgaggagaaagaattatagctgtagagttcagttgtgtgtgaggcaaaaatagagttgattattttaacattaggcagcaaggcctgggagccccagtgaatgtggtgatccaggcctaaaatggaaggaaagggaggaatctttctgcagaacggttttgatgttatatccctggttttactgtgtgaaatacatgcctcggacctcagcgaagccagtaagtgggccgctaattatttttcctgattgcttcctgttgcaattggaagctgtgaacgcacggaaatggctttgttctagtggtcccagtgctgagaacttccccagctcccaagccctagtcctctctcctcggggcccaagtgcttgttccagggccggcctgtccaggcaccccctctccccctggaggttcctcctgtagatgcccaaggccaaggccgggccctctgggagagcccagaagggctgagtggggttaaccaagtgctgtgtggagcaccctgagagagtcccctccaaagcagggccccgtgtgtttagctcccctcttcagttccaagaaattcgccggtgaacccgatccagcatttgttcagcactttcctggggagattcacytcgtgcttcctgtcgtttttggaacccgtttaatttcagccgtgctgtgtcactgctcaggcatttagtagaactcacacacacgggtgggggatgtaggcaggtgaggcctctgagttgctttctcccttgcagcgacgggttgcagggctgatgggggtggaggggtttggggtcaracccacctgggtttacatgctcagtggctgtttgacttcgggcaccatacctagtttctgttatctcaccccgttcctctcccaggctatggggagccctaactgccctgtgtgagacctttagccccatccctggcagagctgcagtgagcgcagttgtgtgtcagcgtcctcgatctttctggccccagccggtctagaggctgttattacaatagtctggatttttcctgtatgaccttggacatccagtccactgacaaactcactcactcaccgctgcagccctcgggggcaggagtagttagttagcactgtggacagagcycctgcgcccagggtctgattccagcctggccgcttcctgtgctgggaggcttaggaagctgatgctacctttgtgtgcctcagttttctcacctgtaaaatgggaatagaatccttcctaccatgaattcagtgagttaacgtgcacctggcccggtataatgctgttgctgttttgctttggtgtctgctaccgagtgaagtgctagggttgagtgcgatagaatggcagataaggccccgcccctgcgggcagagcttcccatgtagaggggaggacagggaaagaagctttgcagctatgcagaggtgggcccacgggtgctccttcaccctcggggtgtcctgcgagaggcccttagaggccagatcatgstgtggagtctggttgtgatccacaaggcagcggaagcttctggaaggctttaggcaggagttacaggaaatgcaagctaaagccagatctttcctaggtgaaaggtgtcgagttgttttttttttaaattgaggtgaaacttatataatataaaatattaaagtatagaaggcaggcatttggtacattcacagtgtttacaaccctctcttctatcaagttataagagatttccatcaccccaaaatwaaacccatacccattacacggtgacttcccgttccctctccccggatcccctggtgaacaccagtcgactttctgcctctgtggttctgcctgttctgggcattttgcatgaagggaatcttacaatgcgtcttcgtggctgacttccttggttactgtaacgttttcaggagtcatccaagtagtaccacgtatgggtgtttcagccttttattttttttttgaaatggagtcttgctctgttgcccaggttggagtgcggtggtgcgatctyggctcactgcaacttctgcctcctgggtttaagtgattctcctgcctcaggctcccaagtagcttgcattacaggtgcccgccaccacgcccagctaatttttgtatttttagtagagacgggatttcaccatgttggccaggctggtcttgaactcctgacctcaagtgagctgccggcctcggcctcccaaagtgctgggattacaggtgtgagccatcacgcccggcctatttcagccctttttgtggctgaataatattccattgtgtggagggaccacattatatttgtcagttcatccgctgattggattgatcttggttggttgcatctcccagccggcacgagcaggtctcatgcctcctgcatcctggtggaggtggctggtgggaggatctggcctgagactctcctgcygaggttcaggaacgagccaggtgatggggacaagttggggagtcagtgctggcatctcagaggaggggcctgggccctgagaggagtgctgggagggcagagtgagggccaagttcaggttacagaagccgtgagacagccggacatctgtggtttgtgaggctttggaaacacttaatgcgctctccaaatggggagtctgttggggaggccctggcgggagccggggctacatccaggtcctcrgcttggtggccttgttcacttatttgttcaggaagcagcagggtgtgggctctgtgccaggccgccctggagggctgtcctggggccagtgaggtccaagtgtgatgggcggaggcagctgtggcttgctacgagccggcctcagggacccaccggctggctccggctgctctctgcattctcttcagctctggagagccgtgtgccagccctcagcctcagtttcctcatctgcaaaatcgggacgatggtgtccaccttgcccatgctggtggggtcccaagagctggtgtctggggtgagggagctgggggccaaaagctcctgmcctggggcatccagctgtcctttgaagagtaccccgagggtgtgactgagagccagtccccagcacccttgtccagatggggaccaggaggtgggtgaagatatttggggtctgagctctgtgctggttgcccccgagggggcctggagccctgagttasgagcagaacggggtgctggtcctatccgttccctacctgggtagtgggggctgccttcctgggttgggggtggggggagctccctgtgtccctaagccatgcagaggcatgcgcatacgcgctgctcttaggcatgtgggtggcgctctgaggtccctgcccattccccagccccatgtggtggtccctgtgctccaggtccagcctctggtttccagtttgtcctagtttgtcaccttgtagggggcagttgacactttgctggcctgactcgtggtgtgccagagcccgtggctgctgggcgactgtgcctctttctctcagtggcaagagccttattttctaatagagcctgatgggccagaggttcygccacagggacactgttctctgtctctcgtgcttggggtctcttgctgtggaccccctgggaggttgtcctgggggtgcggggattgtgttttctgggtattttcktatttgctctattggagtgtatttaatttaatatatatattttaaacatcttttagtttgccttaatgtaattttttttgagatttaatttttttttttttgagatggagtcttgctctgtcgcccaggctggagtgcagcggtgtgatctcagctcactgcaagctccacctcccagggtcacgcctttctcctgcctcagcctcctgagtagctggaactacaggcacccgccaccacgcccggctaatttttkgcatttttagtagagacggggtttcaccgtgttagccaggatggtctccatctcctgatcctcccgctcggcytcccaaggtgctgggattacaggcgtgagccaccacacccggcctgcttttttttttttttttgagtcttgctctgttgctgaggctggagtgcagtgattcagtcaccgcttactgcagcctctacctcctgggctgaagcaatcctctcacctcagcccgcaagtagttgggacctcaggtgtgcaccaccacgcccagctgattttgttgttttttgtagagacagggtttcactatgttgcccaggctggtcttgaactcctgggctcaagcgatccacccacctcagcctcccaaagtgctgggattacagacatgagccactgcgctgggccttaatgtagtttttcttgtggttaaactgaggtgaaggttcactcaaggaggaaagtggtttttagccttttgaggggctcaaggaccccttcaaggatatgacaacggctcctctcctgagaaggtgcctggtgggggcggcacaggctccactccaccccattgcaagaatccagggccctgcagggctcagagccctctccctgcctccctgtggggcattgagaggcactcaccttctgagggcctcagtttcctttttttgtaaaatagaaccagctgattccaatctctatggtctcttctagcacggagcttcacgttttttctcccttcaggatcctgaggcctctggatcgctagagattgggggtgcccccagaagaggcgctgcttctgtgccctccctcaccccaccgtgcctggctccttgttttttttttttttttttttttgagacaggagtctcactcacgcccaggatggagtgcggtggcacgatctcggctcactgtaacttctgccaccctggttcaagcgattcttgtgcctcagtagctgggactacaggcatctgccaccatgcccagctaatttttgtatttttagtagagacagggttttgccacgttggccaggctggtctcsaactcctgacctcaagtgatctgcctgcctcggcctcccaaagtgctgggattacaggcgtgagccaccatgcccagcctgcctggctgattttttaaaatttgtcgttgaratgggtgtcttgctttgctgcccaggctggccttgaactcctgggatcaagcgatcctcccacctcagcctcccaaagtgttgggattacaggcatgagcygctgtgcccagcctattttwttattattattatttaattttattttttctcactattgcccagctcctggcctccaactcctgggctcaaaggatcttcctgcctcagcctcctgagtagctgggactgcaggcatgtgccatcacaccctactttgtacttttgcttttctgtctttgctcttgttaaaagccaagtgccatttcatagtacacaggtgcacttgacagcatttacctgattgaggagtttttccagccttcattgctattacaaagcatgcttgctcgtgtgtctctgcatgtgtataagtgtttttataggatacattcctagtcaaagagtgtgtccatttctgtttttaaagatattgaggccgggcacagtggctcatccaggtaatcccagcactttgggaggttgaggcaggaggatcacttgagtccaggagttcgagaccagcctgggcaaaattgggagaccccccatgtctacaaaaaatttaaaaaattagctgagtatgattgcacactcctgtagtctcagctacttgaaaggctgaggtgggaaaatctattgagctcrggaggtcaaggctgcagtaagccatgatcacagcactgcaacagatctagcctgggcaacagagcgagaccctgtctcaaatacatacatacaagcatacatacatacataactcctaaaaggctgtagcagttcatacctgcaagcatctacgagaacacacactttcctatatcctctctgatgctggcaattacaagattttggtttttggtgttttctttggtccagtttggttaaaaattataacaccttttgatttgcacaaccctcatttctggtttattggtatttacttttctgcaaattgcctacacttatccttggcccatttttctgttgtctttttcttttcttttttcttcttcttcttttttttttttttttgagacagagtctcgctgtgtcctccaggctggagtgcagtggcgcgattgccatcttggttcactgcaacctctgcctcccgggttccagctgttctcctggctcagcctcccaagtarctgggactacaggcatgcgccaccacrcctggctaatttttgtatttttggtagagacagggtttcaccatgttggccaggctggtctcgaactcctgacctcaagtgacctacccatctccrcctcccaaagtgctgggattacagacataagccacggtgccagcctgtttatctttttcttatagatttgtgggaggtctttatttggtatggactttaattctttgttctgtttgtttcaggtttcactgctggtctgtagctagtccttcatccttgtttctggtggtacattatcataaagatattaagaagcttcatataatcataactctactttttccctatggcttttttcctatcccttgttactccatctccagattataaatatatcctccattattttcttccaggactgttactgttttatgttttacattcagacattattctgtctgggttttttttttttttttttttttgtatatggtatgaggtaggggtctggccagtgaatagggagttgtccaacaccttggtgggatggtccatcctatccattcattgtaaatgctgctcttttatgtgtagtgtccacagacacctgggtcctgattccagacccttcactgtgctccactgcctgtgagtgtctttgtgtaccggaatgctgctgtctccatctctgaagcatcagaacatattttaagatcagttatgtaaattcccacctcattgtccttttcaaaagacgtattggctctkcttgcacgtttatgcttttgtggtgaacttcagagccgtcctatcaggttccaccctttgatctcttgatctggggacggtaaatggtgatatccagcaggtgtcagagggctggattttaaatggcctccgatgagctggcggtctcaggctgtggaagtgaattcatctgctgggtgcagtggagccggccttgacatttgtgggttttgctgacatttgtggaaggctctggaggtgccctttgtgccgacttgcccgagccactcctgytgcccaactcactccggtgtctgctcaggaaagaaattctaatgcacactaattttagcattagcccgatggcaaatataattactgagttaattatcactcccctccctagttaatcccagagcaaaatgtgggcacctttcatttcttccttgggatgtacccctgtattagttcagatggggaggcggtacctgcctggcaaagctctcaggaaattgctcaacggggcattaatagctatctgagcgtgtggcctgggctggaacacaccagcctgggtgctgggtgycttccaggctctggccaccttgggttctgccccaggaaggagcagactgtctcctctaggggacctgaagcttaacgtcctcactgtacgagatagttttggagcaagatatgttctggggcttgcttctgcgggtaaaggccatttctccaaactttcccccagagcgaacttgcttcccaaaaggagtctggatccgggcgtggccgtgctgccctggccgcctcctcacttcagctggagcctccgagctgacgtccatkcctattcctcctgagcactgtagacacaggccccagctctgtcccctgccctctcctccactcagactccctgggctctgaggctttacctacaggccctgcggtgcatattcagtgaaagcctagattcagagccaatgacatcagcttttacttggtctccttgctttctggaacctcccctttgcccatttatcttatgctctggccagattaatttttctccaagtagttttcatcacatccttccctttctcagacagtcgtgcccattctccagcatctgaagttggaactttttggcctggcaggccgtgccgccctgagcagacctgcccatcttctgcccctggtgtgggcacttctcttgccagatctgtctggaaccttccatggtccacccaacctgggagggccttgaggacaggggctgtcttcgtctgcgcccctctgcctctagtgtgatgtctggtagatgatcagtaactgttctgaggccaaggcctcatctgtccagggagcagatcttacccatcttttacctcctctggctcgaattctgctggagcatgagctccctctagcctaggttgtagaacacctgtctggctatgtgacagcttctgggccaagtgtgaggacccccatggtcctgcagtaagagcccatatttctggggtgtgggaaacccagtgtaccccaaagggacttgactgtgaagtcccgggtccacgtggtacccaccagcctcctagggcccagactccgtgagatgccacggtgggggcttgggcatttgcagccttcacttggcattcttaccattttcaggaaactttatataaacatttttaatcatgcaaaaaaggaattatggaataataaatgtttatattaaaaagtcttggtggttttgattgatttatttattttttgagatggagtctcgttctgtctcccaggcttgagtgcagtagcacagtcttggctcactgcaacctctgcctcctgggttcaagcagttctcctgcctcagcttcctgagtagctgggattacaggcacccgccaccaygcctgggtaatttttgtatttttagtggagatggagtttcaccatgttggctgggctggtctcgaacttctgactcaggtgatccacttgcctcagcctcccwgagtgctgggattacaggygtgagccaccaagcctggcttggtgctttttaaatttattttgagatagagtctgactctgttacccaggctggagtgcagtggtgccatcacagcctactgcagcctctacctcccctgggttcatgtggttctcccgcctcagcctcctgagtagctgggactacaggcacacaccaccaggcccaggtaattttttaaaacactttttttgtagaaatggggtccctccatgttgcccaggttcatttggaactcctgggcttaagtgatcctcttgcctcagcttcccaaagtactgggattataggcgtgagccaccgcgcctggctactttggtacttttgagttaaaactatagagtaggtgactgagtgatatttttaatgcgttctcaagaatttgaacaygaagagagtgtcaccctcccaggttatgcccccgggagttcatgcacttgccacctggtcgctgctcagggggcccagggagtttgctgcagtgccggaggactcctgggtcccggctgtgcctccccgcagccgcctgctcccttgggacactcattcatttgctgtggccactgccrcccacagtccttgcctcgtagactccactgcagctctggttacaaagagcgagtggtcagggactcctgacctgccatgcagggccccgtgggcttgtggtggctttggtgccgtccgctgcrtctgcctcttagagcatggagttctccttctcaggagggytgagctgctggagctctagtcctgccrcagagcagcccccaagtgcggcgttgcctgtccctgtggagcaggtgactacctggctgcgggcggaacagcaggccatggctctggtagtggtctgtgacagcatatcaccctgtgggacagatccccgggacctagtggggtgggatagtgagagctgcgtccacaggggaggctcagagacttgtgtgcccagtgtggccctgtgtgctgacccagctgggctctgccctgtgtggcccccagggtgcccggcgtgtgccctgatggcctggggcagagctccagagagccayggctggccgagggctcacggattctcacccgcccccagtgcctcaggagacacctgggcagcgaacagcttgaggtgtgcagaggatgggtcacgatgggagggaggcacaaggggtgctttccatctctttggccaccagttttaattaaaaaaaaatttccatctgttttgaaaggttttatcctcttaaggaaatgacgtttattaagcaacagccccttctgctcatcgtccagctgtgcccactggcagagcagaggctggtgggattccgcctgctccacaccaggaggtgccacttggcttcccagtgtcgaaggccttcttggactcagcacaccttcacggccccgtgggctgtgggtccctgggttgggcatgactgacttggagggtgatgagagatctccaggatccaggcaggtctggcacgccactgggtgctaggcgctgggctctgggcggcctccttgctgtgcttttctctgagggttgagggagccctgctcagagaccaccaggtgagctctgggggtccctctgggctcctgtgccctgcacagcccggttctgaccacagacctcctccatcagggtggactatagcccagagcgggataccaccacgcccatcaccccccacccctggagcccctgaccaaggcccttctgggtacttaaccagtgatctgatctcaccacagtcagggattagggcctctcccggagggctggggtccaatggtatgatgtgtttcaggtgagaaacaggttcagggatgtccccagcctcactggctgttgttggcagagcaggatgaaaggcagacgggaatgcagaattgggatcttgccctgacccctgtgatccgtgaggcccttgagctagagggatgcactcagtcgaagtgcccgcctcttgctttgtgttagtgtgaagaggaggggtgggccctgttctattcttggctgcccacagcacctaaggccagcttggtcaccaaggcatgctggaaggtcaccacaggtggcacaggtggcttggggtgtgctgggcagcaaccattatgcagyagtggcctccaagcagaagctgctgtttcggacacccgaggtattcccagcctccttcccctaccccgaggtttgctggagtcactgagggggcagtagcgagctgcaggtgcagggtcggggtcctgggggttgcgtgtatgcgcagcctccagagaagcccatgcaggcccccctcacccgttcytgcctgacctgctgttgtgtcctgctcctagctctgcggtctgggacaagcacgttaactgcttcagagctcagtttccccatccgtgatagggaatgatctttatgctcccacaggctcgtcctgaggctgcagagaggcagsgttgaaaagtacctagctcagggcctggctcagtgacggttagctgttagggttaccatcgcatcgcaattgttactccatagtgacgaccccccggggactctggacttgttcagctcagcygagaggctgcttggccgaaaccatctcagctctgcatagtgtggcctggtggcctgtgggttgcgctcatgacaacgtggagcctattcagtcggtaccgagtgtgcgtccttgcctagctggcctcggcatttattttgtagctggagccctggtgggatggggtcaggtgggctctaggagtctgggggacaggtgcaggtaccttcgggtgcgcctcccctgggggcctctgctttgtcagaagtatggcagggggctgagggctgactatctatttgtaggtgtcaccagagcagtccccgcctctccttttcagaggacattgttgaggggaccctgccatctgcgtctgggctggctgcttcctctgtggggggctcctcccggctgaccagcagccctttctggccccctgcatcagcgcctccccactcagcttcactgctgaaggcagggccagcctgggcaccaggttcttccccctctgcccaaggtccctgcccacccgtcttccctcgccctggccgtgacggtcagtgcctttgccccgctctgacgaccaggccctgtgcgcagttggcgctccgtggttgctgagagatgtgctctccagtctgtgggccagatggggcctctgaagtggagggggcccaccctctctcctgcagcctgctgtggctccccatcgcctctgggatgagagcagaccctgcgaagccttgagctcctggccctccagctgtgagcccaggtgggaccacccagttacaagagcgttaggcctggctgtgtaggagacgtgtgtctccacaccagagtccttgcggcayatgggaagccttcatggtcctcatggtggggaggggtccccggggaggcatggagtctcgctcctaggttgctgtgtggcttcagcgctctgtacctccatgcccctgtcctgcagatgtcaacacccagttgaggaraacgtggactttgcccagtgttgtgcagggatggtggggccaggctggagcccacgtgtcctgccttcgccctggccaaggtgggggttatctgccctggccaagctgtgccgcccgtccctgcccgccccagcaggtgggggcctgcggtgggatcccacccatgagcagtagaggcttgttgacttactggcctcccaggctccccctccaaagccaagtcctccaggacggttcttgcccctgagaaggggcagtgtgggtgctgggctgcagcgagcccctcttcgttccatttcctcacagtctyggggacggagggcttgtcctggagcacaggaccgggattgtgctgaggtcctgggaggccacggtcatgaggggacccagtgaaggccaggaggggacaagcatccctccaggtatggggagggtcaccccagcgcctctgcggatctgacccactggctgcggctcctgtgcttgacccttttggcaaagatatgcagtggtctttcagttgcccccccttaggcagcatgaaaacaatttaactcttgcagaaagaacctgggaattgatctcccctgtcactgatcccacaagtgtgactttgcattggtttcttggtccccttgtgcccagtctccccatctgtaaaatggggtgacagtagttccacctcctatgaggactgagtgaagtcaggaaccagaagcagctcccacatgagactcagaaagtgtgacaggcgtggagggtagggacccatgaagctaggcccggcaccttaggaagaagagggagctttcctgcaggtttcccccggacggaatgtgtttcgtcctgtgcacctgcctgcagagcccctcgcacgctgtcagtccacaatgaatgcttggtggaagagttcacccagggcctgcaacaccatagtgctcagcttctccaaattcttcttaacttccagactcgacacgtaaacttgattccaaggaaatcaaagctgatcgtcaacactggactttgcaggcagctcccaaacccacatgcatatttacaactaagaaatgccagttcctcaaagaatgttagcctctgagatgcatcaggagaccaggaggcaaggggttaaaggcaaaccgtggcattccccaaatctgtccagttccctggcatggtacagtgtcgcggagcccgaggtggcatcttttgtttggctgctgatggcggccttcgggccttggcatccacgttgctgcaattttccaggaacagtaatcatttgaaagtagagctgccacgttttgctcaataaagggattttgtagagcgatgataaatttggcatgtctttattattattattttttcaacacttaaagaaaataaaagctggtacaaaggtatgtttgtttctgaaatgtgtttccttccccagatgttcttttctgccagttctaaaatgcgttctgagctcggtcctccagtttcctccctgtgaggaagaacaatgagacctttgtaaccacacaggggaaacggcygcttccctctgcagtgggcatgggggaggggctgggacgtcccacctcctcccacctcgatggaaaccacgagtctgtgccagcccagccgactgtcggggggtttggcagcctcctttcccatggtggtaatttgcagggtcatggctcaggggcaccgcagtytgcacctccgtccctggatccgtgcgtttgctgtgtggcctcgcagtaaatgcttccatctgcgtggcatttatggaccctggggcttggtactgtctgtgttatctggagtcgaacttgcccttttccttttctgtctgcctttcttgcatcaaatgctggtccccacccaaagggtagcccagtctgcaggacacggcgcagaggtagagttggtggcttcacgagggtccagtggggcacagaccttcctcggctgctctgtcgctttgtgacttgagactgcgtgggtggggtacctgagggatccgtgagcccgcccttcccacacgtgtgcatgcacacacacatgtgcacagtgcttcagaagtaccaccttagttggatttgaaggacagccaagagacctgtataaagcttgtagttagagtcgtttcgatactggcctgaattaagagcagtctccatggggttgctgtctgtggggtacgtgtttaatgaaaatccttgtttttaaataaatgtatcctgctttagaacacccaagatataaaatctagacttcatagacaaaaatagctaacatttgttgtgtatcacagtgtgccaggtgggctctaagagatgtttgatttctttaatccttccagctgccctgtgggctgggggccatccctaccctcattttacagacgaagaaactgaggctgggagaggtcaattaacttgctcaaatttggtataggcaaaactaggaattggcagacggtggttccagtgcctgccttttaattggtacttgaattatacgagtgttttcttccatcaataaaagaaatcggcgaacagcctcccatgggtttcagtaagtgcaagccctccttgtcatcccagacctcagcctrcccatttaatggatgaagacactgaggcctggagggaacagtgacttcggagccactctcctggactctgccactcctctcgcctcccatatgaacctgagtggccacatgaccctgggggagagctactcaactgtcccaaggagagggtgatgactgctggcctcccaccggccatcagcgccccactgactgacacccctgagtcagtctycaccctgraactgtttctctcactatttgccatggccttgggccgcttccgggggcttggcaaggcaggaggcgtggaaccaagatggtatgtaatcagaatgctatattttgttgaaaataagaatgttagtaatgggctggtttctggcaggtcaaactgggactctgaaatacatatttttctctgctctgccctaaaccttctaattartgaaaaygcacatttgcagacatcaatcaaatgtcatattccctagcagcttgtcctgggatcactgasctggtcacattccrcagttgctaactcagggcttgcagartrtgtgtgcacgtgtgtgtgcatgcgtgtgtttgtgagagagatacatgccttctggggagccctggtggcctgtttccttccctcccaggcccctgagcttctgctccccaccccgcccccagccccttgtcagcacatgcgcggccactgcaatgagatacagacgttcgcccaattaaaacacagttagtggaggacacatggctttcagggaaaactgctttctctcaggaagatckctgctgtgcagtattccatagctagaccccagctccactcaacagtggactccattaatagcctgggttttggaagaggcgatttgcttctggtaactggctccggtgcatggatgttccctcctcttgctggaatctctgcccgacccagacagtgcttgtgaaccagccctggtgggctccatggggttctgggtctgggaggcaaggacttgcctggggtcattctcattctgcacggcactagccatgctggctgcatgaagccgtatcacagagacctgtgggtcctttacatctgatcatcctgtcatttgtatctgtatctggggtggttagttgcaaacaattccacagtagccaaatcaagaaagtcactggctctcgcaggagcgcgattggtgtggggcgagcctgggggtgtagcccaggcaagcccttcaccctgatgcgcattagccttcttatccaggaaatggggggaggcggtctgggcccagggaggggagcatgccaagctggggatctccaccggtccaggattcagggcgcctctgaccgttctctgcccagtgcctcctgttcagttttacttttgtgttttccatttcacttctgcctctaggccagtgtttttcaaaatatgtttcctgagtggaaatgaaaaaatgttctgtgatcaggcgcagttgggaaatcctaggggagagaaagtgaactaggcttcctcaccgcaggacttctcagagcctttaaaatggtaattatgctccaggccttgtgcccctctacctaggcatcctttactggttgggaagagacggcaggttacgggtgagtccgggtaagtggagttgtgcctaagctgataacctgacgtcaccaacactgttctgtcaccttgctttggtgtggcttcttcacagttgtcacatctgggccgtttggagtgacctagcaagtcctttgcttrtctcccaggactttccggagtagccaagcagagccttcggccagttcccttgtggggccaggccctgcccgggagcacaggcaggagaacagctgcctccccgcctgccccagggccttggtgtcagggccatagcccccagctctgcggtggagcagcagggacctgcctggcccatctccctgttgagggaagacccggaggcgcctgtcctgttctgtgtgctccgaggtgtctgaaaccagctacctcattttctttttatcttttgcaagtgatttcttatttcctgctccacccccaaacgtgccccctgtatgtttcctgttcgcctgcttccctgacctttgaaatgtggtccctgctcgggaaacttgcctggacctcagtcaattatggttttcctctgggctgtgtgtgtgtgtgtgtgtgtgkgtgtttgagtgtgcaagtgtgtgcattaggattagagagaattcgatggggggccaggggccaacaggaatgggggtggctgagctgagaggccaagggcaggttccaggttgcattgagagccgaagctggtgagtgtgakgcgggcagatgtgaggtgtgtgtggggagtggggtgctgtctgggtgactgggctgggagagggcaggtgggggccaagctggaagaggtggtgttattctgtagcacctgatgtacacagaccttgggggtgcagctccaggctttytctctccccacccgcccctgaaggccccactctcccgccttctgcagccagccttccttttgtctgcccctgagctcctcygctcttgtggtcgttaagaaaagctttttataatccaagttggtttgggaagaggcaaactgtcctttcccaacagtcatatgccaaccctggccacatctattctggatttgaagcaaaatatggtatttattcattattgtcatgcaaatgtcagcagctcgctcattcttgatggagacagcacctggaatgggagggatgggtccacggccagcattggaggtgctcggccccagcacccgggccttgctctgcaggcagccctgctctgcaccgggccctgctctgcaccaggttccactgggtggcatcagccatgcctgccctgaggaggtgaagtgcgggctctctccagtgaaggtgcagaggcagggtgagctggcgggcttacggaggacgtgggcttcacctgggtccaggaggccaggtcacattcagccaagtattcatcagctgggtgtagagaccagggagggtttttaggggtgggaatggctggaggcatggaggtggtcagggtggagtctacgggagacttggtctactctggtgcggtgggattcatgtagagagagcccttgtgggctgaggccaggctgtggggtagatgggagagacctcctggcttagcaggtccttgggtggatggatggacggatggagggatgttgggggaattggtgggatatagatggttcagccaaggtggaaatgggggagtagagctattcctggggtgcttgaagatgtcagcaagtatcccactccagcttgagtttgcagagctttctctaaaaggcagaacatgtgcttggttaaaggaaacccaagattttattattgttgtaaatgtcaagtccctcattttgaatctttagacaactgcagaattgtgtcmctgacttgggtaaaagcccaaggaaaaacatgaaattatgttgccaaaattgcggtcatcgtagctgcatgagggtttgagtggccaccgccaccccagtaggagagacgcgtagatgttgaatacactgtgagctgcgtgcaggtaattgaaacgtggatgtggggaaggtccctggcttcatggaactgtctacataaaagcgagcctgggtgtttcctgtttcttctaccttaagaaatttccacgagaagctaaggtatggttttgccaagaatgttgttaatggcccagcaatgaatattttcagccacttgtagacacctgaacttcattcttggcaaacaggtgtatgattcttggacttggagagactgaactttgctgtgctcagaatggaggagaccagctcacttgtactttgatttctccctggtccctgtcattttagcctgatcagtgctttttcaagcatttccccttgaaggggagataggactttctggctcagggatggggaggcttccaggcagccttaaacattgtccctgccccaccctaagtatctttgaagtttcatgttttatcataaagtctgtgagaatgttgcagactccgttatagtcatgctagttttatttttttaaatgtggtttgaattttatataaagtatatggattatatctgagaactaatatgcaaggcctgtatgcaamacataatacaactttacagaaggacattggagaggactgcagtagatgttcacggataggaagacaggagatggagatggcagttgcccccagattgatcagtggattcagtgcaggggccggcagtgygctctcctccctgttctttcctcccaccccattgcacaaatgttggtgcctggcatttaaagaagcagaccaggcgcggtggctcacacctgtaatcccagcactttgagaggccaaggtggatcacttgaggtcaggagttcgagaccagcctggccaacatggtgaaaccccatctctactaaaaatacaaaaattagctgggcgtggtggtgggcacctgtaatcccagctatttgagaagctgaggcaggagaatcacttgaacccaggaggcggacgttgcagtgagcctggatcgtgccactgcactccagcctgggcaacagagtaagactccatctcaaacaaataaataagaaataaagaagcagcatgtcgagggtggtgctatgtagaggtgtcgggggtgattggcatccagcatccggaagcaaggtggggtagggtgcagaggtgactgacagcagaggctactggagcagatgggaagctggttatggagctaataagtaaattgattgagcaaataagtaaacatatggatagtaacacaagccaggctttgcactttggagaaggtgcttacaaacttggacgagacagtacccagacacatagctgaaactgtaggtactgccacrcacacatgcacagaaatagagaaatagtcatagatgcatgtgtgtataaaagtgtatgtaggctaggcacggcagctcatgcctgtaattccagcactttgggaggctgaggtgggtggatcacttgaggttaggagtttgagaccagcgtggccaatgtggcgaaactccgtctctactaaaaatacagaaattagccggttgtgggggcacacctgtaatcccagctacttgggaggctgagaatcacttgaacctgggaggcggaggttgcagtgagtcgagatcacgccattttactccagcctgggtgacagagtgagactctgtctcaaaaaataaaataaaataaaataaaagtgtgagtatacatacacacgtacagttggttcttgttattcttgaaagttatgctccataaagtcactgggaaccctgaattattgaatactgaaccattgctcctaggggaaacatcgggctaggttcctgtgagcctcaggtcacaacgtttttgccaactgttcgatacctgacctggcttttttttttttttttttaagacagcgtcttgctgtgtcaccccaggctggaatgcagtggtacaatcatgggtcactgcagccttgacctcctgggctcaggccattttcctgcctcagcctctccagtagctgggactataggcatgcaccaccacacctgtctgatttaaaaaaatatacagatgaggtcttgccatgttgcccaggctagtctcaamcttctggsctcaagtgawcctcccacctyrgcctcccaaastgttgggattacaggcatgagccaccgcactcagcccataaccttgtcttatgtgtgtttctaagacaccttatttaggctgagtgcagtagctcacgcctgtaatcccaacagtttgggaggctgaggtgggaggatcacttgagcccaggaggttgaggcggcagtgagccaaggtcacaccactggactctaaagcctgggtgacagagtgagaccctgtctctaaaaagcaccttatttactgtatattgttgattcattaacattgaattcatggccaactacgctataactcatacctgaataaagcctctcatgcatattctctctgtaaggcgtggggcagcctcatgcacctaggagcactacacagcagcatatgtgcaggggacattttatacagcaaaattgcccacaaaaagcacagtgatgtggaaagcatggcactagctagaccgagagaaggacacttgcttacatctcgacagccggagcaagaagatggggcgttgtggcctcagttgacctcagtttggaacgtgtgatggtgactcagttttttcacactctgcaagtcagtgagtgattgcagaagtgctgtgaggtttaatttgggggatataaataaatgttagcaagtaggcgagctcaagtacggaatctgggaagagggaagactgtacgtgtatatcctacctccatcagcagagaggcctagaagcaatgaccccaagtagcagtgagcacaccagagcccaggtctgggtttctgaataccattytccacccaaaggagtcagagcttgtccacgaagaagctggttctagggctggggcaaggaaaggtacaagccgagcatggggcatcttattgtgtaagaaagcaaagaagttytggaggactggtggggacctctgggacagaagagccagcttagaggggtgctcactgtccaaatctaggaatatttgaacgtcaaaatgttgtgtacatgccttagcgaccaacccacatttaaaacaaattcctgaatgagggctgtaactgtagtcccaagtcattcttttttgtagctcataatagcccatamtattactataccatatgtttgcatttacctatttttattttattttatttttttgagacagagttttgcttttgtcacccaggctggagtgcaatggtacaatctcagctcatggcaacctctgcctcccggtttcaagctattttcctgcctcagcctcctgagaagctgggattacaggcatgcaccaccacatctggctaatttttgtatttttaatagagacagagtttcaccgtgttggcgagactggtctcgaacccctgacctcaggtgatctgcctgccttggcctcccaaagtgctgagattacagtygtgagccaccgtgcccggcctgcatttacctgtttttaattgtggtaaaatacatataacacttatcgtcgtaaccatttgtaagygtgaagttcagtggcattaagaacattcatgttgctggtaaccactgccaccatccatctcccaccacaatttaataaatcattgaaaacagactttcttgaccacaaacaatggtgcagcagaagcatcatagatctctgtctgtcctgctggctgagctgtggcatccttccttttttatattgtaaaaactgtaaataaaatgccataaaaacgccagcgttgatctttgtggaacttgcggagctgactgtagaatgtgttgggggtataacaggaccagggcagcccaggtgtttctgaaggagacgaatcgggagggactcgctccgccaggcatcagggcagattgcaaagccttgtttttgcacatcatgccgatgcggggtggacagttagaccaagaggagcccggaagcagacccaggctttggcatcaggagctttggcatctggcagaactcctgtccctggggttggggtgtgargaggtgtgcagggtagtagcgtgaataactgctttgaggagctgaagctagaaggtgcccagagctgtgttaggtgtcagagaagttgtttgtgaggcattgtgagtagaattaagtaacttgagtgcgtaattgcctctggggatcaggcctgggcatgctcaacattcaccaagtcatgtttgtttttcaatgctccagctcttcctcctccaggaagcctgcccagtctacccacagccaggtctacccacagtcagmccttcctcttcttagaagcctgcccactctaaccgcagccagatcttcctctgtctaggaagcctgcctggttcacccacagccgtgtcttcttyctctaggaagcctgcctggtccacccatagtcaggtctacctcctccaagaagcctgcctgatccacccacagccagatcttcctcctccaagaagcctgcctggtccaccaacagccaggtgtacccatagtcagctcttcctcctctcggaaacctgccaactccacccacagccagatcttccccatctagaaagcctgcctaccccacctacagccaggtcttcttcctccaggaagcctgcctgggccacctgcagtcagcttatccatccccaggctccaggcattacctgtccatgcattcatcccaccttttcttcttgggtggttttgtgtgtgygtgtgtgtgtgtatgtgtgtatatcctgcccaactaacctgcaggctccttgamtytggagccctgatgtcttctgtttctctgtctcttccatcatgctggcactggacgcaggatcattcctgactgattaatctctagcttgtgtccaggctgcagcttgctccgatgagcagttggaggcctagtgtaatgcttggtgaatatatataaggcatggactgaaaatgttgcttattttggtatagtagcaaaggattgggttaccttgaattgagtcttgtttggtgtaaccatgtaaataaacagtgtaaaatataggctattggaatggaagcccagacatctgttatgaattctatatataaatattggatatgcttacatgggttaaaatgagattgttggcacttgggttttcaaactcctgattctgctccgggtaggactgatcacgggtcctgggactcaaggcaggaggggccacgagctggcctttctctgacactgacttgccagaagtgggcgttcctgggagtggcagacatgcacccactagagatagatytgaatcaccccctcacattctcctaatagtgccaagaacccacagcagagtgcrgggtgtactgagtttgtgctgagcaggggtgcctgaatcccggattgaagaaagtgttctacgcccgattaaaccaactgggaatccaggcaaaagaagacgttcccaggggaagccagcctgcccagtgtgcatggtgccttttaaacaaattatctgcattcccattgggatgaagttcacttgacaacattactcattggtttttttgcttttgtttagtttttttttttttttttttttttttgagacagaatctcactctgtcacccaggctggagtataatggtgcaatgtcggctcactgcaacctccgcttcctgggttcaagcgattctcctgcctcagcctcccgagtagctgggattacaggcatgtgccaccacacctggctaatttctgtatttttagtagagatggggtttcaccgtgttgcccaggctgctctcaaactcctgacctcagatgatctgcctgccttggcttcccaaagtgttggcattacaggtgtaagacaccgcgtcgggccttttttgtttttgtttttttgagacagagtctccttctgtcacacaggctggagcgcagtggcacaatctcagctcaccgcaacctccacctcccgggttcaagtggttctcctgcctcagtatcccaagtagagctgggattacagggacccacccgccaccacacctggctaattttttcttttttttccgaaacggarttttggtctgtcgcccaggctggagtgcagtggtgcaatctcagctcactgcaacctctgtttcccaggttcaagggattctcttgcctcagcctccggagtagctggtattacaggcgccctccaccatgcccagctaatttgtgtatttttagtagagatggggtttcaccgtgttggccaggctggtctcgaactccttacctcgtgatccgcccgcctcagcctcccaaagtcctgggattacaggcgtgagccaccatacctggccataatattcgtttttatgcatcattcctttttatggcccctctcacctccgtcaggtggtgaatagactacgtttcatttatccgttcatcggttatggacatttgagctgtttccatgttttggctttgtgaacactgctgttaacatgsgtgtacctgtatgtgtacatacatgagtagaggggttcagttcttttgggtmtatatgtaggagtggaattactggtcataggatcattctatgtgtaactttttgaggcactaccaggctgttttccacagcagccagaggtgtctttaaaagcagttgtcaactgggcttggtggctcacacctgtaatcccagcactttgggakgccaaggcgggcggatcacctgaggtcaggagttcgagaccagcctgaccaacatggcaaaaccccgtctctactaaaaatacaaaattagctgggcgtggtggcgtgtgcctgtaatcccagctactcaggagactgaggtgggagaatcgcttgaaactgggaggccgaggttgcagtgagctgagattgcgccatcatactccagcctgggcaactagagtgaaactccgtctcaaaataaaaataaaaataaaaataaaaggaatgatcacttcctgtttcatgaatgaggaaactgaggctctgggagatgggaaatcctgcccggaatctcacagctggaggccaggccrggctttgaatccaggcaactgagtctgagtggatggtgtgtgctttgtgttggagctggcccagggctggatgaaggcaacatttaattaatgaaaaccactacccmctcccggctgttacctcttgagcgcttttctatgaagcatcctgtttaagcctcgcactctgtgatgtggaggtgcagtaattatccccatttcacagacaggatgttgaggtcagaggggttgagtgattgtcatgggccaggtctcagccaggcttgctaaccctggagtctgccgtctgctctgaagtggtcactctcagctggagagctgacctggcccttttgcctttgtgatgtacggtcctgaaaaaaatatttgcagaaatagcttcataggaacatatatggaatttggaattaaaaaatatattaaaaactatatatttaccagtattacaatatattacccagagacttgtctccctaatgaggccacctttactttttcaatcttygtctccgctggtgctttctcataactgccattcattctagtagaaatcatggttcacggttatgctgggtgtgtggtttttggtgttgacatgtcgaacgttttgttgttaccgcagtcattttgttactagttaattggtgctacctttccacggagacaatagtytagttacccctgccgctggagattgttcttttttttttttttttttttttttttttttttgctattacaaataaggcctcagcaaatattgtgactcaracgttttccttctttctggtgtttcttgggacaractcctgcaggggtgatccctggggagagggcgtaattattttatgttcatgatgcrgcagtcaccaccgtgtttctgaaaggtttgttctgcactctgggctgccagttgacattyggtttttcatggtgatctggtgggtcctggggtgtgatggtggccgggcccagctgcttcagccctcagcctgtccatcccccacccacacccagaactgaggctccaaggtgcagcctcaggtgtctgccaccctgtgcatccctcatcgccccaggtctgttgccctcccttctcctccttctcaaattacgctgcccagaggtcaggctagaggtcagcaggtccatcactggatggaatgacctggggcaggccaaggtatctgggggctgtgtagctgtgacccctgagcttcagggggctgtgaaacgagagaccttgggcacatgggcacatgacgtggtgggaaggcgcccagaggaccagcacccgccatgctacccccacactctgctccagtgtgctcccaccccaggacctttgcccaggcctgccggctccttctttcccagcaaggcctgctctgtctcaggtagcatgcagccccccgacccacttctcatgtagcatgcagccccccgacccacttcaccctgcaccatttccctgatctgcagcgtttatgatgtaacattactaaggtgtccttattggctatgtgtattgcttgtttattaccacccacgtgaatacggagccattcaggccgtgtcctgggtgtctgggtgggccagctggtgctgggcactcgcctgctggaggagtgagtgcccatggccagcccctcctggtgcctgggctgcgtctcctccttagtgtgctgcctctacaggcttttctcctgaactgtcctctttgctttttttttttttttwaagctttaaaagaagtttttgtaragatgcggtcttgctgtgttgcccaggctggtcttgaactcctggcctgagatgatcctctctcctcggaaagtgctgggattataggtgtgagctacggagccggcccttcccttctactctgctactctgctgttctctctccctcccgtcgggttctgctcctgccacgttctcccctctccccaccaaaggctgggttttctttgtcagggctcctttcccctttggagaagagggggcygtagggccttggtgcgaggccctccagtgacaggatcccccatcacccagagttccacaggccctggtagggaggagggggagcagaakaggaggtgccatctttgcctgctggggaagggcaggggccacccacacagagctctcccatttgctgtggaccctggggccactgccagttccttccaaaggaaagccagctccccaggtggtgggagagtgatgtggcttcctcttaaacttaggaattgagtgtgtggttgcttctaagtgycttagaagccggagcggctcctggaaagagcctgcctgccacagcgggccttaccctggctgtgcccacagatgtccctggggcctgccgctcctgcccggctctcctggcctcccccggtgtgggttgggaaaagcacagcaaattaaaaaacacctccatctctggcctttgaagaatgcatctgaacagccgagagtgtaaaccgtggtgaaatgtggtctttccagtttggggagaagcagggcagagctggggcttttgtacccagggtttccaagagctcctgcctccctcggctgggctggccagggccccccgctgggacctccagctgtaatagggaaggttttactgggttgctggccactgtggactgcccctaagggcaggtatgcctgcctttacccgggttcccctcctgcctggaagatacagcccatgggaggcctgttgtctgtgggatcctccagcatcagagacactggggccagcgtctgcctggtgaggtgcaggcctggcaggcccggtcccccacctgcttgagcacccacggtggtgggggctcgctgcctcccgagacaatctatgtcattgttgtccaaggaagctaatttagagtagaaagttccgtgtccagtcccactctgtgcgtgtgttagcaggggactctcgggccggagctgggtccaccctggtagggggacttcatggggcctgggcgacagcactgtgtatttgtgtgtgtgtgtgtttgtgtgtgtgtgtgtctgaggaggtggaccagtttctcaaaaggcctgtgaccccaagaaccaaggaatttcagcctgggtggatcacaccttcactggtgagtgggacaagctgggggccctcrccacaggagcagccagggcatggggcacagttggcctcattcacaaaatgggagtataagtgatccctgctctggcggccaggacgatgagtgggaacacaccgtgtgggggcygcctggcctgggtgtgccgcgggtgtccttgttggtgatggttccacctgcttgtgccaccagtgccctctgggtctcacacacaactctcttcccagcgaaggcccctcctgycctcargcctcagtgctgcttccgtctcggaaggccccaggagctcctgcatcctgggsgtgattcctgtgtgcctgcagaccccctcgcggctgccatctcatcctttggtgcacctgttggccagacctcctggtagcgggtgctgcactcccctgaatgtgccrgggcctgggggcagggacctgggctcctccctcactgagtggagggaactcagtgtcttggagttggggtgcctgcaggctgggtggtgcaggtgaaatgcagacctctcagctggtgttccagagcagctgccttcccccgcccgagggacttcacccgcagcccagtcaggggtggcgcctgggtgcatcgcccgcaggctgggtaggggtggagcctgggtggccctgcctgtgagctgcatagttgtcgcctttgaccctgagttttcttcgttatctgtttggacctgtttggggcrggcaggggatgagatctgaagataaatgccttagctgtgaccatctccttttgtgagaggtcaatgtccagttccgctgcagttatamcatcccattttttgatttctttttattttttcctttttctttttgagatggagtctcgctctgtcacccaggctggagtgcaatggggtgacctcagctcactgcaacctccacttctcgggttcaagtgattctcctgcctcagcctcctgactagcaggggttacaggcgtgagccaccacgcccagctaatttttgtatttttagtagaggcaaggtttcgtcatgttggccaggctggtctcaaactcctggccttaagtgrtctgcccgcctcggcctcccaaagtgctgagatgacaggtgtgagccaccgtgcccggcccagaactctttaattcccacctgaaacttgccgccttaagcaggtccccagtctccctcccctagtccctggtcccaccattctgctttctgtctcaatgaatttgcctaccgtaagtacctcatataaattgaatcataaagtatttgtctttttatatctggcttatttcmcttagcataacattcttaagtttcatccatgttgtagcatgtgtcagaatctctctctttttttttttttttttttttttttttttgcagacagagtctcgctctgtcatctagactggagttcagtggcacgatctcggttcactgcaacatctgcctcctgggtccaagcaattctcctgcctcagcctccttagcagctggaactacaggcgcgtgccaccatgccttgctaatttttgtattttttgtggaggcagggtttcaccatcttggccaggctggtcttgaattcctgacttcaggtgatccacccgcctcagcctccccaagtgctgggattacaggcatgagccaccgtgcctgaccagaatctttttcctttttgagactgaatagtactccattgtgtggatggagcagattttgccccgctattcatccctcagtagagggacgcttgggttgcttccatgtttgtttgtttttttgtttttgttttgctgttttttgagacagagtctcgctgtgtcacccaggctggaatgcagtggcgcaatcttggctcactgcaacctccacctccagggttcaagtgattctcctgcctcagacttgtgagtagctgggattacaggtgcccgtcactacgcccagctaatttttgtattttagtagagacggggtttcaccatgttggccaggctggtctcgaactcctgacctcaggtgatccacccgcctcagcctcccaaagtgctgggattacaggcgtgagccaccatgcctggctgcctccatgttttagctgttgggaaggatgctgctgtgatccaaggtgtatgcatatctgattgtgtccctgttttcagttcttttgggtatataacccaaagcgaaattgctgggtcatatggtaattctgtgtttaagtttttggggaactgccatgctgttttccatagtagctgcaccatttcacatttttgccagtggtgcacaagggttccagttgctccagatcctcaccaacacttgctattttgtttttttgatagtagccgtcctaattggtgcaagatggtatcttattgtagttttgatttgcatttccctgatgattagggatatattaagcctgttttgatgtgtttattggccatttatatgtcatctttggagaaatgtctgttcaagttgtttgcccatttttgagttggcttagttgttttctcattgttgagttttaggagttctctgtatttcatggatattaatctcttagtagatctatgatttggaaatattttctctcattctgtgggttgcctttttactctctcgatagtgtcttttgatgcacaaaatctttagcttcccatgaagtcccgtttgtctttatttgtggcctatgccttcctgttgtttgactttcacagtgtccctcgttgccacaaagaacygtagacctaagatgatgacagcacgggtggggcggcggaggcgccgctgtcattttcctggcctcaggtcctctgtgtgtcctcccatcctgtggagcatgtctcctgggaatgggaggggccaggatttgagccagtgcttgtcttggcagggaggcctgtgctcggaaccatctaccccactgcgctggggtctcctgggccatgctctggccctttgtgttcccagctaccctcatagaggctgcaaatctttcccctgctgaaatgaaaccaastgaactaactacaggattcagttctgtgattgtcattggctgagttgagtttgttttggctttctctttcttggtgaaggtgggagtgtggggttggctgggctcccccatctgcgcaggaggacccaggggtctgcagttttcatgaggaatgtcagctgtttcaagccaaggcttcagatgttttttgggggtgtttgtggccagcccagcctagccctgctgacagcagacacggactgatggagctccctggaggcccttaacctcctcctgtccacatcttgtgttcactcctcatgtggcttcttagtccctctgagtctgtgttgggggttgctggaccctcctggtccgacgtctgaggtgtctggtggggtgatggtctgaaggcctctcctgatttctcattgagcccgttgtgggaatgagaccgttgtctgtgagatgaggcttcttgcacaggcagaaggggytgagggctgcggtgcagagggaggtgagggagccagcctggccgcaggcagatcaggaatgcttggggtggggtggtggagagaagtgtaggtgaggccagaggccaaggccttggaggccaggctagggggtctgaccttgttctgcatggcactggcacagggagctgtggaaggtgtctgagccaaggggtggcattccagagtgaccctttaaatgtaggaatgtccagaagcagggtgggagaaacatggaatacaggggtggatgggaagctgatgccacggccaaggaaacgggcctgagcttggacagtggtcaaagacttgtaagggaatcttgaggctctgtytggcctgggctctgaacccctcaaaaaatgtggccctgtggctgggtctgtagcgagcagcatggccagtgctgtgcctgcatgtccccrtcccctgtgtcaggccaacaaaggggatgtggcttctctgcagaacaggacagggcccctgtagcmtytggaggacgatgtgggaggttttgggcatggcaggaagggtcacccatatctgggggaacagacgtaacagttggtaaacaaacaggtgctgtcaccgaatgtgggaagaaggctgtttgctgcgctgcaggagcctctgaatgatgcgggccggggctgcccaggcaacttcctgacaacgccttaggggtgggaggaaggaactggaggtcttgggcatgggcagggcagtaccaggagtgctctgggcatagtgctccatcccagggctgtgtatcttgctggcttagccagtggccctcacggtttgcttstgccccacagcctcgccgctcctgctatttgccaaccgccgggacgtacggctggtggacgccggcggagtcaagctggagtccaccatcgtggtcagcggcctggaggatgcggccgcagtggacttccagttttccaagggagccgtgtactggacagacgtgagcgaggaggccatcaagcagacctacctgaaccagacgggggccgccgtgcagaacgtggtcatctccggcctggtstctccckacggcctcgcctgcgactgggtgggcaagaagctgtactggacggactcagagaccaaccgcatcgaggtggccaacctcaatggcacatcccggaaggtgctcttctggcaggaccttgaccagccgagggccatcgccttggaccccgctcacgggtaaaccctgctgcgactccacctgggtccagggggcggggagtgtcaccatytctctctcgaatttgcatgagcccaagttgtttttcagaaaaagggtgtgactctgaaaatgaacccgtgggggggttggctcargcctgtaaccccarcactcggtgtgactctgaaaatgaacccgtggggktgttggctcaggcctgtaaccccagcactcggtgtcactcttaaaatgaacccgtgggggggttggctcaggcctgtaaccccagcactcggtgcgactctgaaaatgaactcgtgggggggttggttcaggcctgtaaccccagcactcggtgtcactcttaaaatgaacccgtgggggggttggctcaggcctgtaaccccagcactcggtgcgactctgaaaatgaacccgtgggggtgttggctcaggcctgtaatcccagcactctgggaggccaaggcgggcagatcacctgagtccaggaattcaagaccacactgggcaacatggtgagaccccatttctacaaagtatacaaaaatgaatcgggtgtgatggtatgcacctgtaatcccagcttcttgggaggctgaggtaggaggatcatttgagcctgggagatcgaggctgcagtgagctgtgatcccaccactgcactccagcctgggcgacaaagtgaggagatcctgtctcaaaaaaaaaaaagagctcagctttcaaratttgttattgttgaaggaattacttccccttgagattccatagttatgttccyttttttttttttttttyttaattgagatggagtctcccttgttgcccaggctggagtgcagtggcacaatctcggctcactgcaaccttcgcctcccgggttcaagtgattctccygcctcagcttcccaagtagctgggattacaggcgcccaccaccacgcccagytaatttttgtagttttggtacagatggggtttcaccatggtgtctaggctggtctcgaactcctgacctcaggtgatccacccacctcggcctcccaaagtgctgggattacagacgtgaaccaccgtgcctggcccatagttatgttcctttttaaaacttgcatgtctgaggcaaccgatgtggttggccatgggtttgaatggttaaacacatctttgctgtgtgtatggtgggcggcctgggaagtgcggacgctcaggcaggtggaatttgcaccttctcctggctttctaattgcattggctgaaaaagtgcagctccttgtctggaagcagaacctgctgggagtggttctcgggtccgttctggaagctgccctgtgtcctcctcagctcctagtctggctgagttcacctgggcccttgaaggctcagggcctggccgtgatcccaggtggggagagcgtgggtggcaggaaagctttggagtcgaagtccggggtggagagtttaaggggaggtggcccagctccactggccagctaggccaggtcaccccagactcccgagcagagggaacagtttgcttggccaccccttgtccctcctttgtcccttttcttgcagcctgggagtgactctgggggccgtacacacacccttacctgggctgtgctaagccctggcccttgctgacctgtcaggttctgtgctgggtcagtgtcagaactggttggcagaggtcttgactagaacacaagagccatttcccaccacccccaggctcagttggaagccctttgcctgttagttcattcagtgtcaccacagtctctcagcactcccagcctggacctcaccggttgaggggccggcctagatcttctttgcgcaatggcacgatctcagctcaytgcaacctccacctcccgagttcaagtgattmtcctgcctcagcctcctgagtagctgtgattacaggcgtgcactaccacacctggctaggktttgtatttttagtagacacagggtttcgccatgttggccaggctggtctcaaactcctaacctcaagtgatccaccctcctcggcctcccaaagtgttgggattgcaggcgtgagccactgcacccagcctgacctagatyttytaggttagaaagtcccaggagtgggcggccrtgcatccaggcctgccacaggagcccgcctgccctcctccctgaagtcagggctctggaagcccttcccttkgccatgccctgtgggacagtgtccaagctctggagtaggactgaagacccctgggctctagtcctggggccaccaacttgctgttgccctttgcagtgacctccccctgactcccatggtgccggctgcaggagccgggcgggaggggctggttgccagatcctgcagatgcccctcctctgggcctgcccagggtagtgggaatgagggtgtggggtgagggtctgtcctcaccaaggctggtgtttgggagctcaggaagcagagtgccatgtggccaagttcacctctttgatctgtgtggtgacttaggaagccattgactggcttctgacgagcatgggaagggctggagcctttcagagcccaacaggtttgtgtgagagccaggcgtgtgtgtgtctgagcaactgagtgtgggagtgggaggatgtgagcgtgtgtgtgtgtgtgtgcgtgtgcacgcatatgcgtgcatacrtgtgagcctgtgtgtgtccgtgtgtgtgcatgcatgcgtgtgagtggatatttgtktgtgtatgagtgtgcgcatgtgactgtgtgtgcacgtgtatgtgcccgtgtgagcgagtatgtgcgcgagagtgtctgcatctgaaccagtctgtgtgtaagtayggggtaccagcaggggtgggacacggtggaatttatcgccaaagtattttgagtccctgaggtcaggccagagcagcctcgtgcccccactacctgagaagtgcccccggcctcccaggggtgctgtgctgggcaaccactcatccctggagcccctcgtatgccctcgctgccctccgagtgggctagccaccccygcagctgccggggagccagctgacctccggggcagcctctgttccgcttggtgaactgttgccctctcagccctctccccctgcactgtggctccaggagtcgcggggttactgaccttctttttggaagggtcggctggtgtagcagtgtctctggctaggagggggcatctgcagtagtcggagaggctgaagatagcagcttgctagaagccctctcccagggccggcctgcggttgctcaccagcggctgccatggccatcrtgtcgccaggacctgcgctcctcctgtcmttgcgttccctcccagcgtgggtcgctgcagctccctcacctcccaaccaggcatccactgcatttgtgagcccttgcgcctggtcctgctccccacgcagcgggtatagcccagtctctggccctttcagtgagtgggaggagatggtaaatgaatagtatttgaaagggacgtgtgcgtagggggataaagcagtgcttgggtgctgtggcgaggggcttccgtcggagctcaggtgctgggaaggcctcttggtgacttttgagtcgagactggaagcagatgaggctgagaaccgtgtggctgtctgggggcagcgcggtccaggcagagggatcagccagtgcaaaggccctgggctggtttggggcggggcctgtttgaggggctgtarcagaatgtagggaaacagggcccaaggtgtgaggagaggacacatgaggtctcgagcagaggaggtgccagctctgactcgtgctggaaggcatcccctggtggctggagcgagagtgagctgtggggtgggtggcgtgggggcaggagccctctccacrgttattaccgggatcctggcgacagaaagcagcagcggggacacctcacttgtgggggtaaggagtggcgagatttgggatctgttctgaagagaaaagacagctggatttgctggcactctgcatgtaggttcgataaaaagatgagacaaggttggcacggtgccactctgtgcctcagtatccttgtctgtacagaggcgtgaccatgctgcatgtcatgaggaaaacaccaagaacagtttgtgagttcaacaaatgttagctgtcgttataataaaaatgccctttcctcgccaccagaagtccagtctccatgcctacgtggttttgtctttttacttctttatggcttttgctatgttgkttgggaagtgctcagtgctaggttgggaggtgatcagtcgggaggtgctaggtgatttgttgggaggtgcatgatgctcagttgrgaggtgctaggtgctcggttggaaggtgattggtactttgttaggaggtgcttggcgcttggttgggagttgttggtgtccagttgagaggtgctaggtgctyggttggraggtatttgattgggaggtgcttggcrcttggttgggaggtgctctgcacttggttgggaggtgctcggtgctaggttgggaggtgatcagttgggaggtgctagatgctcwgttgggaggtgcatgatgctcagttgggaggtgctaggcgcttggttgggaggtaattggtacttggttgggaggtgcttggcacttggttgggaggtacttggtgcctggttgggagtagttggtgtccagttgagaggtgctaggtgcttggttgggaggtatttgattgggaggtgcttggcatttggttgggaggtacttggtgcttggttgggagatgctgggcccttggttgggagtagtctttcccatgctcagatctgagctggctttgcctgcatcatctctgcgagccaactgtccctgtttggctctggcttttcttaactatttgaaatggttcctttacatgcttgcctctgaattctctcccagaasccctccccaggatcacacctgtggctgttcactcccacccctgcccctggggcaaagttgaccttagtgttgattcctgggcctctccccacaccttccctttgctccagtcatttgaatgagagagtgaaaacagtgagatgccggctcccactcatcagatccagtgatgctgatgacgccagccatggtcctaccctgaggtgctgactctgtccctgtaggctccatgtctccggagagggagagggagagggagaggattccagcctgtcacagcgcccgcggcagcaacccctgctcgccaaatactgacttgaatagtggtcctcaggcataagtgtgggcgctgagtcctggggcaggactgctgtcctgagagtggggacagtggagggtgggtttgtcctctgtcctggccacaggcacacggttgcgaggagcatcttggccttcctcccggccctgctagagcccccgtcatctcctgtgccctcctgcagtgctgtcccccaccagggtccttcctcagaggagggggttcctgccccggccatcatcaggaagggggtctctgggtccgagcgtccacctcagtgtgcacgtggccaaaaggatcaagagccctgcagccaggggggcccctcctgagactcgacttcgttgcagtttcagcaatgcaggtggccccgtgcggacatccaggcagggttgagggaaggcacatccctcccaggcccaggktacccatgtgggtggcagagcgggctctggggatgaccctctggcccctgaggatctggggccagaaagacactggcttagcatgggaggagtccccggcctgtaccagcctgacaaggggctgcagtggcccccgggtctcaaattaaagccagggtgaaacccaaccccctctttaaaatgcaaaatggcccttccctaaaataacacacaaccacaaccgcagctggctctgcacgaaggccatgctgcagctcttttcttcggaagtcgattttcctccgtggaatttggctgggcttgtggtagcgtttgagactctgcaagagcacgtccacgccaaccagtctctggtcaccgactggctcgcaaattccccatttaaggaaaccagcaggcctctgttatgaaactcggggaaggaatgtgaattatgctccatgcggaggctcctgctcctgcacgttttccagccttttccatgggccacggtggagcatttggggaaggcctgtgtggattcccccccaagtccagactgatgcccctgataccttctcaggaggtggcggagggtctgggctctgtccaggctcctaggggtggggacgtgcaggtaaagcaaggcgtctgccgcaggcacgcgggagccttccctgggctggctgccagcaccttggagtcccaggctgccaggaaaagttcacccacacccgggctttgctggcgaagggtgagtcatatgatggccgggctcgggccctcagcagacaccaagtgtgttcccagagcagccgctcagcgcctgtaacctggaacaggccagcctttcggggcctcagttttctcatctgcctaatgggaatagcaattcccaccttccctktgttggttgggttctcactagatgcacaggagacagcagcttgagagggactgtttggagagctgttccatgtgacacccctcttaccctgtccccacggggccggaggagcaggggcttggtgatagcagctgggcgcagtcagcctctgcagggaagagggcatgtttggttcgaggctcctatgccctcattcttgttgatcttgtcacagcccctctggaaggtggagatggtactcgctcaggaacgataccactcaaggaagcatgsccccctggatggggtggccytkggtgcacctgaggctcctgaggctgcagagcaccatggtggggraggaggcggctgtgtgtctgtcatttgcctcttctgctgaatggagacccccagagggcaaagcggggcttgttctccctgtgtcccgggatcactctcatgcctggcttgggcgagctgcctgtttctaaatcacttgctaaggctgaggggaatggggtttgccgcccaccccaggaagaagggagcaagggagtcagcaccattttacaaggaccaagagtgggaggaggctcctcagaggacattctgggcactgtcccctttctctgctgtgaagggtggacaaaacacaataggtctgccagcccttgtgtcctgtggctcatcccagctggctggsatgggaactgagtcctccaagctggtgtggttcccctctggtctccgctgagagtcacgcccagcctctgggcacacaccctgtggtcacctccaaacagggcacactgggcactggtgggggtgggacctgccatcccagacctggtgtctgctcactttgtcttggttcattggccagagatcacgtaagggcgccctgaggatgtgcttgtttctcatggatgggtgatgcttgtctcttgggaacatggagaagcaaagccacgtcgcccmcagacctacccaggaacagctgcagctgcaggttcagggtccatcccagccatgggttttattcttttttttttgagacggagtgttgctgtctcccaggctgagagtgcagtggtgtgatcttggctcactgcaagctccgcctcccrggttcacgccattctcctgcctcagcctcccgagtagctgtgactacaggtgtccgccaccatgcccggctaatttttttttttgtacttttagtagagacggggtttcaccgtgttagccaggatggtctcgatctcctgacctcgtgatccgcccatctcggcctcccaaagcgctggaattacaggcatgagccacygcacccagcctttttttttttttttttaggcagggtctcactctgtcatccaggctggagtgcagtggtacagtcacagctcactgcagcctcgacctcccagggctgaagggatcctcccacgtcagcctcccaagtagctgggactacaagagtgtgccaccatgcccagctaacttttttttaatttttattttttgtagaggtgggattttgccatgttgcccagggtggctcaagtgacccacccacctcagcctcccgaagtactggaattacaggtgcragccatcgtgcctggccatgttttgttgtttttaaatagacttaattttttcaaacagttgtaggttcacagcawaattgatgagcagcaggtactgagttcctatacatccctgtcctcacacccacacagccttcccaactgtcagcatcctgtgcagggtggtacatttgttacaactgatgaaagctggctgacgcaccatcacccaaaatccacgtttacacgagggttcgcccttgatttgtacattcttggtttagacagatgagtaaggacatgcacccaccattccatgtcatacaggatagttccactgccctgattttctgtgctccactcattcatccytctcctctccaactcctggcaaccactgatgctttactgtctctgtrtatttgctttttccagagtgtttagaactggactcatacagattggctctttcacctactaacatgcatttaagtttcctccatgtcttttcatggcttgatagatcatttcttttcttttcttttttttttttttgagatggagtctcgctctgtcgcccaggatggagtgcaatggtgcgatttctgctcactgcaacctccccctcccgggttcaaatgattctcctgcctcagcctcctaagtagctgggactacaggtgctcactaccacgcctggctaatgttttgtatttttagtagggacggggtttcactgtgttagccaggatggtcttgatctcccgacctcgtgatccacccgccttggcctcccaaagtgctgggattagaggtgtgagccactgggcccagccgatagctcatttctttataccactaaataatattccatcctgagtgttttgaattgccttttagaggttcatttacagcattttcatggtagcaaaaaaatcagaaataacctgaagttctttaaaaaacttacagcagagtacactaggcaatcatcaaaagaacaaggaatctttctatccacaagaagggaaggtgcccagaatttactgttaactgagaacaagttggaaatagtatattttgattgcccagcttaaggcaggaatacctgaaaccatacctgttggttatttccgatgggtgagattttagggcaagttcactgtctgttgtttcatgtctgcatctatgcagacaaaaacaaaaaacagatctgtgttagctgcttctcttgccctgcccccgtcacaggtacatgtactggacagactggggtgagacgccccggattgagcgggcagggatggatggcagcacccggaagatcattgtggactcggacatttactggcccaatggactgaccatcgacctggaggagcagaagctctactgggctgacrycaagctcagcttcatccaccgtgccaacctggacggctcgttccggtaggtacccacgcagtcctggggcacccctttcccctttgtccccagggcttttgaaggygttccttcttaactcaggcctacagactcttctctgaaactctggggccctgaggaatgcaggacttctcagaacttggaacagcgtcagggtctgtgtggcatttgccaccagcccttgaatatttctatagcaaatgtggcacgttcattctaagtagggcagaaaagactatctgtagcccacacccatgcacagtttttttttttttaactttgtttttttgagacagagtctcactctttcacccaggctggagtgcaatgtcataatctcagctcactgcagcccccacctcccaggctcaagcgatcctcccgcctcagcctcccgagtagctgggactacaggagtgcgccaccacacctggctaatttttgtatttttggtagagacggggtctcacatgttgctcaggctggtctcaaactcctaagctcaagggatccttcccctcggctcccagagtgctgggattacaggcgtgagccaccgcrcccggcccatgcaccaaatgaggttttgtcaccagatgagcaacaaaagctttccatcttcagagcgttttggattttggaattgttggggagggcttatggcccggcagggttgtgaacagtaaccctgtcacacgcaccacccccaccctggccctatcccagctcaggcatcctgagggcaacagccggaagctgtctcagttattggtgcattccccagtctcaccagggggccttccacatggtcagtgctcaataaaatgggccgagaatgagtaggaagggttttcccctcgttggttaattgcttttagagccttctggtcagcatagcttcccagctctgtacttaattaccccttatagaaacatcccttctgtgtacaggtgaagggcagtttattcactaaccaagtgctgcctgctgctagccctgtgctaggtgtcagggatcctcctgggacggcagaccccattcctgcactagtggagctcctggcccaggcagggatgtggcaggtgtctgtgcagagggcagtagtgactgcatgggaggactcagtggctggatttctgcaaacacaggccaacacccacatgaacagacttgagggcttgggcagctttgctccacacttgccaggcctcgtgtgttagttatccattgctgtgtaacaaaacagcccacaacttaacagcctgaaacagcaaacaggttttttatggggagggagtcagtgatgaggagtggattagctgggtgcttctggctcagggtatgacctgagggtacactcaagctcctggctgggcctcagtcatctgaaggtttgagtgaggccgggacatccacttccaagctcattctcagggcaagaggcctcagtttctcctgttcctcttatgctgagccacacatctcttttgggctggtttgaaaatatcctgttgtccctggaagtgcagaccagcgggtctggtttgagatttggaaatgtggttaccctgtagactgtggttcttgggagctgagtgatcttacagttatgaagggtggacaagaggatagaaaggctgcagctgggagtgccctggtcaaaggatggtgacaggggacagtgagggtgatggaggttgaaacatgctaatggtggtggcggtggcggcagcgaatccttccatagcacttactgttttccagggacgtttatcagttcatttaatgctcataccacctctatgaaacgtttgctattatgttttatttttatttatatttttattgttttgaggcagggtctcactttgtcacccaggctggagtgcattggcacaatcatggttcactgcagccttgacctctttttttgtttgtttgtttgttttttttttttttgggatggagtcttgctctgtccccctggctggagtgcagcrgcaccatcttggctaactacaacctccacctcccaggttctagcgattctcctgcctcagcctcccaagtagctgggattacaggtgcccgccaccacgcctggcaaattgttgtatttttttagtagggacggggtttcaccatgttggccaggctggtcttgaactcctgatcacaagtgatccacccacctgagcctctcaaagtgctgggattacaggcgtgagccaccacacgcggccacagccttgacttcttgggctcaagtgttcctcccgcctcagccttccaagtagctgagaccacaggcacgtaccaccacgcctggctaatttatttggtattttttttgtagagacgaggtttcaccatgttgcccaggctggtctcaaactcctgagcttaagccatgtgtccacctcggcctctcaaagcactgggattataggtgtgaaccactgtgcctascctgtgtttgctattttgatcccctgtgcacagagaagcatgtgaatttgcccagagccacacagctagtcccagccagggttggaacatagggtctgtagctccagggtctggtctgttctcarcctctctcccacctgcttccccgcgggattcttctgcctctgcagcggccatcgctcttcatgatgcacctggggctattcacatggaagcgtcgtgtgttgggtgacgagctctggagccacacagacctgtgcaggcccctttatctgtgactgtggctggggcaagggccgaggctgaccttccctcagtgcttctggctgaggcagagcatggcccagggagcaaccgagagtgatgggcctctggcttctctcactgaaaaatggccacatgggctgggcgccatggcttacgcgtgtaatcccagcactttgggaggccgaggcgggcggattacgaggtcaggagatcgagaccatcctggctaacacggtgaaacctcrtctctactaaaaatacaaaacattagccaggtgtggtggtgggtgcctgtagtcccagctactcgggaggctgaggcaggagaatggcgtgaacctgggaggcggagcttgcagtgagctgagatcccgccactgcactccagcctgggcgacagagcaagactctatctcaaaaaaaaaaaaaaaaaaaaaaaaaaggctgggcgcggtggctcacgcctgtaatcccagcactttgggaggctgagacgggcggatcacgaggtcaggagattgagatcatcctggctaacacagtgaaaccctgtctctactaaaaatacaaaaaattagccgggcatcgtggtgggcacctgtagtcccagctactcgggaggctgaggcaggagaatggcgtgaacctgggaggtggagcttgcagtgagctgagatcccgccactgcactccagcctgggctacagagcgagactctgtctcaaaaaaaaaaawaataaaataaaataataaaattaaaaaattaaaagtaaggccgggcgtggtggctcacgcctgtaatcccagaactttgggaggccaaggcaggtggatcatgaagttaggagatcgagaccatcctgggtaacacggtgaaaccccatctctactaaaaatacaaaaaaattagccaggcgtggtggccggtgactatagtcccagccactcgggaggctgaggcaggagaatggtgtgaacccgggaggcagagcttgcagtgagctgagatggcaccactgcactccagcctgggcgacagagcgagactctgtctcaaaaaaacaaaaacaaaaaaaaataaaattagaaaattagctggccatggtggtacatacctgtgttcccagctactcaggaggctgaggcaggaggatggattgagcttaggagattgaggctgcagtgagccatgatcacaccaccgcactccagcctgggtgacagagcaagaccctgtctcagaaaacaaacaaaaaagacaacattgtggaaaacagtttgttgattccttgagacgtaaacattgatttacgtatgacccagcaattccgctcctagctgtatactcttaagaatcgaaaacaggtcttcacacaaaatgtgaatggacagtaatgtccgtagcagcactgtgcacaacagccgagggtggaaatgacacaaaggtcccccagtgggtgaatggatgcacagattgggttctgtctgcacactggaatatggttcacccctaaaacgggatgaagcactgacatgctacagcctggatgaacctcraaaacatggtgccaagtcaaagaagacagacatcagaggctgtatattgtgattccgtttatatgagatgttkagaatgtgtgtagttaagtccatcaaaagtgtttgccggggctrggggcggggactggggagtgactgctgccgggtgtggggtttgcctgtggggcaatggaagtgctttggaactagacagaagtggaggctgcaccgccttgcgaatgcactaggtaacactattcactttaaagtggtaaatttaggctgggtgcagtggcttatgcctgtaatcccagcactttgagaggccaaggcgggtggatcgcctgagctcagggcttcaagaccagccttgggcaacatggcgaaaccctgtctctaccaaaaarataccccccaaaaattagctgggtgtggtggtgcacgcctgtggtcccagctactctggaggcggaggtgggagaatcgcttgaacctgggaggcagaggttgcagtgagctgagatcacaccactgcactccaacctgggtgacagagtgagaccccatctccaaaaaaaaaaaaaaaagtaaacgtatgtcctgtgaattttacttcaataattttcttaaaaaacagcatcaacaaaaatgaacagaagaggtggtggatctgcagagcccacagctcccatcttccctgtgccacttcatgagtgtcaccctctcctggcaactgtgctgagggctggggacgtggcggggaccctctgcccccaggcccaccctcagggagcctgtcacggggcgagggtcattaagcaaataaaactgcacattaccgaccacgtcacattatgatcctgtttccagtgtccataatctcattacacccgagtcctcatttgctgggcactgtaagcatctagaaaagaatagctgtttctcgggttgatgccaagtttcatttactctgaaagtataaattatgagcattgtaagaaggagcgagtgcacatggcctgatttgtatacagaggttaaagcgttgggcaggagaggtgtgctttttgccaggcatggcttcctcctttcttccctgggggagactttgccacttgacctgggggagcccgtgtgtcaccatcacaggctgtgtttgggaggtgccctgtgcacgccgggagaaatgtacgagggcgccagctcctggggctcttgacctggcctcacttgtctggttgaaagcaaatgggaagcctggcatggtggcgcacgcctgtaatcccagcgctttgagaggctgaggtgggtggatcacctgaggtcaggagttcgagaccagccttgccaacatgatgaaaccctgtctctactaaaaatacaaaaatcatctgggcgtagtggtgggcatcagtgatcccagctactcgggaggctgaggcaggataattgcttgaacccgggaggcggaggttgcagtgagctgagattacatcactgcactccagcctgggcgacagaccgagactccatctcaaaaaaaaaaaaagaaattaattgggtcagcagcaatgactgwcgggggaccctcctgatggctcctccaccccgcttccctgactgcaggcagaaggtggtggagggcagcctgacgcaccccttcgccctgacgctctccggggacactctgtactggayagactggcagacccgctccatccatgcctgcaacaagcgcactggggggaagaggaaggagatcctgagtgccctctactcacccatggacatccaggtgctgagccaggagcggcagcctttctgtgagtgccggctggggcgcgggggcgagggtgcgggggctggggggagcgggggcgcggggcakgggagtgggaggatgcgggggcgtgggggtgcgcgggcgtgggtggggtgggggggcaggtgacccctccctgcagaagcccatgctctggggggccccctctctaaaggggtacctgctgcaatggagggaggtrtgtggctggctgggggacacgggcctgcagaggacccctctgcagagctcatgggggctatttcaggctcagcagtggcaaggggatttccaaggaaggttgcctcgttttcaaggcccagaagaagttgtctgtgtgtgtgtgtatatgtatttatatacacatacacgtatgtgtgtatatatatatatggttatttatatatacatatatatgtgtgtgtgtgtgtgtgtgtgtgtgtgtgtgtgtgtgtgtatgtatttttaatagagatgagagattttgccacgttgcccaggcttgtctcaaactcctgggctccagtgatcctcacaccttgacttcccaaagtgctggggtcacaggtatgagccaccatgcttggccctgcaagtcgcgtatttatcaatgaataatctgcccagaatcagcagttctcagcctgggggccacgctgggttgtgacagaggtccctgatggggaaatgcaccagcttctgtgacagtggggctgcggctctggggacagtggcccactcccacagggaccagggatggagatttctggccaggccattatggaaggtttggactttgaattgaaatgtggggcctaggggtgccagctgttcccagagcaggacacaggagggtggggctctctggagctgtttcctggtgagaaagtcgtggtcacaaaacccatctacacttggggcagcatgagggagggagaggttcattttgatgagtttgttgttccagttatatccgtattttggggctgctacacccagctttcccctggtttgaatgaggtgctggaagcatttatcgagttccgttcaattgctgttggtcatagaagggcttgggagagtgacaagcttggccatcccagcaagagggacagtgttcctatggaagctgctgggtccacacatagcacaaagacaagacaagccttttgcccaggagcccattgtctctggggttcccgtcactaccacacaggcaggtcctgaccccggccattggagcgtggggggcagcctttgcagaggggtgtcctttgggggctccgaggagctggggagggtgttctagtcataggagcttggtgggaggragcagatggggaggatgtcactccatgggcaggtcacatctgggtgtgagggtggccaggaaggtcacggctggttttggggaaattgcaggccgtctggccaggctgagggccccatgtggacggggccagcgatgaggcaggtggaatggtgccmgcggggaggtccctgatgccacttgaggccgatgtttgggcagagggacacactggaggctgtcacgggggacgaggcaggatgtgactcattcagaaacaagtgacggtcctcttctggaaccttctctcactctgtcctggttttcycagtccacactcgctgtgaggaggacaatggcggctgctcccacctgtgcctgctgtccccaagcgagcctttctacacatgcgcctgccccacgggtgtgcagctgcaggacaacggcaggacgtgtaaggcaggtgaggcggtgggacgggacggggcgggcgggcggggcggggcctggcgggaatgggttgcggccgccgggggtgccccagaaggaacctcggcaaacccgttcgaaatgatccacttggcgggtgtggtgattcaagtctgtggtcccagctactcgggaagctgagttgggaggattgcttgagcccaggaggtcaatcctgttttgttttgttttatttttgccccagatattttccacttttttactctccgccttggtcctcaggcacttggtgcttcctgggactgtgttgcagtgaggcatggctcttctcctctggggcaccggctgaggatctttctttccaggtgtcggttcggggcgggcccttcgggaaatcacacacgttcaggatgcagctcgccttcggggatgctcccgggcctgggatagccagtctggcctctggggctgaccctggggcctggcaagcgagggggtaacgagaggtgtcaggaaagcgccatccctgggaccagtcctccccgtttctgtagcgtgatggggcccagcttgcagaaggtggtgggggacagggcctgcttcctgtgccggtgtcccactcgggagggcaggkggcttccaagtgggctggcttccacactcaggaacagtcctaagggcagagtctcggtgtggggccccctagaaggactctcctggcatccggtggatggagaagtgtccttgctctcactgctgtctgagcacatgggggtcctgactttaggaacagtttcctggtccccctgttcttgctggctagggtctgtgtttgtgtgcagcggctggggtgtgtgtgtggtcgtggcgcccgtggcgtgtgggtcttttctctgctccctggcaggggtcctgcgtttggtgaggattttccaggtttgtatttgtctttctctttctgagagcagggcatctttaatgaagacatggctgttacatcaaagggtctgtccgctgtgccggctgctgcaggggatggttggagagcctccccgaccaagcatcttgtttcccaagtcgggagaaggagaatttgagaaatggggacttgggcggcctagtcctcacggctctggacagcaccccattcattcatctgcttgctcattcattcgttcatccatccatttgctcattcagcaggcatttgtcgaacacttgccgggtgctggcattgctccgaggcactggggaccccgcggtgcagacagaatcccgggcctctggcgctcgcactctgggctctggggctgggtgggtgggggagacggcacaagtgagtccacgagggagtcagtgcattagaaagggtgagtgtcttggacacccgctcctccatcacctctggggcccttcgctgttgaccgttcacctcggcctcaaaggcaatgttgagagagaaactggacccagggaaggagtccagatgagctgcctcctgagtgacctggcgacaccaggggtttggaccaagcaggttaagggaggattatagacccttgaaggggaggagtggtttgaccaggttggatgagccctttgtttacagaggaggccagggcaagtcaccagcctggggttgcccacagcaggtggcatagtaggttctagcaggtggggtctggctcccagagccatgagtttgctgctgccccatacctgggccctggtggagcaaggccctggtctccctcgcagactgccccaggacgctgcctgctccctggaggagggggtgcctcggctgcacaagcctcagcggagaaggatgcttggcttgctggctgcccgggaaccttggccttctcagagtttgttttctttcctgcctgtctgttggtgagaagaggctgaactcagtgctggagctggaccctgcgctctgcagtgttggttgaagtcctggcggaaagggaaagagtgaggacatacgggctcatgacggcagggagtggccaccacagtcagggccgggggacggaggggagagagaatcaccggaatatggcaaaggtgtaaaacaggcagctcgggccgggcgcagtggctcacgcctgtaatcccaacaatttgggagtccaaggcaggtggatcatttgaggtcaggagttcaagaccagcctggccaacatggtgaaactccatctctactaaaaatataaaaattagctgggcagtagtggcacgggcctgtaatcccagctacttgggagactgaggcaggagaattgcttgagcctaggaggcggaggttgcactgagccaagatcatgccgctatactccagcctgggcaacagagtgagaccctgtctcmaaaaaaaaaaaaaaaaaatgcagctcgtcctggctagtctgaaaaaggtggagcatatatgttgcccaatatccacaaatattccagaaaatatctgagaagaaagcagttaatgagacgggcctgttcccctgccccgaggcacacgtgtggtgggggccatgtcaggaagcaagccggcacacagatggacataggacagacctggatcgggtacggaacacagcaggggctgagccggagactcctgtactgggggtgtggccgcctgagccggcaggtcagaggtctctctcaggaggcctgagatctgaaggactaaaagagggaaaggcgagaaggaacagcacgtgcagyggctttgaggcaggagcatgctggtgttgggaccgacttcacgggctgtgtgacctgtgtagtcatatgaggtgagctctgttgttgacctgaaattcctaccttttgagtaaggggctgtctgcacttccattttgcagcggtccccgcaaattctgtaacgggcccggctcgtgtgtttgagaagctgaagggaggtctggaggtggtctcttactctcttggtgtgtctgtctccacattttatcttctgtttttttgttccccagccctccctgcgtttttcctgtatgtgactgtgtgtctgtgtgggtgatcgaaccgtaaggcttcctgctatttatttcactttatgcactgcagaagcatttgcgattgcaggaggtaaatatgtatcaaagacatgagttttagtgaaggatatctttttttttttttttttttgagacagagtctyrctctgttgtccargytggagtrcagtggctcacagcagcttccacctcccaggttcaagcaattctcctgcctcagcctcccaagcagctgggattacaggcgcccgctactatgtctggctaatttttgtatgtttagtagagakggggtttcaccatgttggctaggctggtcttgaactcctaacctcaggtgatccacctacctcagcctcctaaagttytaggatcacaggcatgagccactgtgcctggcctatgcctgaacaatatcttatcaagacatgtcttttagtcatcctcccgctatggggcgtttctgttctctttgtgtttttgccatttctgagtcttgctgctgtgggttgggagtgggcaggtgagagctggcttggggcctggccactggagttagagggagcagggcctggtgtctgttgccaccatcgattggtgatgtctgcctaaacactgtgttgcatctgctggggatgtctgccttgggagagcaatgggcatgtaggaagcaggtgtcaccatctctgttcttggggtgtcaaagcaaggctgggtgtggacatttgtcgaaggagtggggaatggacacagcccccaacaagcagatcgtgcagtcgtgcctgtcaggtgccttgccctaacagtggaaggatcatttgaggtcaggggttcaagaccagcctggccaacatggtgaaaccctgtctctactaaaaatacaaaaattagccgggcggtagtcgtgcgcctgtaatcccagctatttgggagactgaggcaagagaacatgttgccctgggagcttttgttaagggtccctgtgtggctccctcacgtatcagagttccaggaacgggtgtgggccctgataaaatcccagactcatggctcagtgaagtcgcacagctggacaagcttggagacccccaaataacttgcccaggctaccctggcttgcaaagggccactgctcatccaggggtgacggagccgtgctgggtgcctggcatccagtgggtgcccagtgtccagctgccatgtccactgtccatgcccttatcaccttcatgttgtcaccatgaccggcgccttaggtgctgtggctggtgccaggcccgtgagagctggggcaggttcactcagggtccaggtttgcctgcatcgtcccagaatcctcccatacctgggggagtgggctgtcagtgggagccagtaaaggggcgttgatttctttcccaaccagaagaggcaggggctatagacttaggtggagcccctggctctttgctggctcccagggttctaacagctgggccttctgagccctggggactggctgctcgtggctgagcccttcaagggcattgcgctccttctgcaaatgtaattcccagtctccatgtccaggcccagagcagccctggggagtcctcagggctcattttcctgcaagcgggggagagggggggacaggccctgtggtgattagaggaggctgcctgcgctcacagggggtggttaggctacccagaggaggaggcccctgcaggctggcagggggcctggtggctctggccccagccctgggctctgtggcatggagctgacaccacagacacctgtggggttggaccgctggaytagcagcgagccctgcccttccagttggatagcttttccattccagagccgtcagggccgcagggctgagcacgcagctccacgctccctagagactcagccgtcaggggtcacctttctctagtcttgtgggaactgtttttgccctcagccgtgagaggcacttttacacataactcagttggagcatgactggcacgcaggagaaaaacattttgtgtcatttataggccctgcttgggcgagactctgggccgggaacgtccacatgcagccagtgtggggactgttttactctgagcctgaatctttctgctttggttccagatgccgtgtgtagggtgttctgtcaaagggaggaaaaagctcctcaatgagacagaaagatgcaactgggagtctggttttgcatgaggacgtgagcgtttcagttcacttttttttgtaagcatggttccccagtctgacctcagagctgcctggagatgggccccacccgcttcccgttaattaacaggctggtgctcggtgtggatgctggctcctccgtctccctgccctgggcccttttgaagctgaagtgttccaggggcagctggtgtggaaatagagttttctagaggttttagagttgagaagaaacctaaactcttcttagaagcatttcaagggtttgtcaccaggatggctctctgcaaatttgaggtggttctagaagatcttcccatatttcttaatccagagggagatggggatgggcgagaaacggctttgtccttaaggaagtcatgttctggttggaggacaggcacggcctagcattgaagctggtgagtcagagccggacctgtgagcggggccagaatggggcgcgggcttcagacttcacaaagcagaccacgcggcagcctggggctttagtatccaaatgtcctgccctccaggtttcattccttgccgtaaaatatcacgttaaaggaaaatgttttgttaaaagaccacagtcctgtcacctgagcacagtcgctgttctcggttcctctgtggctttccaggctgcaggtgcccattggtattgcggccgtgcgcccggcgggcatgaattagctgtgccgcctggctgctgacgggacgcctcgcctcgactgaaaactacctggagctgctcacccaggggcaacgtgaagaaaacgtgaaattctgtcgcttgttgcagctgacagcacggctgtgaggtcccagtgggcagaggcctcgtgcagggcacctcaccagccgggatgtcagagctggccagaaggagcggtgcccatggagggctgccagtgcccagagagccttccgaggtgtcacgttgggcagtgaaattcagagtcgggcagaggaggccctggggtcacacagggatctcctccaggctatgggttggtgaggtccagtgtccgggggtgaaggatagaggctctgtggtgagggctctggagctggccctgggctagcggaaacgcaggtaacgaaggaggctgtgctggtgggacttgtgcctgttcccgagggaggcattgtgagtgatgtttaggccaagaggattcaggatggaagacatggcttggtttgtagttgggagccggccaaggagtggtgttgagaaagtgcagtgtcaggcagacccgggaccgtggcggtgaggaggtgcagtgtcaggcagacccgggaccgtggtgatgaggaaatgcagtgtcaggcagacccgggactgtggtgatgaggaaatgcagtgtcaggcagacccgggactgtggtggtggygaggaggtgcagtgtcaggcrgacccgggaccgtggtggtgttgaggaggtgcagtgtcaggcrgacccgggaccgtggcggcgaggaggtgcagtgtcaggcggacccgggaccgtggcggcgaggaggtgcagtgtcaggcggacccgggaccgtggcggcgaggaggtgcagtgtcaggcggacccgggaccgtggcggcgaggaggtgcagtgtcaggcrgacccgggacygtggcggcgaggaggtgcagtgtcaggcrgacccgggaccgtggcggcgaggaggtgcagygtcaggcggwcccgggaccgtggcggcgaggaggtgcagtgtcaggcrgaccsgggacttggagcacctagttccacttgcgggctgaccttctattttttgtcatcgtgttgggagcttaggaaagtgacttaacctctctgtgcttcagtttgtccgttggtagaaagggggtgattatactccccgctccatggggtttggaggaaggctgtgtgggttgtgctgagcagcgtgatggtgcaggctgtctgggtcaktgccgagggagcgagtcttccttcggcggttgtaatcagaagtagcttccaaggctgggtgctgccaggaggakctggggtgggtgaaggggcagtggggagcacggctcacacggccagcgggtgacctggggaggacggaggggggtgtgctgggcgcttcaggygtgtggctccctttcctgtggggcgaaggtcaggaggggggcagggcctggctgtgtcagaatcactcagactcttaagacacatccagagtccccagccccaccccaacccaacgcacccactccaccagaagaaacggggcaggtgggggccaaatctgtgagttcccaagggaggactgtgtggggcaggttgtggggggcggcgctagcatggctggaaacatctcgaggtttgaagccagagcctcaggtgagactcaagggtccctgggactccctcctgggtgtctgaccgtttatctttcatggagttacaggcgaagacatttctgtgatgtcttgaattctgctttttcctgattttgagcaaatgaaagccagctgggtgtagggagtcaggtgccttccccaaggaaggggctgagagggtggtcacaccrggaccccaagggacagggagcagcgttcccaggggcacacaggcggcctcctagaggtagggatgcgttggtggcggggggggccccgcactgctgtgtgccttcaaggtggcactatttacgtggcccctgagctgcagggtgaccgctagccctgggctgtgtcctggctcccccgcccctcctgaagtgacccccatgagacagggcaggtatatcccacgagcctctgccgcccagcgtggccggggctcagtgggaccatggcggctgcgatgctgctctctgcagctcagagtcactctcatccccagcagtcgagtgcagagcctgggcctccggcctccccaccccctccacacagccccaggaccaaggcrgcagctggcttcggtttctgccatgtttttccaattatgtggaatgagctaaaaacagcaggagtgaggccttatttgggagttgccaccgccatcctcggaagctgctgttcctcactgccacccctccagccccatcctctgtggaacgtgcccctgttcttttgacttttgtctcctgcacatccctcctgcttgggggcctttgggcagtgggcttagcggcgtgcaccatgccactcgggccacacrtgccctggccggtggctctcagagctatgtccagagggtggccaggcagtgctcccggcagcgcccagatgaggctggggtgcggcttggggatttgtgggccgctggccacagctcacccagacagagttttaacagatgttcgtctgtcagggacaggaaacaaaaagaagtcggggatggagtgggggcagcgggaggaacagagggggccactgtcgagtctgacgggcagactgacagctggagccgacggcaaagcccctcacgtccctccgtctgtccgggcggattagctcaggaagcagggcccgctcagctcggggccgaataacgggcgtttgttcccagagtctggctgtcttgtcacttatcagggaagtaggtcaaagggaaaaaagaaaggaggtcctgtggggccgagtctgccgcggccgggcagtgattggcgttgactttgcaaacagaaggcagctgctgttctcagccatggaccgtgaatttttaatagcaagaaaatcagctcacacggttcaggaagttgtggaagaagcctgagtgctaactttatttttttaattgaggtataacttgcaggcaataaaacgcacacattttaacgtgtacatttggattaactttgacagctgcatatgtctgcataactaccacacggtccagacagagaacatttctaccactgggaaagttcccggtgcccctttgccatcctcaacccccgccccctccaccactctcctgacttctatcaccttggattagcgttgcctgttccagaactacatggaaatggaaccacgcagctgtgctcttctgctttttggcctgaatactcactgtcagggctgatgcaagaggagaggggcgcatcatattcctggagaacgctgtcaccgtggagcgggggcacagggggaatggcatctctgggatgggtgaatgctgtgggcgcctttccacaggctcagagttagactgtggtcactggttttgtcccctgcagcctcttccatgtcccccttgtgactgcagcataagcccagctccatgcggaccccagaccagctccgcagctccaacagcttccctttatcttcagtggcgagctttgcgcttgcagggtgcggggcctggtgggacgcccacgttgcccagacagaacccttgtgcggctgcgggcactccttgccctttccgcatttggtgatgactccttgtttcgtttcactgaccgtgccctgtgcctctgctctccctccccagttccgtgtgccctggggtcagtgatagaagacacggcccctggrccccaagtctgctgagctgacacctcgggctgccgctcacctgcagagagacactagaaggctccgactcccttcctggcccccactctgtttttctaccttttaccgcctattccaatggaaatgcacgatttgtttctccctgtgcacatctgagtgtggacctccctgcccctgctcgtgctgtgcccaccacctggagcacccttcccctgccccctgcccccggccacagcgcccctccatccagaccccactcctgcacacggctcctccgcccgtgcgcagccctctgagagtgtggcaggtgcaccargctctgctctagggagcttcttcctcttcctgtgtcccacgggaccaacatcgggacccaggaaacaggctgggagagttcggtaacaccttcaagagggtttgagagctgaggttctttggtcttcagtggagctggcagtgactttcttgactttgtcaagagaagccccccgtctctgtgccacctctggggatstgattgaacggaaatcagagcatccgagttccagcctcagccctctgctgtgtggctgtgaaatgtaggccctgtgtgccttgctgacctgggagggtcgaaaggacggtgtctggggaaggatgcataagttgtagagtgccctgcacttgtgataggtggggccgcgtgaactgctgatagccatcttctgtcagttggggcagtggcattgtcacatggttccattctaatccgttattttggctactgccactgaggcggggtgggtgacaaaagtaacgtttcttgggggccactgcagcggtcatggtcctgagccctatacccaggcacgcgtcctgggagctgtgtgaggggtcgtccgtggctggccctgcttctttttttttttttttttttttttaattgagacagagtctctctctgtcacctaggctggagtgcaatggcgcgatctcygctaactgcaacctctgcctgctgagctcaagcgattatcctgcctcagcctcccgagtagcttggactataggcacccgccaccacactcggcttattttttgtatttttagtagagatggggtttcaccgtgttagccaggatggtctcgatctcctgaccatctcgtgatccacccaccttggcctcccaaagtgctgggattacaggcatgagccaccatgcctggccggccctacttcttaaatgggcctgaggcacayggtgccgagagctcgctgaggtctatggaggaagggcgcagatgggatctgggcctggcgtcctggccggcccccaaggccttctccacagagtttccatgtataccggggtggccttgcggaggggcgcagccatgcgtcaggctggagccagctgcagaggccacagacagggtgtcatgagcagtacaagtaaccgctgctgtccattgaacacctactgkgtgcctgggttcagaaaggcaccctgtgctggcttttaaagaattaggccgcytgcctaaaggggggagtgtggcyttctttttcatttaagtcaccaactgttttatacatccacgcccctaaattcttcagttttaggcaaagatgagagggctgcccaggcgtcatttgctcaacaaaaccacacttcacttgtgaggctgtgttccctcaccagggtccccagcaagggggtgtgagtgtttagtaccacagggagggctggcgcggtggctcacgcctgtaatcccagcactttaggaactcctcacctgaggtcaggagttygagaccagcctggccaacatggtgaaatcccatccccactgcctgcctggggagtggccatgcagccatgggcctgaggttgtggtggggcatgggggcagaggcaggcagtggggggccacaggaggggctggctggcaccgagggatgggagaggaagggacccgcctgcaggtcccttcctgaggccggcactgacttggtcactctctggctgccctgaccccaggcagagcagcgactttcctgttttagagctgagcagacagagcccctgactgcaggccaaggtgcctgccagctgctcctggagggccatagcctctctgtgcttgctggaaggtcccaggcaccgtgcaggtgacagtggccggcctcaggttccagcagagccagcatcgggcccagccacttcccttgtgctttgtgaccctatggtcacttggcacaggatcccgggtcaaatgctgcggttgcggcatttgccccaccacttacccctgggggcagcggagaaacttaatcaattgctaaacaacaaaaataatctggccgcctgccagctgggaagccactgtggccaggctgtttatggccttgggatctgcgcagtggacagtggcctgcaccrtgaccccgttcatcctgcgtgccccaggcccaggaggtggctcaagccctctgcctcctgtaagggcacctgagaaggaggccctggagctgggagcagagctgggggtgggcgtccgggcagcagaggccgattctcagctttccctggatctcagctttccccggatctcagctttctgctacccgtgtgaaaagaagccaggagaacacagctatcctgggttggtgccggctgtggtgggaggcctgcggtgggagcctccgggggccactggacctttcctgggtggcctgtggcctgggagctgcacttggttcggtgcagggaggttgtgacatccactctgtctgcagggatggccggggccctgcggctgggtgatgaggtgggatggaggtgtccggggctgccctgcctccttttgccaaaataacaaaaattatcttgtttgttgtgaaaaaacctgttttcccacattggggcatggagggtattaactgtgatgaccttctgagttcctgcacactggtgacccattggcagggtctcctcctggctctggcaggggtggctcaggccgctgggyracggtgtgctggccagatagttcctggggctgcaggtggcttctttcgccccatccctcccatcccctttcattcttcctgtcaacacatctcagaccctggacaccgaatgagccgtcggtacccacaccccagggcaattcagtggagsggtaggtggctcgttcccccacgttgccccaggaagaggaccctgtccccggcatcctgacccacctcccttagagaccgagagcctctaaggataaacccattcacccgtgtttcagargcttttttttcctcttataaaataacatttatacgttcgctgtagcaaggaaaacattataaaaaatagtgaagaaaatagaaattacccmtwattttgccacacagacttagttgtgtccatgtatcttgtgcaccttttttctgtttacggatcaaaatcgacttttagggtcaggcgcggtggctcacacctgtaatcccaacactttgggaggctggagttggggttggggggtggatcactgaagatcaggagtttgagaccagcctggccaacatggcgaaactccatctctactaaaaataaaagattagccaggcgtggtggtgggtgcctctaatcccagctactccggaggctgaggcaggagaatcgcttgaacccaggagacagaggttgcagtgagccaggatcacgccactgcactccagcctggcaacagagcgagactctgtctcaaaaawaaaaataaaaataaaataaataaatacataaattgacttttaggagattggttcaaacaatgtgtgtaatgttgtgtctgagtgtttttcatttatcgttcatgcaaattccgacatcattcactcttctccagagtgtgcygttttcctgcctgtgtcatcacccgtcaccttgaatgccctcgtttaggtaaaataagtacattttattcaaaaatatttgaggacatttgggttgtctccaggttcttggtcttgagttttgctgttcttgtggagccatggtggtgtctggttgcaggaacctccatgcgttccagctgctgcttctgcctgtgttcttagagaggaaatgctggggtccgcggttcccgggctgctgaccaggaagcctgcggtgctttacggcccttccagaagcgggagatgcccccacttaagtgtcagacaggcctttccacctcactggcagctctgagcggctcccttctatttgcagatgactgagaagttaccaatttccacgtttactgactgctgtttctcctgttaatttgtatttatagtcttcgctaatttattgctagggttttggtgttgtccctattgacttgtatgccttttaattttttaaacaacattaatagacttcatttttttagagcagttttaagtttacaggaaaattaagggacaagtacagagagttccttccacctgctgtcctcctctcctcctccccaccttccctccttcccctattgtaactttctttctgatattataaaagtcactcatggctgggcgtggtggctcacgcctgtaatcccagcacgttgggaggcagaggcaggcagatcacctgaggtcaggagttccagaccagcctggccaacatggtgaaaccccgtctctactaaaaacacaaaaagttagccaggcgtggtggcgggcacctgtaatcccagctactcaggaggctgaggcaggagaatggcgtgaacctgggaggcagaggttacagtgagtcgagatcrcgccactgcactccagcctgggcartaagagtgaagcttcgtctcaaaaacaaagtcacacacgcttcttgtacgagggtcatttggccgaggggccagatggctcaccatctagttgggacaggccatgagctcggaatgctttttacatatttacatggttgagaagaaaatcaggagaataatgttttgggacatgggaaaatgacatggaatttgcattttagtgtccataaatgaagttttgtttgctcccagctgtgttgactgaggcaggctggcttcctacagctgcggcagagctgaggaggcgggaaggagaccgtgcaggccgcagcaccgaaaatatttgctctctggcccttcccagagtgcttgccgacctctgtccgacagctagaaggaaggataggacccgtccgacgataaccactgttgacatttgagcgcgtttccttcccggcttttgtgtgagagtggcagtctgtttgcttttgtggtcgggatctgctgcacgcacggcgggctgtttgcatgaggcttcctggaggatagggctgggctcggagctgcacgcagtggggcgtgtcctgcatgcagtggggcctcagaagagagctgtggtgggcggggcagtgccaaygctggtgggtgccaggcctccacgctcagatcagccccggcgacaggtttgggccaccctctctctggcctctgtgcagtggcccaggccgtctgctctgcctggcacacttgcctctgtccttccactgaagcgctcctcttaccctctgctcccggctgggtacgttgaattgtgtccctcaaggagatatgctaaaggtctaaccccaggaacctgtgtatgtgatctaatttggaaacagggtcttggcwgatgtaatcaagcgaggatgaggtcaccctagagtagggggcctatatccacggtgctggtgtcctcatgagagcaggtgagcagacactgacactcaggggtgaaggctgcatggagtcagaacagggcttagtgcgatggcggccacaagccaaggaactccaagtatttcctgcaacaccagaagctggaagatgccaggaaggatcctgccctggagccttcggagggagtctgtccctgcagacgtcttgacttttgattgcagggatgcatgtcttagggtgtgtgggggggtgcatttctgatgttagaagccacctggttggtggcgatgtgtcacgggagccctctgcaggttctgcgtgtccatgtggtcggggacagaggtgggcagggacggacggtgtcgagctggacatgtccatgacgtcggccatcccttgggatggcttttttgttttgaggataaggctgcctgccaggaagctgtgccctgcctggcccttgccccaagcccctggcctgtgcttggcctcgcggaagggatgtcgcccttctctcctgcatgcgtgcagggaggaaggggagaggtcagcagcccgcctggaggaggctcgggcgaggggaaggtttcactttcaggcaatgttgtggggctgtttaaacaaccccaaagaaaaccatttggccaaactgttagtttccaaacattttacttccttggtgtttaaataaattcctaccaagactctgtagctggtcccagggaaggagttggcctctcttctttatagcccggcacagtcagtcccctgcacctgcccctcccaaccccaggcctgcttccccgtggccatggctgctgcccggacctctctacacacagaacctcctggaggccagctgtgggcaccagccttggcagggctgtggcggagcccaggctgctggtactctctctgcagctgctccctgctggcctggctggacagmgtccccaccaccactggggtcacctctgtgctggtcacagctcactcagaccttcaggcaaatgggttggatcctgcctctctcccaggtgtctcagtctctgcaaaactcaaaaacctcagaggccttgcagcctgaggggtgtcagagacacctccttcgartcagtaaacacctacagattcaccccagcagtgaaaggactgcttcgccacagaggtttgatttactcctaagtaattggaagggatgccgagaataggttcctcatggtgggactagaggccctctgctgacctagttamcagagggctagggctgggtgtgctcagcccctgaaggttctaggcccatttgggacaccccgccagaacctgccacaacctgccatgtggtgacagctacctaaatcccagaggctcttgagctggagagcagacctctcaatctcagcaggccccccacacagaccccataaccctagtctgccttcacagtacagttcgtggctatgtgttcacggatggtgtygttcacctaaggtctctgccctgtgaccccaagggcgtcctgagggcagattccaagtctgtttcgtccacccctccttccctagcagcgggtccagggcctggcctgaactagcttcccacagagatactggtgggatgatgaaggcagccaggcggcaagtgaaaaacgcacttcctgcatgtgctggctcctgggattgaagtgtttgaggaagcaaagtgaagtgagctttcctcttgcggctgtgtgtccttgggccgggagcctaccctctctgagcgttggggtccttgtcagtagaatggggcatcctcatagctcaaggggtggtgtgtgaaaattgtgctattgtgttactttaatgattttttttttttcgagacaaagtctcaccccaacgcgcaggctggagtgcagtggcgcgatctcagctcattgcaacctctgcctcctgggttcaagtgattctcctgcctcagcctcccaagtagctggaattacaggagtgcgccaccaggccyggcatatttttctatttttagtagagagggggttttaccatgttggctaggctggtcttgaactcctgacctcaggtgatccacctgcctcggcctcccaaagtgctgggattacaagcatgagccaccgcgcccggcctactttagtgatttcttaggaggacagagggaacgggctggcaagacaggcttggaatgtgttttgggatcaagtgccggtttctgtctggcactggcgttctctgtggggccatgatggacacactgctgaggtcaagcgtgattcgtcttgcgctgtgcctggcagtctcattggaaagttctgtagacatcgtgtggatggggctcttcccggccaagcccttggggaccttccaggactgtgatctccccacagtggctgttaagcagggacctttcgtgaagtggagtctctggtcccctccaagtcatagctagacagggactcgggcatcgccaagcctggctgattattcactggatgaggagacaggcccagagaggggcaggaacctgcccgaggtcacccagcaggccccagaggtttcggtctcrgattctccctgctcatccctggatgtagtgctgctgtggatgtggttctgtgctgggggctgtggagagcagggggcttgtgccaggaccccagtgagggtggcgccctcgccatgaggccgactgttggtatggggcggccatccactggggtgtggggaggaacagctttcctgaggaggaggtggcgggaggaacagcttccctgaggaggaggtggcggtgctgtgtgacctgggccttgaaggacaggtccattgtcaacagaacattttgggagtggagcctagagggagaaaatttgttgaaattcagattcccctccccctaccaatacacaccaaatcagatgcccctgaccagatctaaatttggctctcagagatttccattgtagctgggcacttggggaaccttctaagtgctgcctctgcctctccccagcctgcctgcctcagtttccccagccctgggcccgtgtcgctgttgccatcacgtgggcgccctctagtggaggaatcagattatgcactccggggcttggagcaggagtcaggaggggctcctgtctttccttgaaacgttggatgccgggatcctggaacagtctctgcattcctcctggcgagarccagagcctrggcacaggggaccatctgttgtttgaaggctgcagcctggcagggcactcaggagatctggcagttggctgcagggccaggtctaggggccagggcatcagggaggctctgggctggttcagccccgggcccctttgcagattgtgacctgggcccctgtgcaggggcatggccacaggatgctgggaggggtctctgaccctgaccttcttggctctgtgcatccttgagaccagaaaggtctggaacaaatgagtagacgatgccctaacctggggagggagccacatcctgatcccagcaacctcrggaaggatctgtcaggattatggggcaccctgggggccccaagtctgcatgggtctccacttgcaatttctgtaggaagctctgataaatccaaactgggggtcmtaggacacagtcagaaatgctgataccgttgtgtgtggagcctcgggccctgggggtcaggagcatgtggagggtgggccacgggggttcagaagagaatcctgtaaccccccaccccccaaactgaagcccacttgagggccatggctgaaaggttggggggtctccgtgcgtcctgtggagtgggtggtgaggagtccttgggtttgcacgcctctgggcctgagcggcgggaccccgtccacagcggatccctgggccctgttgctcagatgctctcagagtgttgctgtggccacggagggagcctgagttaagcttctcttgtgccggttgtacgctgtcaggtcacactggtgagttaggcagggcacagatgcccagagcagagggaactttccttggggattcaacacgtgcaagtcttaggggctggcaaatcctgccctcagctagagagggggcttttatttgagaccagaatcacctgarcatcctcctgtccccagctgtgtccagcctgtctgcagggacatcctgagaggaccaggctctcccctcatccacctgcctaagtgccactctgaaccctgtccacctgtgccgtggaggggcgtgacctcaagctgctcagccagcagcaggcttggccctggggggcagcagagacccaggtggctgtggggtgggtgcttcgtggcgtggttctgaaacttcgttggaagtgtgtggacagtgccttgcctgttctctgtgggaccctatttagaaacgaggtctgagttactgggggtcatcactgtgttctgatggcccagctgtgtggaggccgcggtgcagccccatccaaggagccagggccctgggtctagccgtgaccagaatgcatgccccggaggtgtttctcatctcgcacctgtgttgcctggtgtgtcaagtggtcgtgaaactctgtgttagctcttggtgttcctgaaagtgcccccgggtctcaggcctcagaaccagggtttcccttcatctcggtggcctgggagcatctgggcagttgagcaaagagggcgattcacttgaaggrtgtgtctggccctgcctaggagccccccggcacggtgctggggcctgaagcygccctcgggtggtggagaggagggagcgatgaagtggcgtcgagctgggcaggaagggtgagcccctgcaaggtgggcatgctggggacgctgagcagcatggccagcagctgggtctgcagcytggtacccggcgggacttgtggttggggctggtttgtggccaggagaggggctggcaggagacaagggggactgtgaggcagctcccacccagcagctgaagcccaatggcctggctgtgtggctctcagctgcgtgcataacctctcagtgcttcagttctctcatttgtaaaatgaggaaacaaacagtgccagcctcccagaggtgtcatgaggatgaacgagtgaccatgtagcatgggctgggtgcgtgtcacctaacatcaccagcctttgcaaggagagccctgggggcctggctgagtatttcccttgcccggcccaccccaggcctagacttgtgcctgctgcaggcccttgacccctgaccccattgcacctgtctccacaggagccgaggaggtgctgctgctggcccggcggacggacctacggaggatctcgctggacacgccggacttyaccgacatcgtgctgcaggtggacgacatccggcacgccattgccatcgactacgacccgctagagggctatgtctactggacagatgacgaggtgcgggccatccgcagggcgtacctggacgggtctggggcgcagacgctggtcaacaccgagatcaacgaccccgatggcatcgcggtcgactgggtggccygaaacctctactggaccgacacgggcacggaccgcatcgaggtgacgcgcctcaacggcacctcccgcaagatcytggtgtcggaggacctggacgagccccgagccatcgcactgcaccccgtgatggggtaagacrggcgggggctggggcctggagccagggccaggccaagcamaggcgagagggagattgacctggacctgtcattctgggacactgtcttgcatcagaacccggaggagggcttgttaaaacaccggcagctgggccccacccccagagcggtgattcaggagctccagggcggggctgaagacttgggtttctaacaagcaccccagtggtccggtgctsctgctgggtccatgcgtagaaagccctggagacctggagggagccctttgttcccctggcttcagtttcctcatctgtagaatggaacggtccatctgggtgatttccaggatgacagtagtgacagtaagggcagcctctgtgacactgaccacagtacaggccaggcctctttttttctttttttttttttgagatggagtctcactctgtcgcccaggctggagtgcagtggtgtgatctcagctcactacaacctctgcctcctgggctcaagtgattctcctgcctcagcctcctgagtagctgggattacaggtgcctgccactgtgcttggctaatgtttgtatttttggtagagatggggtttcaccgtcttggccaggctggtcgcaaactcctgacctcaggtgatccacctgcctcagcctcccaaagtgctgggattacaggcatgagccaccacgcccggtcaggccaggcctcttttgaacactttgcacaccatgggtcttttcatccaggggggtaggtacagttgtacagttgaggacactgaagcccagagaggctcagggacttgcccagggtcacacagcaggatgtggcaggtgtggggctgggcctggcagcgtggctccagctttccagcatagaaatctgtgaaagcagatagtttgtcggtcggtaggggagactttctgagacccgccccagcggctcagagggtagtagccaggggccttcctgggggctcataacccagaacactgaatgggaaaaccctgatggaggaggcgcagtggagctgtgggtgccgatgggaagtcccagaggagctgggaggtcagtagcggtgctgccctctgtggagcacttagtgggcaccaggtgtgtttccaggttcatggccctgggacctgaagctcagaaggtgaagtaacttgcccagggcacccgtcgggcagcggcgggcagaggatttgtgggctgtggagcctgtgctcgtggcccagccctgggggttgtgagtgtgctggccggggagcttttcctgcaagtggactggtgtytaggagccagcatgtcaggcagcaggcagcgggagtgcagcaggcagcgggagcacagcaggcagagggcggggctcgagcagccatccgtggaccctggggcacggaggcatgtgggagagggctgctccatggcagtggctgaagggctgggttgtgccccgaggagggtggatgagggtaagaagtggggtccccaggggctttagcaagaggaggcccaggaactggttgccagctacagtgaagggaacacggccctgaggtcaggagcttggtcaagtcactgtctacatgggcctcggtgtcctcatctgtgaaaaaggaagggatggggaagctgactccaaggcccctcctagccctggtttcatgagtctgaggatcccagggacatgggcttggcagtctgacctgtgaggtcgtggggtccagggaggggcaccgagctggaagcgggaggcagaggggctggccggctgggtcagacacagctgaagcagaggctgtgacttggggcctcagaaccttcacccctgagctgccaccccaggatctgggttccctccttggggggccccagggaacaagtcacctgtcctttgcataggggagcccttcagctatgtgcagaaggttctgctctgccccttcctccctctaggtgctcagctcctccagcccactagtcagatgtgaggctgccccagaccctgggcagggtcatttctgtccactgacctttgggatgggagatgagctcttggcccctgagagtccaagggctggtgtggtgaaacccgcacagggtggaagtgggcatccctgtcccaggggagcccccagggactctggtcactgggcttgccgctggcatgctcaktcctccascacttactgacaccagcatctactgacaccaacatttacaaacaccgacattgaccgacaccgacatttaccgacactgacatttaccaacactgtttaccaacactgacatctactgacactggcatctaccaacactgacatttaccgacactgacatttaccaacactatttaccaacactgacatctactgacattggcatctaccaacaccaacatttaccgacaccaacatttaccaacactgaaatttaccgacaccgacatttaccgacaccgtttaccaacacygacgtttaccgacacygacatttacygacactgatatttaccaacactgacatctactgacgctggcatctactgacaccgatgccagcatctaccaacaccgacatttaccaacactgacatttaccaacactgacatttaccgacattgacatttactgacactgacatctactgacactggcatctactgacactgaygtttaccgacactagcatctactgacactgacatttaccaacaccagcatctaccaacaccgacatttaccaacactgacatttactgacactgatatctactgacactggcatctactgacaccaacatttaccaacaccagcatctaccaacaccgacatttaccaacaccagcatttaccaacaccgatgtttaccaacgccgacgtttaccgacgccagcatctaccaacactgacatttaccgacaccgacatttaccgacactgacatttactgacactgacatctactgatactggcatctaccgacactgatatttaccaacgccagcatctactgacactgatgtttaccaacaccgacatttacgagcaccgacatttactgacaccaatatttactgacatcaacatttagccatgtgatgggggccggcttgggggcaggccttgctcttggcactggggatgctrcagagaccagacagactcatggggtcatggacttctgcttcttctccagcctcatgtactggacagactggggagagaaccctaaaatcgagtgtgccaacttggatgggcaggagcrgcgtgtgctggtcaatgcctccctcgggtggcccaacggcctggccctggacctgcaggaggggaagctctactggggagacgccaagacagacaagatcgaggtgaggctcctgtggacatgtttgatccaggaggccaggcccagccaccccctgcagccagatgtacgtattggcgaggcaccgatgggtgcctgtgctctgctatttggccacatggaatgcttgagaaaatagttacaatactttctgacaaaaacgccttgagagggtagcgctatacaacgtcctgtggttacgtaagatgttatcattcggccaggtgcctgtagacacagctacttggagactgaggtgggaggatcgctggagtccaagagtttgaggccagcccgggcaaaggggacacaggaatcctctgcactgcttttgccacttactgtgagatttaaattatttcacaatacaaaattaagacaaaargttaatcacatatccactgccctgcttaagacagaaaacatgggtgttgttgaagccagaggcagctgctggcctgagtttggtgattggttcctaagcagttgaaggcagttttgtttttccatagatgtctgttctccctttgctgggtgcagcctcgccctgcygctgtggtcgggtttcagtggcctcgtcccgtggacgcagcctcgccctgccgctgtggtcgggtttcagtggcctcgtcccgtggaygcagcctcgccctgcygctgtggtcgggtttcagtggcctcgtccygtggacgcagcctcgccctgccgctgtggtcgggtttcagtggcctcgtccygtggacgcagcctcgccctgccgctgtggtcgggtttcagtggcctcgtccygtggacgcagcctcgccctgccgctgtggtcgggtttcagtggcctcgtcccatgggcgtgctttggcagctttttgctcacctgtggagcctctcttgagcttttttgtttgttgtttgtttttgtttgattttgtttgattgtttgtttttgttgtcgttgttgttgcccaggctggagtgcagtggcgcgatctcagctcactgaaacctctgcctccttgggttcatgccattctcctgcctcagcctcccacatagctgggattacaagtgcccgccaccacgcctggctaaattttgtatttttagtagacagggggtttcaccatgttggtcaggctggtctggaactcctggtctcacatgatccacctgcctcggcctcccaaagtgttgggattacaggcgtgagccaccgcgcccagcctctgttgagcatattttgaggttctcttggtgccagtgatatgtacatgtgtccccatcgcaccatcgtcacccattgaggtgacattggtgcctctcctcggggtggatgcctccctctgtttccagcaacttctgaaggattttcctgagctgcatcagtccttgttgacgtcaccatcggggtcacctttgctctcctcagggctcccaggggaggcccgaatcaggcagcttgcagggcagggcaggatggagaacacgagtgtgtgtctgtgttgcaggatttcagaccctgcttctgagcgggaggagtctcagcaccttcagggtggggaacccagggatgggggaggctgagtggacgcccttcccacgaaaacyctaggagctgcaggtgtggccatttcctgctrgagctccttgtaaatgttttgtttttggcaaggcccatgtttgcgggccgctgaggatgatttgccttcacgcatccccgctacccgtgggagcaggtcagggactcgcgtgtctgtggcacaccaggcctgtgacaggcgttgttccatgtactgtctcagcagtggttttcttgagacagggtctcgctcgctcacccaggcgagagtgcagtggcgcaatcacggctcgctgtagcctcaatctccctgggctcaggtgatcctcctgcctcaccctctgagtagctgggactacagacacataccaccacacccagctagtttttgtgtattttttgtggggggagatggggtttcgctgtggtgcccaagctgatctcaaactcctgaggcacaagcgatccacctgcctcggcctcccaaagtgctgggatgacaggcatcagccgtcacacgcagctcaatgattttattgtggtaaaataaacatagcacaaaattgatgattttaaccattttaaagtgaacagttcaggctgggcgtggtggcttatgcttgtaatcccagtactttgagaggctgaggtgggcagatcacctgaggtcaggagtttgagaccagcctggccaacatgatgaaatccagtctctactaaaaatacaaaaattagccgggcatggtggcaggtgcctgtaatcccagctactcgggaggctgaggcaggagaatcgcttgagcccgggaggtggaggttgcagtgatctgagatcatgccactgcactccaatctgtgtgacagagcaagactctgtcttgaaaaataaataaataaaaaaaattttaaaaagtgaacaattcagggcatttagtatgaggacaatgtggtgcaggtatctctgctactatctacttctagaacactttcttctgccctgaaggaaaccccatgcccaccggcactcacgcccattctcccctctctcccagcctctgtcaaccactaatctactttctgtctctgggggttcacttcttctggacgttttgtgtgactggaatcctgcaatatgtggtccctgygtgtggcttctttccatagcattgtgttttccagattcacccacacattgtcgcacgttatcagaayctcattcctgactgggtgcagtgggttaggcctgtaatcctaacattctgggaggccaaggcgggacgatcacttgaggcaggagtttgagaccagcctggccagcctagcaagaccccagctaccaaaaaattttaaaagttaactgaacgtggtggtggtgggcacttgtggttcccagctacctgggaggctgaggtkggaggatcgcttaagcccaggaggtcaaggctgcagtgagctatgatcgcaccactgcactccagcctggacaacagagcaagaccctgtctgaaaaaaaaamcaaaaaaaaaagttcctttctttttgtggctggatgacatcccattgtwtggccacagcacatttkgtttgtctgtttatcgggtggtgggcagtggtttccaccttttgtctcctgtgaataatgctgctgtgaacatttgaattcaagtttttgtttgaacacctgttgtgaattatttggatatatgtgtargggtaggattgctgagtcctatggtaatgttaggtttgacttactgaggaaccattaaactgttttcaacagtggctgcgccgttctgcatccccaccggcagtgtgtgagggttctgactttacctcctcacaaacgcttcttttccatttaaaaaaatattcagccaggtgctctggctcacgcctgtaatcccagcactttgggaggccgtggcgggcggatcacctgaggtcaggagttcgagacgagcctggccaacatggtgtaaccccatctctaccaaaaatataaaaattagccgggtgtggcagcgggcgcctgtaatcccagctacttgggaggctgaggcaggagaatcacttgaacccgggaggcagaggttgcagtgagccaagatcgcgccactacactccagcctgggtgacaagagtgaaactccatctaaaataaaacaaaaataaaaataaataaaaatttattaaaacattcatcacagccagcctagtgggtgtcccatgtggctttgcctcgcatttccctgataactaggatgctgagcgtcttgtcccaggcttgccacacctcagcactttgagatacgtcgcacagtccccatttgcgaacgagaaatgaggtttagggaacagcagctgtgtcatgtcacacagcgagcagggggtctctgagccgtctgaccccacagccgaccaagctccaatccttaccgcytcctagtgttgtggatgtagcccagggtgctcccacatttttcagatgagaacaccgaagctcaaaacaggagcgttttgtccacattggatacacgatgtctgtggtttggtcctgaagtcactttatatctcagtggtccagactggagtaggacagggggttctggggaatggggaaggtgtctcaggtgaaaggaaggaattccagattctccatactgtccttgggaagttagaagactcagagggtctggcaaagtcagacaaagcaagagaaatgcagtcaggaggaagcggagctgtccaggaacaggggggtcgcaggagctcacccccaggaactacacttgctggggccttcgtgtcacaatgacgtgagcactgcgtgttgattacccactttttttttttttttgaggtggagtctcgctctcttgcccrgkctggagtgcagtggcacgatctcggctcactgcaagctctgcctcccgggttcatgccattctcctgcctcagcctcccgcgtagctgggactacaggcgcctgccaccgcrcccggctaatttttgtatttttagtagagatgggatttcactacattagccaggatggtctcgatctcctgacctcatgatccgcccgtctcggcctcccaaagtgctgggattacaggcgtgagccaccgcgcccggcccgatttcccactttaagaatctgtctgtacatcctcaaagccctatacacagtgctgggttgctatagggaatatgaggcttacaggccatggtgctggacacacagaagggacggaggtcaggaggtagaagggcggagagagggaacaggcggaggtcacatccttggctttcaaaatgggccagggagagacaccctctgagcatggtaggacaggaaagcaagattggaacacattgagagcaaccgaggtggctgggcgtggtggcttacgcctgtaatcccaacactttggaaagctgaggtgggtggattgcttgaggccaggagttcaagaccagcctggccaacatggtgagaccccgtctctactaaatatacaaaaattagccaggcgtgatggtgcatacctgtaatcccagctgcttgggaggctgaggcaggagaattgcttaaacctgggaggcggaggttgcagtgagccgagatcccgccactgcactccagcctgggccacagagtgagactccatctcaaaaaaaaaaaaaaaaaagataaaaagaccaaccgaggaattgaagtgggggggcgtcacagtagcagaagggggatcgtggagcaggccaccctgtggtcatgcactggaagctcattacctgacgatttggagctcatcactgggggcctaaggagaatagatactgaaggatgaggagtgatggcgcrgggcacgggtgtctttggtggccagaacttggggactgctggggtgcctcactgcaggccttctcagcgccctttatatgcttacacaggctgtttctaagagggggatacattgcataagcgttttcagactacctcatcatgggtccctttctttaccctctgtggccctggtggcgcactctctgggaaggtgcaggtggatgcccagacccgccctgccatccacctgcacgtccagagctgacttagcctcgagattgctgctggcacctcctgccccgggacacctcggatgtgcccgtggagatgctggctctgtgttttctgctggagtttggtgcgtcttttcctcctgcaagtggccaccgctcttgggtatgtcctcaggcttctgcgagtcatggctgcttctcaggtccttgcccagcgccaggagcaaaccctcctggcactttgttcaggggtggatgcgccagtgttcctgctgtggaccsccatctcacatgagggtcttgggcctgcaggctcgttcaggaaacacccgctgagtaygcagtgtgtgccagctgtgtcccaggcaatggcggggacagtggctgctgctggggttgtggtggcttctggggactctggggacagctgaggtgcaaggagccacggctccttgaggatgcagttggactccaggtggaagggatggttgggggaggtataaatggggtcagggaggagacacatttggaacaatgggaacatttttaagatgctatgtcgggaggcaacaaggtggccaacccaggtgctgaggagcccacaccagccctggacgtgttttgccgctcacctttgctggggagtggtgggagagaggattccgttccacgtggtggtgtgcgcagctgggctgtgtggagctgggcgctaggaggaaggtgctttctgcggggctagccgggctctgcctttgaacacaatcaggctccaggttttcagcatccagtgcatgagaggacttcacgggcagctgtggctgatcccttgatgaattgggagaagaacaaaggtctatgaaatgaggtttcatgtagatggcattagagacgcccacaacagatttacagagtggagcggagacggcggatgggtctgggaggcccctcctgctggccttgactgtgacagctgtcctgggaatcagcttccaggccgccccagcagcctgactgacacacacaggggttttagccccatcctgcgaccagctgttgccatcatcagtgacagctgggagtggcggtggttccagccctgggcaccctccccacctgctggggcccacccagggcagtcctgacacctacaggttgcttggagccgcatccgagtcctgccccaccacgtgtgaagcccgagtggtcgtgggctgaggtcccctgattgcatccccacttcccttctgcttcacatagctgcctcttctcaccgtttttccagcctcctgggctaggaattccagtgttgtgctggctttgccccaggacacctccttagccctcttcctgagtctagagccccgggggttggaagttctggcccctgggacacctgcagccacactcagcttctcctgtgagcctccagcatgtcccctcaggaccaagccctcacgttcttgcctccccgcccacctgggctcagccaggggaaggcctggctgggagcgtctcccctctgccctgcccttctcccctctaccctgcccttctctcctctgccccgccatggcttttatatcctgtgccacaagacatggctgtgtgtgaaagtggcagggtctggcatctctgtgggtctctgaggcccacgctccagtgccactcttcccacccgctggccgtgccctcatgctggagggacagcccagccctctcccgaaccccagccccatgtgcccagctgcccccggccctctcccctggaagccggggtcactccagccgtatgccatggtggggacatcctgcttccttggccttccagggaaggtcctctttccaaatggcgacacctggtccctgcctggaggctggaagctgtggcccttgtatgcccctccagggtctgtgcgctcggktggcccgagttcccatcaccgtcgtcatcatcaccatcatcattgtcatttcgcttgtctgtgagccggcctggtctcccagagcakagaccctctgaggtccagcctgagttggggtctccgtgctgacccctgacggggactcaggacgtaccaggtctgggtcaggagtgacccccaaacctcgtgccctttgacaggcacccctgacttttgctaagtgggtggaggtgacatcacttacagcgggagtgatgggacagggtctgttggctgcactgtgctcccagggatctggggagaggctatatccctgggctttggcactgcagagctgtgtgtgtttgtgtgtgtktgtgtgtgtgtgtgtgtgtgtgtgtgtgtgtgtgtgtttgcgtgcgcgcacatgtgtataagatctttttttattacatgaagcaagataactgttgctgtttccttttgggttttgtgttcaacagagtggggtacttcttccctcagacaacagaactctcccctttaaacacgtgctgtcagagggtgggtcttgggctcatgtctgtttgcacagccgagtcagaggaaacacagggttcttcataaaaacactgcacagcaggcgactgtccagagtcagcctgcaggacggcagcagccctgcccctcagagcacagctagggtgggctgctttgggatctcccgtcattccctcccagctggcagccggcggccggcccattccttggtgtgctggtcaggggggcgtgcgcctgctctgctcaccctgggaatgggacagaagctggcagctcggagaggacagggctggacccttgggtggcctctggctggaccatctcattgtcctcagacacagcctctcgggtctagtttcatttcctgaaaaacaagtgcacagaactagagcaggagtcgagagmtacggcccccgggccagatccagccctgccacctgttttcacaccatgctcaagctgagtgggttttacattttttaattacttgaaaaaaaaaaagccaaaggaggtttcatgacccatgaaaattatatggaattcmaaaaaaaaaaattatatggaattcaaatttcagtgtccataaataatttcttgagacagggtctcgctctgtcacccaggctggagtgcagtgctatggcatggctcgctgtacccttgacctcccaggctcaagcgatcctcctgtctcagcctcctgagtagckgggactacgggtgtgtgccaccaagcccggctaatttttttttaattttagtaaagacagggtctttctatgttgcccaggcttttctggaactccatcttggcctcccaaagtgctgggattacaggctcgagccacggagcccagcctgtttttgttttttcactgataaagttttgccgggtgtggtagtgtgtgcctctagcgatttgggaggctgaggtgggaggatcgcttaagcccaggagtttgaggctgggctcaagtgatcaggaggtgaactatgatcatgtcattgcattccagcctgggtgacagagcaagaacctatctcttaaaaatatatatttaaaaagtattgggtgtggtggctcacgcctgtggtcccagctacttargcatctgargtgggaggatggcttgagcccaggagtttgaggttgcagcgagccaagatcgtgtcactacactctagcctgggtgacagagcccagaccctgcctctttaaaaaaaaaaaccmaaaaacatgtattggaacacagccatgcctgttcagtcacgtgctctccatgctgctttctgctccagagacccttatggcctgaaagctgaaaatattttctatcctttacaaaaaagtttgctgacctctgtcctggaaaattcatctcccaagttctcttccggcactggcgttcctgggtgtcctaaatttggcccctgttatttctgaactctgttttggctctgttccctcccaggagccaggacaggcacgttctctgcatcttgtcccctgacgcccagaggcttggctyggctcargcattcttggaaatatctggctccaggaaaggcagargcctcctgagtcggcccagagggaacctgccccargtctgggggaggcctgacccagcagagtggcttttgccgatgggttgggccggtcaagatgtgctgaaagttgtcctcagaaggccactttgggattccttcctccagtattagagcaactgagagctgctcattgcaagcctgatgttttcccagttggccgggtccaccgggtgccctgggattctgsgatctgggtggaaagtarggggcttgggggagtgtcctgggttctggaatccaggtggcaagtggtgaggttcagggagtggcttctgagccaccataggggtctctgtgggaggctctgcccatccaggagattccgcaggccctgccggcccagagccagcgtcttgcgcttgccgaggctacagccagccccagccgggtggaacagcccgtcgcctcctctcactttgttttggggccacctgggagtgtggagcaagggtagagagggaggaagtggctgccggccgctgcccagcacccttgtttgccttgggccctctgtgggctcctttttattgctcttcaatgaagccagggaaatggacttccttgcctcacttcagttcaacatgtctggaagtttggtattaaaattaagaaagtgtggaaatagagcaagaagagaaaaatctctccaagagataatagtgacctctgagctgggcgcggtggctcacgcctgtaaatcccagtactttgggaggctgaggcgggcasatcacctgaggtcgggagtttgtgaccggcctgaccaagatggagaaaccccgtctctactaaaaataaataaataaataaataaataaatacaaaattagccaggcatggtggcgcctgcctataatcccagctaaggcaggagaatcgcttgaacctgggaggcaaaggttgcagtgagccaagatcacgccattgcactctagtctgggcaacaagagtgaaactccgtctcaaaaaaaataaataaataaaaaataaaaatartgacctctggccaggtgtggcagctcatacccgtaatcccagcactttggaaggaaggccgagatgggcagattgctttagcacaggagtttgagaccagcctggccaacatggtggaaccccatctctacaaaaatagaataaaatttaagaggtaatagtgaccttttggtagatcgaaacctggattgctttctttttctaaatgctgattcttttctttgtggtgtttgtgttctgtgccgatgtccctcccccagccctgttattgtgagtggaagaaggggaaagggttcgcccgctactgtgagcccctcctctcacgctgggtgtccttggagaagcctgcacttcttcattgtacgccagggctgggtccctccctggagtggttctgtgctgctgggatggggccaacccctcagatgttttctgagtgtcacacacaggtgtgtgcattcatggcctttgcgtgtcttcctgttgtggaggcaaaaatgtgaagaaccctagatgattttgggaccagggctccatcacctgctgttcattgcacaccggagcatccaggcatgggtggagagctcagacttccaggcacggtcgcaggggctggtctaaccatgttcccgcccgcctgctcrtcagaaccgcctgttgggagctgttatcatgataccatacctgggccctgggctatccgattctgacttaattgctccaggttggggccaggccgttgtttgctgttttgttgtttcttctgtgacgttagccactgggctaatctgagcccctcagttacaggtggagaaactgagacccatgggggtgcaaggacttgccgaggacccagagccccttgggggcagagctgaggcggggcctggctttgggtcccagagcttccagtccccttcccgctctcctaacagcttttttttttgagacaagatctcaccctgtcacccaggctggagtgcaatggcatgatctcggctcactgcaatcttcgctagctgcgttccagcgattctcctgcctcagcctcccgagcagctgggattacaggtgtgtgccgccatgcccagctcgtttttttttgtacttttagtagagatagggtttcaccatgttggccaggctgatctcgaactcctgacctcaaatgatccgcctgcctcggcctcccaaagtgctaggattacaggctgggatcacactgtgcctggccctagcagctttgtcctgtgccatccaacaacagatgaccgaagtctttgtttcttaacatgcattccatctgccttacagttttgccacctgcaaaacagaggacttgtcgcttttctggtaagctggaaatgtaatctggtagcaggaggcctgtggaagcttgcctttaatggccttgtgtctctttcatcctgtcctgagagccggagaacttggatgttgcrcctaactcaaccttcctgttaacatacagttctgcaggctcatggatcatcagaaccacgtcctatctcacgcggctgtatgcttccgttggttcaggtgtttttaccttgacagtattttctcctcggtggcttttgcggtggttgcttttaatcagcattgactcttcaagaaaaatatttagctgctacatctcagaggagacagggtggaaagcatctgagacctgcaggctcagacttagaaccagaagtgccctcagagttcatccggccctgacccagcgggaaatgagttcacagagaagcgggagaactttgccccaggccctgccgttgctcataactgccccaggtccttamatttgctccaggtcctgccccaggccctgcagttgctcataactgccccaggtccttatatttgctccaggtcctgccccaggtcctgcagttgctctgtgtggtgggtgtgatctggagccctccgcccattgctgcacctggggcaggcattgctaattgatcccaggactccttcctgcrgagcacgccctggttctccaggcagccgctgcctgtcagcctgcagtggttcgggagaggacacctgcttgcctggtctgttccaaatcttgcttctcatcccagcacaggtagggggtgctatgggaaagggatcctcagytggccctgtcactgctctatcagctggggacgtggcatcctagtgaaaacatcatggccgggcgcggtggctcacgcctggaatcccagcactttgggaggctgaggagggtggatcacttgaggtcagaagttcgagaccagcctggtcaacatggtgaaacccatctctactaaaaatacaaaaattcgccaggtgtggtggcgggtacctgtaatccgagctactcgggaggctgaggcaggagaatcgcttgaacctgggaggtggagcttgcagtgagccgagatcttgccactgcactccagcctgggcaacagagtgagacgctgtctcaaaatctcaaacaaacaaacaaacaaaaaacaaacaaacaaagcgtcatttatccagcacccctggggaaccatgctacctggtgttttatggtacctggcaaggtgcaggtraagttgckgctcttgggcattgaacccgtcttgtttggggcagctcaggccccaggcagggtccgggttggctctcgttggtgtggccctggcccatccagacctatatttctgccgtcctgcaggtgatcaatgttgatgggacgaagaggcggaccctcctggaggacaagctcccgcacattttygggttcacgctgctgggggacttcatctactggactgactggcagcgccgcagcatcgagygggtgcacaaggtcaaggccagccgggacgtcatcattgaccagctgcccgacctgatggggctcaaagctgtgaatgtggccaaggtcgtcggtgagtccggggggtcccaagccatggctcagccatgcagacttgcatgaggaggaagtgaygggtccatgcctgggcataagtgttgagctcaggtgccccgacctggggaagggcaggacaggaaaggtgacagtatctggccaaggacagatgggaagggaccaagggagctgattagggagtggttatggactaggaatgtcggtaacaatggttagaaagtgactaacatttgttgagcacctgctgtgtgcccggccctggccgggagccttcgtgcccacagtgaccccgtctgcaaatgtagttccttgccctactcgcactggggagcaggacgcagagccgtgcaactcacaggtgccaagctcaggactccctcctgggtctgcctgggctgggctgtgcttgttgcccctgtggcccacgcatgtgcaccttccacctgaaagccaggatcttcaggacgctccccgaggaggtcgttgtctggcacaatgatttgtctcttcctgaaaaggtgacagagttacactggagagagcagcatccaggtgcggcagggacaggcctggggctcgcgggcagggactctgtgtcctgccggggtcccacactgcacctgcttgtcagaggcactcagtcaatctttgctgatgaaggatgagaggacagaggacgtgatgcttgctgctgcattgcctgcagtcctgggtgagatgcccgggttgactctgctgcccgtcgggtggatgtgatgtcagatccccggctttaaaatacgagggagctgggaattgagggagcaggttggggcagaaagcacagccccgtggaagcctggagctgaggcagtgtgggcgacccctggagcagtgagtgcttccttcatggccttcatcgcaccctgcagtcctcatgtaggggatgcmatccatgaatttagttttcccagcctcctttaaaaacgcgttcatgctggggccggggcagtgcagtggctcacatctgaaatcccaccactttgggaggccgaggcgggtggatcatgaggtcaggagatcgagaccatcctggctaacaaggtgaaaccccgtctctactaaaaatacaaaaaattagccgggtgcggtggcrggcgcctgtagtcccagctactcgggaggctgaggcaggagaatggcgtgaacccgggaagcggagcttgcagtgagccgagattgcgccactgcagtccgcagtccggcctgggcgacagagcgagactccgtctcaaaaaaaaaaaaaaaagtmcaaaaaaaaaaaaattagtctgggtgtggtatcacgcgcctataatctcactactcgagaggctgaggcggagaattgcttgaacccaggaggtagaggttgtagtgagcccgtatcgtaccactgccctccacctgggcaatagagcgagactctgtctcaaaaagaaaaaaaraaaaagaacatttatgccaggtgtggtggctcatgcctgaaatcccagaactttggaagactgaggcaggaggatcacttgagcccagaaatttgagagtgtcttccctgggcaacatagagagacctcatctctaccagaaaaaaaaaaattagcccggcatggtggcatatccctgtggtcccagctacttagggggctgacgtggcaggatcacctgagtctggaggcagaggttgaagtgagctgagatcatgccactgcactccagcctgggtgacagacagagaccctgtctcaaaaaaaaaaaaaaaaaaaagcatttactatccaccatggaaggtgagactgacctgtgagtgattgttcaaagaacaaaaaataaaccccagagataagacaaaagggtgcctccatgggggtgtgatttaaagctgagaaattgggcttcttccccctcccctctcaccccgtggtttgctaaaggagatgggaaaaaggattctttttttggctgaaatatttaacactaaattaaagccaattttaacagcactttggttgatgagtgaaattaacagactggccaaaaataaacgaacggtctgtactatgtgaaaaagaggcagctttggccatgctgggccaatgtgagttttcagggttgctgggaatgtctgtgaatcggaggaagggcctagctgggactctcaggagccaaggccctgaggggcaacttgcctggtccctgccctgaggcgttcactgctttcttcctgggccagatcrcaggcccggaggctggaccactgggctggcactcttgccgagctgctccctgacttcctgaccatgctcctttcagcagccttgctgcactttagtttccttgaatgaaaaatggggatgagaatagctcctacctccaaggtgaatggagtgagttyggacaggtgactccctgggaccagtgcctggcgcctgacaaggtccagtcagagcccgcactgctgttactgatacccttggctgtaccaggggagaacttggttgccattgccaggtgttctcccaccacccccactactgtccytgtttgatgtgtggsgggaataaagctgtgcacattggagcttttggcacatcstggytttcaggtgaaaggtgcgtgtgtgtttgagggtttagcctggccaacccagccatgaggtcggacctgaccyrggggtgagtcytgagctcggcacccctgagctgtgtggctcacggcagcattcattgtgtggcttggccgcacccctttccctgctgggctgttgatgtttagactggagcctctgtgttcgcttccaggaaccaacccgtgtgcggacaggaacggggggtgcagccacctgtgcttcttcacaccccacgcaacccggtgtggctgccccatcggcctggagctgctgagtgacatgaagacctgcatcgtgcctgargccttcttggtcttcaccagcagagccgccatccacaggatctccctcgagaccaataacaacgacrtggccatcccgctcacgggcgtcaaggaggcctcagccctggacttygatgtgtccaacaaccacatctactggacagacgtcagcctgaaggtagcgtgggccagaacgtgcacacaggcagcctttatgggaaaaccttgcctctgttcctgcctcaaaggcttcagacacttttcttaaagcactatcgtatttattgtaacgcagttcaagctaatcaaatatgagcaagcctatttaaaaaaaaaaaagatgattataatgagcaagtccggtagacacacataagggcttttgtgaaatgcttgtgtgaatgtgaaatatttgttgtccgttgagcttgacttcagacaccccacccactcccttgtcggtgcccgtttgctcagcagactctttcttcatttatagtgcaaatgtaaacatccaggacaaatacaggaagactttttttttttttttttgagacagagtcttactctgttgcccaggctggagtaccgtagcgtgagctcagctcactgcaacctccgcctcccaggttcaagcgattcttctgcctcagcctcctgagtagctgggactacagacatgcaccaccacacccagctaattttttttatatttttagtagagacagggtttcatcatgttggccaggctggtcttgaactcctgacctcaggtgatctgcccgcctcggcactcccaaagtgctgagataacaggtgtgagccaccgttcccggcactaggaaaacttttgccttctaaagaagagtttagcaaactagtctgtgggctggccttctgattctgtaaagaaagtttgattggtggctgggtgcggtggctcacacctgtaatcccagcactttgggaggccgaggtgggcagatcacctgaggtcgggagttcgagaccagcctcaccmacgtggagaaaccccgtctctactaaaaataccaaaaaaaaaattaaccgggcatggcggcgcctgcctgtaatcgcagctactcaggaggctgaagcaggagaattgcttgaacctgggaggcggaggttgtggtgagctgagatggcaccattgcactccagcctgggcaacmaaagtgaaactccgtctcagaaaaaaaaaagtttgattggtgtaaccaaagcgcatytgtttatggattgtctgtggcagcttttgttctgccgagatgagttgtgacagatctgtatgggctctaaagcmtaaaacatgtgccatccgcccctttacagaaaaagtgtgctgacctctgttctaaagtattggacaactacaatgtttgctcatttattattctatgatttgttttctgctttttgttgttgttgttgttgttgagatagggtttccytctgtcactcaggctggagtgcagtggtgtaatytcagctcactgcagcctcgacctcctgggctytagtgatcctctcatctcagcctccctagtagctgggactacaggcacacaccaccactcctggctgattttttttttttttttttttttttgkggagacagggtttccgcatgttgcccaggctggtttcaaactcctaggctcaaacacccacctcagcctcccaaagtgctgggattacaggcgtgagccaccatgcccagcctattytactgtttgtattacatagctttaaaagattttttatgactttaagtcacaagggttctttgtagaaaaaaawatatatataggaaagtataaaaagaaagtaaaaattgtccataacctctccagccagagacgaccgttgctgacacctcagcatattgcctttaagtcttttttctctaagatagcatttctcttcatcacagtcatatgctacgcagaattctgtatcctgattttttcacttgacattacaacaggtatttgatggcgctgtgacaaactctttggcacaatcttttaaatgtatgaaatactccactgcacagatgtttgcttttaggcttaactgttcttttattttgcgtgtgctggttacagccgggcacagtggctcatgcctgtaatcacaacactttgagagggtgaggcaggaggatcacttgagcccagaagtttgagaccggcctgggcaacatagtgagaccccatctctacaaaaaacttttttaataagtcgggcgtagtggtgcatagctgtagtcccagccaccaaggaggctgagttgggaggattgcttgagccccaggaggttgatgctgcagtgacctgagattactccactgtactccaacctgagcgacagagcaagacttrtytggggaaaaaaaaaaaaaaatatatatatatatatatatatatayatayatatatacatacacgcacacacacataatataaaaatatatatttataaatatataatatataatataaaaatatatatttataaataaaatttataaattatatttataagtraatatataatatataatataaaaatatatattatataatatataataaaatatataatataaaaatatatatttataaataatatataatacatacttataagtatatatttaaaatatatgtaatgtatattttttaatgtatgatatataatatacatttataaatacacatttatattattttatataaaatatatataaaatctccaagttgctttttccaaaaaggtgtcttgctgcatttcaaacattcatttaaaaacttgaatgctggtgatctggtccagaatgtgttcagtagctgctgccagtggccaagcatctcgggagatgtctacaaaacacgctggttctggcctggcgtggtggctcacgcctgtaatctcagcactttgggaggctgaggcaggtggatcaactgaggtctggatttcgagaccagccttgccagcttggtgaaacccyatctctactaagaatacaaaaaaattagccaggcgtggtggcatgtgcctgtaatcccacctacttgggaggctaaggctggagaatcgcttgaacccagggggcagaggttgcagtgagccgagatcgcaccattgcactccaggctgggcaagaagagcgaaactccgtctcaaaaaaaaaaaaaaagatgctggttcctaaaatgtggcccttttcctcctcacctgctgccagaccatcagccgcgccttcatgaacgggagctcggtggagcaygtggtggagtttggccttgactaccccgagggcatggccgttgactggatgggcaagaacctctactgrgccgayactgggaccaayagaatcgaagtggcgcggctggacgggcagttccggcaagtcctcgtgtggagggacttggacaacccgaggtcgctggccctggatcccaccaaggggtaagygtttgcctgtcccgtgcgtccttgtgttcacctcgtatgagacagtgcgggggtgccaactgggcaaggtggcaggctgtccgtgtggccctcrgtgattagagctgtactgaygtcattagccttgatggtggccaggactggtagggccctcagaggtcatggagttccttcgtggagcgggtgctgaggctgtatcaggcacagtgctggctgctttcacctgggccgtctcaccgaagtgtccatggagcctgcgtagggtgggtatctgtgtcgattttacagatgcagaaacaggctcagagaaaccgagtgacttccctaaggtcacatacccagttagagcagagctgggccaggaagtgctgtctcaggctcctgaccaggtctccttgctttgcactcttgccaaaaccatgatccagaactgactttgaggtccccggacctcaggctcctccgaaatggcctcttggaggctgctgagccacagcttaggacccacctcgagaggcaaatgtgctttgagctgccaggcgtcctgggggccctgccttgggcacggggttcagacaggccccagatgtgtggggcgtctttctggacttgagttttcttttctgtgtggtggacacagtgctcaccccttaaagcacctgtgatgtgtgcagcagcccaatccctgcctgtcgcctgttctgctagggaaggaaggaagacttcaggatggcaggacaacagaaagaggtccaggttttagagcaagggcaggtcaaacttagaaaattctggaatgaggatgtgcatttcctcttctggatctgctaaaagaagagggaaggaggggctgctgggggaggagcccagagccgagtttacatccggatcccgcaaggcctcccctgccctgaggtcttgttttgtgatgtgcttgtgtccatcctggtttctgccgtgtccccaacatccggccaagcttaggtggatgttccagcacacactcaccctgtctgtgcayctgtttttgtgtccgtaagtgggtatttactcrccttacgagtgagccactgtgggaattcagggaggtggcgcagtgaccacccctggagggatatgtgtgtggcaggggtcgagrgtctcscccttccctgcttcctgcgcgtggctttctccaggacggggagggctgagctgaagaggtggggacagttgcgtccccccgccacccactgtcctgcggtgagagcagactcactgagcctgcccttctcccttgtgccttccagctacatctactggaccgagtggggcggcaagccgaggatcgtgcgggccttcatggacgggaccaactgcatgacgctggtggacaaggtgggccgggccaacgacctcaccattgactacgctgaccagcgcctctactggaccgacctggacaccaacatgatcgagtcgtccaacatgctgggtgagggccgggctggggccttctggtcatggagggyggggcagccgggcgttggccacctcccagcctcgccgcacrtaccctgtggcctgcaagttccccaacctggcaggagctgtggccacacccacgactgcccagcagcctcaccctctgctgtgggagttgtccccgtccacccctgggtgcctttgctgcagttatgtcgggagaggctctggtgacagctgtttcctgtgcacctgctgggcactaggtcccagctaatccctgtgccaggactctaatttcaccctaacacacatggtggttttcattgctggggaagctgaggcctgagcacatgacttgccttaggtcacatagctggtgagttcaggatcccccagagataccagggccagcactcgatccccacccagccctgaaccccaccatgtgctgggattgtgctgggagtgtccacacgccygggaccccagggctggtgctctcatctcctttttccagatcatgagaatgaggctcagggaagtttgaaaaaaacctatcccaagtcacacagcaacaggagcaggatttgaacccagaaaaggggaccgcacactctgttctgctagagtagttagctgtcctgggtgatatggcaggtgacaggggcaactgtgcttaacaaaggaacccccatcccccctgccmagttgggagactagaaggtcaggggcagaagctctgaagggccaggtgcagtggctgacacctctaatcccagcactttgtgaggccaaggcgggcagatgatttgagcccaggagttcaagatcagcctgggtaatgtagtgagacgccatctctacaaaaaaattttttaaaaattagctgggcatggtggttcatgcctgtagtccaagctacttgggaggctcaggtgggaggattgcttgagcccaggaggttgaggttgtggtgagctgtgatcatgccactgcactccagcctgggcaatagagtgagaccgtctccaaaaaaaaaaaaagaagaagaaaaagaagctctgaggctccaagtccccaggcaccccttggcttgagggcagacaagggaggagagggtcacctgggcagccctgacttttgtcccctggcaaagggaccttcagtgaccttggccctaggagagcctctgagcacgtcagccatgtcgaaccgctcaggaagggcagcaagaatttggcttctgacctctgcctctcctactcgccatctgcactgggtgtggttgtgcccattttacagatgaggaggctggggcatcgaccagctgaatgccttgtcccaggtactgcgtaggcagagctggcagttgaaccccgtgtcctggttgtcgctgggggtgggctgcaccctgacttgtgaggccagtagcaaggtttgcacgtgacttcgtgaccgtcacccagctctgcagcacatcccgtgacccagctcatccaggccgcatgcaaacctgttgccaggcgagaaaccagtcaccgcacagctgtggttgcctgaaatgattaagctcattaatcaccccggagtgaggacagactcagatgaaaaccagcaaaagccctggaaactcatgtgaccctgccaatgagggcggccatgtgcattgcagcctggccgtcactcctcggtacgtgttttggacttaaacgctccggatgtttactgagtgcttgattaataacatggaaggcctggtctcattgctgtgggagtgaaggatgcacagccaggcctgacatgatgagaacaagaacctggagtctcgctgcctgggtggtaatcctggccctgccacttagcaactgtgtgactgtagccaggtcacttaattttgctagatcctgcctgcgcttcagtggatcttgctggttttccaaggtggccaaacactttaaggcattcatgtggtcgctaggctgcagggttgaaccctggctcaccccgcagggcgccgtgtgctctgtggcctggctgtgcctttgctgacaccgtgcccgtgtgtgttcatgcaggtcaggagcgggtcgtgattgccgacgatctcccgcacccgttcggtctgacgyagtacagcgattatatctactggacagactggaatctgcacagcattgagcgggccgacaagactagcggccggaaccgcaccctcatccagggccacctggacttcgtgatggacatcctggtgttccactcctcccgccaggatggcctcaatgactgtatgcacaacaacgggcagtgtgggcagctgtgccttgccatccccggcggccaccgctgcggctgcgcctcacactacaccctggaccccagcagccgcaactgcagccgtaagtgcytcatggtcccccgcacctcactccctcgttagatcaggctggttctgggagctgacgctgaaaggagcttctcatctggggttcctgggtgtacatagatggttgggtaggttgtgcactgcacaagctgcatgatgctacctgggggtccaggtccaggctggatggacttgttgcttcatcaggacatagataaatggccaaaactcctcagctggaaggtcctgggcaggatctttgggtgtgaaaaccagtcacaggggaagggtgcttgctcatactgccagcacagtgctgagtgctttccatagcgctcgtttactcctcaagcctggagggtggggagtagcatggtcccatttcacgtacaaggaacccgatgcacagagaggtgtggcaacccatccaaggccatacaactggggtgggttgagccggggttgactgtggcaggctggctcaagagtccctgctcctgaacccttgccaggcagcctggcatcagctcggggaatttttgccctgacccttggaagcargtgggcctctttgttctcatgtcagtgatgagaagagtgactttcctatggcccctctggagtacaggtgtttcctgttggcgggctcttcccccatgacatcagcagcgagctggttatgattccctacgcagaacttgatagtttataaagctctttgtcatccaggccccgttggagtctcacgcagacctggtcgcaggcggggctggtcttgcctgtcccagctgcatggatggggaacttgaggcttgcaaaggttaaggggctgttcgaggcccaggctggcaggagatgggcctgggccagagtctgggacttcccatgcctgggctgtctttggtccygttgctcaccatccctccctggggccatgaccttagagagccaaatggaggtgcaggtaacccacggcaaggaggggttgccatgactcagagtccccgtcctgtggccggcagtacctggtgcaacgacttggatttcagaccagccactgtagcccgctgacggtgcgctcgaagtgccacagcttctgaagccaggcaggactcaggccaggagactctgttagctgttgagagggagaggccaacggatgttctggttctgctagagagctggttcttcggatcctggtaccagtgcactgagaggaggcccagcttgattctggggctgccttgtggtggcatgtgctgctcactgacaccctcgaggagtgtcttctctcgggcttgttgactgtgcccggttttccgcagttcactggtgcacacataggcacatagcaaaccgcacacacagtcgtgggtatgagtttcactacattccaccaccagtgttcactaccattacctgccttccgtcttaagtgttcatcatttaaaaataaatttattgggctggacrcggtggctcatgactgttatcccagcactttgggaggctgaggcgggcagatcacctgaggtcaggagttcaagaccagcctggccaatatggtgaaactccatctctactaaaaatacaaaattagctgggcatggtggggcatgcctataatcccagctactcaggaggctgaggcaggagaatggygtgaacccgagaggcagagcttacagtgagcccagatagcaccactgcagtccagcgtgggcaacagtgcgagactccatctcaaaaaaaaaataaataaataaaagaaaaataaatttatgatctatttcaaaaataacacatgtactttgaaacagcagagacacatatgacacggagaatgaaattccccatagcgcacccccaagagacagccctggtccccccgtctttcccgtggacctccagcggggcagatgctgagccryctgttgtcgagtggcgtgctatcccgtcctccagctcctctgtggcttacagacacccacctgcagccctgtctttgcctcctctagcgcccaccaccttcttgctgttcagccagaaatctgccatcagtcggatgatcccggacgaccagcacagcccggatctcatcctgcccctgcatggactgaggaacgtcaaagccatcgactatgacccactggacaagttcatctactgggtggatgggcgccagaacatcaagcgagccaaggacgacgggacccaggcaggtgccctgtgggaagggtgcggggtgtgcttcccaaggcgctcctcttgctggtttccaggctgctgyccctgtccttagcagagggaggaaacagaggatrgctctgggtgaatgatgacttgggcttcgattatgtagtcacagggtatgaccctgagatgcgtggaaccccgagactgtgattatatgtagaaactgggtttccccgttgtttaagtagtcatggtggggtcagaccccacaggacttttgtcttttcaagaaagaaaatggtcgtgtgtcatgcaggggtagttggtactggttaatccaggtttatcctttattttgtgggaactgtacagtcatttctgctacaatgctgtatatgctcttctgaaagacacctatgcaaaatcgcacagtaaaaatgacacaactcatagggaaagcggggccagggcacagccctcaaaatctccatcaatgacatgtaagaaaagagaggaacctgggaaatagcaaagtgccttttgcacattaaatggttagctatatcccacaatactgtgcattcgtaaacgttaatgctgcaataaatacggcacttcaccttgggaagatctggagttggcttatgagtgtggaagggtgtagcgcatgagtttttgtgaaacactggaaggaggattgtgggaaatcaaatggaaagttctcaccccaggcgtggagaagagtgggtcatggccccagcartgagcccagggaggtcagagacggaggtgtgtgtgtgggtgtgaccctgcgcagttccctgccggctgtagttttttgcattcrcttaatgtttctcgtggaggaaattgtgcatgagcaaatgtgaaaccgtgctgtgctcaaattgtcctaatacatcattgcattggaacagattggcttttttttttttttttttttttttttttttttgagatggagtctcactctgtcaccagcctggagtgcagtggcatgatcttggctcactgcaacctttgcctcctatgttcaagtgattttcctgcctcagcctcctgagtaactgggattacaggcatgagccaccgcggccggccagatttgcatttttgaaacaactgctaggctgggcgcggtggctcacacctgtaatcccagcactgtgggaggccgaggcaggtggatcacctgaggtcaggggttcgagaccagcctggccaacatggtgaaaccccgtctctactgaatatacaaaaatcagctgggtgtggtggcgggtgcctgtaatcccagctactcaggaggctgaggcaggagaattgcttgaacccaggaggcagaggttgcggtgagccgagatcacaccattgcactccagcctgggcaacaagagcaaaactccatctcaaaaaataaaaaatagaaaaacaagtgctgtagcggaagtgagcactttgcggagtcaggcttgtgtggcctgttccacaaatgatgtgctcacggyggcctcaggcccacctggagtctgcagcatggggcacaacaggttcattagtgtagaattccaggacaggcctggctcctaagcagccttcttttacaaaaactgcagagcccgcytgtatcctagcactttgggaggccgaagtgggtggatcacgaggtcaggagttcaagaccagcctggccaacatggtgaaaccccatctctactaaatatacgaaaattagctgggtgtggtggcacgcgcctgtagtcccagctactcgggaggctgaggcagaattgcttgaacctgggaggtggaggttgcagggatctgagaccatgtcattgcactccagcctgggcaacagagcgagacgccatctcaaaaaaaaaaaacctacagagccacacggcctctttctccacygagtgttggtgtgggagcttgtgttattgtggtgaaatcttggtactttcttgaggcagagagaggctgagcgcctggagagactttcacatgggtcgccatgtccgccgtcggtttcgctgttgtgctccccatctgaaggctggtgccrtccagacaggctggacgcccctttccaccagatccttcctcccgcagcagtttctagttacgttgtactgtgaggtctgtgtccttggttgatggcaaaagtcagccgaattgaaattcagagccatgcctggctccctggagcttctctcctgggcagctgtgatcattgcctctgctgtggtgtgggtggtggaaatggattcctttcatcttgcttgctacaggtgactgtcacgtggagtcctttggagagagggacgtgttaattgatggatgtggctcccatgctgagaaagctcctgggcgtacattgccttagagtttcaytggagctgcgttcttttatggtgtctgctaggcagaagtgatgaagacttggaagaaaacccagaaggttttccacttaatttggaaaatgtgcttttcccctcctgtgtcttttgctaaggtccagcctcctgcagcctccccgctctgtggactctggctttgattctttattaggagtccccctgctcccccaaaagatggtgtctaaattatcatccaattggccgaggttttgttttctattaattgtttttattttttattgtggtaaatwtatataacataaaatttgccattttaattgttttgttattgttgtttttgagacagggtctcaccccagtgcccaggctggagtgcagtggtgcgatcatggctcactgcagcctcagcctccagggctccagtgatcctctcacctcagcctctctagtagccgggactacaggcatacactaccacatctggctgattttttgtattttttttttattgtagagacccgctatgttgcccaggctggtctcaactcctggactcaagccatcctcccacctcaccctcccaaagtgctgggattacaggcatgagccacaacacccagccattttaatttttttttttttttttgagatggagtctcactctatcgcccaggctggagtgcagtggcgtggtatcaactcactgcaacctctgcctcccaggttcaagcgactctcctgcctcagcctcctcccgagtagctgggattacaggtgcccatcactatgcctggctaatttttgtattttttagcagagacggggtttcaccatgttggccaggctggtcttgaactcctaacctggtgatccgcccgcctcggcctcccaaaatgctgagattacaggtgtgagccaccgtgcccggcctttttttgtttttgagacagggtcttgccctgtcacccagactggagtgcaatggtgggctcttggctcactgcagcctccgcctcccaggctcaagttgtgcacctccacacctggctaactgtattttatgtagagacagatttcaccatgttgcccaggctgggcttgaaatggactcaagcagtccacccacctcagcctcccaaagtgctgagattacaggcgcgagccaccgcacccagcccattttacctattctgcagttgacagttcagtggcattcagtcagttcacgaggtaaccatcactgccattcatctccagactacttcaccttctcggcagatgtccgaaactgtccgcattgaacacactcctcatctccctctgacagccaccattctactttgtatctctctctgccttctctaggtacctcatgtaagtggaattataccaatatttgcccttgtgtgactggcttctttcatgtgacatggtgtcctcaaggttcatctgtgttatagcctgtgtcagaatttccttccttaaagcctgaataataacccgttgtaaaggctgggcgcggtggctcacaccctctaatcccagcattttgggagtccgaggtgggcagatcacttgaggtcaggagtttgagaccagcctggccaacatagtgaaaccctggctctactaaaagtacaaaattakctgggtgtggtggcgcgcacctgtaatcccagttactcaggaggctgaggcaggagaatcgcttgtacccgggaggcagaggttgcagtgaaccaagattgtgcctctgcagtccagcctgggtaacagagtgagacttcctgtctcaaaaaaaaaaaaaatcatcggatggatggacggaccacttcttgttatttatccatccacgggtgctaggtttcttccacctttggttgtcgtgaataaggccactatgaacatttccttccgtggtgaaggttttgtactagtgaggaaaaggcgtgtttgtggtgttgcataggattctggtaagaaagtttgcactaaccataagtatttgtactacattaaaatgaaagctcaggkgccgggcgcggtggctcacgcctgtaatcccagcactttgggaggccagggcgggcggatcatgaggtcaggagatcaagaccatcctggcyaacatggtgaaaccccgtctctactaaaaataccaaaaaactagccaggtgtggtggcgggcacctgtagtcccagctacttgggaggctgaggcaggagaatggcgtgaacccgggaggcggagcttgcggtgagccgagatcgcttcactgcactcgagcctgggcaacagagcaagactccgtctcacgcaaaactctgtctcacgcaagactccgtctcaaaaaaaaaaagagttcagggtttatgaaactggccagccgcgtaaagtttgctgtgttgtttttgtgcccgggaggagtgtggccagggtgtcacgtcacacagtacacgtttctcagatggtggttctccagactgctgtcccaaagtctgtttttgcatctggttcccacagacccaccctccacggtgagcctgattttggccagggtagctggaatcttgcttgtctttcagcccggcagctgtaccagtccagggtccacagctagtggcttttaggaaggaatttgttcagttggctttgacacatggccccctagggtccacagctctgtagtgatgtggatgttgttatctacaaagacacatgatccttcgtgtccagatgaaagtgatgatgtctttgcagctgcccagcaaggctgtgtgtgtgtgtgtgtgtgtgtgtgtgtgtgtgtgkkgtgtgtgtgkkgtgtgtgtgtgtgtatgggggagggaggcaccctttccatctgggggkgtgtgtgtgtggggtgtgtgtgtgtgtgtgcgcgtgtgtgtggtgtgtggtgtgtgtgtgtgtatgggggaggcaccctttccatctgggtccaagagactgggcctggggaagacgcttctttttatctacttagagactttgttttatttgtatttttttgagacagggtctcactctgtcacccaggctggggtatggtgatatgagcatagctcactgcagcctcggcctcccaggctgaagcgatcctcccacctcagccttctgaatagctgggactgtaggcgtgcgtcaccatactgagctattgttttttttgtttggttggtttaattttttttgatacagatggagtcttgctatgttgcccagactagtctcaaactcctgaactcaagtgattctcccacctcagtttcccgacattctgggatcacaggtgtgagccactgctgtctccctgttttattaactgctgaaagacctagataaagaaagtctgaaaagacttactatcagagcaccatcctaagatgattccctctgactcaatggagagggaggggagcttttccttcaggcctgggtggcaggagcccaggtgctccaggccccatttgccccaggccaaatcactcgggaacttggatgcagctgtctttcagggtaacccaaaggaaccagatccccscaggcagtaggcttctgggctgtcctctcctcctacgtcagctcagtaagagcccttcgaagggatgctgtgtcggaggccccaaaagcccaggctcatccctgagatgcacagggtgggctgggcttaggcagcgctcgagcatctcctggacggtgaccccagagagtgtggagacggagagtccttgagagtcactgagagacgtggctgccctgccttcccaagaggggctctgagtcattccccacmctcacctgcccctacccaccctcacctggcccccagcctcacctacccccacatctgtaccgatccctttacccgcaccttccctacccaccctcacctcccctgtaccttcacctcccccactcacccgcccctgcaccctcacctgtcccccaccttcacctaacccccaccctcacctgccctcccctcacctggcctccttccgttggggaaggggttgtaaggggcggcccccaaactgtctgtcctggtgccctgcagagaaaacagtacgtgagggccgcagtccaaaagcttgagtcctggaaggtggaggagacagggatgtgttgggaagggccccatggtcttggatcccttctcgactgtcaatggggccttcatgggagcgccagtctagtgatgcacagctgggtgcccggcgggtggctgaggaggcctaaagtccgaggcggcaagagctcttccagaggctgttgtcctaatcgctctggcatactcaggcgggcacgtagttaggagctgattggagaggagagacccccacaccaatactgggatttgactttcaggctaaacttgagaagtgtggcctctgctgtcctgccagagctctccagccagtgcccagggctctccagccagtgcccrggggtctccaccagtgcccgggggtctccgccagtgccaggggtctccgccagtgcccaggggtctccgccagtgctcaggagtcttggtttctttgtcttacagccctttgttttgacctctctgagccaaggccaaaacccagacaggcagccccacgacctcagcatcgacatctacagccggacactgttctggacgtgcgaggccaccaataccatcaacgtccacaggctgagcggggaagccatgggggtggtgctgcgtggggaccgcgacaagcccagggccatcgtcgtcaacgcggagcgagggtaggaggccaacgggtgggtgggggtgctgcccgtccaggcgtgcccgccgtgtcttctgccgaatgccagcctctcacaggctggggagactttccaccctggggatccaatgggtggctttccagggtcccaaaagcaaacacaggctctttcacagcccctccaggaaagcagaaagccccaagggctggaagggaagggggagctctgctgagaggttacaaggcagcgctggccgacgggagttgcagttgataggttttgtatcatccttgttaaacttgaaccctgtgcagaaatcccttccacggcatgggggctgcctgttgactcgctcctgttccaccacagggagctcctgggcttcttcctcccagaggcccccgacgctcccacctgttggtcgtcagagcttctggttggtgggaaggcacccaggaccttgaggtctccagagagaaaagccagggaaagagggagaccgaaacccatgtgacatgaaactcaggctccaaactgagcacgggaacgtttggggacaggagcgcgatggccttcctcagatagctggggggctggcatgaagacgggagctacagccagcacaggtcctgggccgggagcccagagattgagccctgactctgtcacttactggccacgtgaccttgggcgggtggcatagcctcttggagactcagtttcctcattggtaggagtgacggccacagtggtgcggcctctgcagcacacggggggctcggtgggcggaagccccrggtctataaggcgrctgtgcaggagccagccgagctggtctcccaacagccagggctccggggtccttagcagctgtggggggcctgcacctgtttcccatggctgctgtcagaaattaccagaagccaggtggctgagagtaatggacacttgttctctcacagttcctgagggctgaagcccgagatcgaggtgtgggcagggccctgcgccctctgaaggctctgagggaacctttgggcttctggtggctccaggcaccccttgacttgtggtcctgtcactccagtctctcygtctggctgcacatggcgtggcctcttctgtaccattgaaggacacttcagttggatttagggcctaccctcacccattgtggtcgtatcttgatccttcakgacatttgtaaagaccctgcttccaaataagctcacattctgaggttctggggtgagcgggaatttggagagcaytgttcaactagtatagaatgtgacctgtcagcctcgggcagccctgagaggcaggggctttccacagcccagctgggtgccctgggctccgtgctgkccgaggagacgccatccccacacccgtccttcacccgccaccctcccgcaggtacctgtacttcaccaacatgcaggaccgggcagccaagatcgaacgcgcagccctggayggcaccgagcgcgaggtcctcttcaccaccggcctcatccgccctgtggccctggtggtrgacaacacactgggcaagctgttctgggtggacgcggacctgaagcgcattgagagctgtgacctgtcaggtacgcgccccggggcctgccctaaccgcagacaccyggccttcattgtcagtaatggcagcagctgccacattgtccgagacctgccgtgagcccagtgccgcgccaggggctttgtgtgtagcgtgttttgtcctcacactgacagctgtaggctggggttctgagtgagccccacagggcagaggcagaaaatgagtctcagagagggtgagcgagctgcttggggccccacagcaggagatggagcaggastgcagcctagcctctgccccyagcacctgcgcaagaagctgctctgctctggactgtgttaggctgcgagggctggagagaaatgagagttggtgcttagagagggggcgcaggtccccatggcttttcctcttatgatgaggtagatgggtgaagggaggggccatgcttgcaggggccagtgaccgaggcccgccgttggaactgatggccttcatcccgagcccagcccaggtgggagcagggctttccgagggcttgtcttgggtcggcctgcttccagggactctgctgcagctcccacccctgtccaaagcatggaatcccccaggctccctggcagtcctgtcaacctctgtcctcccaagctgagtgtggggcaagttctggaggtcagcactgctcaggggggcccacgggctgcttgcaggggccaaccgcctgaccctggaggacgccaacatcgtgcagcctctgggcctgaccatccttggcaagcatctcyactggatcgaccgccagcagcagatgatcgagcgtgtggagaagaccaccggggacaagcggactcgcatccagggccgtgtcgcccacctcactggcatccatgcastggaggaagtcagcctggaggagttctgtacgtgggggctggcagtggggtgggcagggtggcctctaaacccgacccctggaggaggctggaggccagtgcaagatcctgtgtggcctcagccaggcggtggtctctgccagatgccaactgttgcccgctggggttcagcgacatgtccgaatgtcccgaggcctctgaggttgttttcttttgccgcagaacaaatcaccacgaacagcgttttaagacaacaccaactctttttttttttttttttttgagtcaggatcttgctctgttgcccaggctggggtgccctggtgcaaacacagttcactgcagcctcgacctctgggcttaattaagtgaacaccttgcctcagcctcccaggtagctgggactacaggtgggcaccaccacacctggctaatttttttttgtagagacggggtttccccatgttgcccaggctggtctgcaactcctgggcacaagctatctgcctgctgtggcctcccaaagtgctaggattataggtgtgagccactggcctgacaacacccacggattgtctctcagttctgtaaggcaaagtccaggcacagcgtggctcacctgggttctctgctcagggtctcacggggccagaatcaaggtgtcaggaacgctgggccctcagcggaggctctgtggagaaattagcttccttgctcactcagcaggtagcagttgtgggatcgaggttctgttttctctctggttattggtcggggaccactctcagctcctagaggccaccmcaggtccttgccccgtggccctctctgcctcagcagtgggggctccctgcgtcagtccctcccrcaccttgagtctctctgatttgcttctaaagggccctgtgattcggctcagccacctttagattaggttagcctcccctttgatagactccaagtcggctgattaataaccttamtcacatctgcagaatcccttctgccacataaggtcatgacgccgtgctggggactggggtgggaaattacggggtcatttaggattctgcctgccactgycttgctgtgtcccagggcttgggggaggggcctccacagctgggaccacagtccttcctcccctccatggtaaccatctgaggattacttgagaccagcctgggcaacatggtgagaacccatccctacaaaaaatacaaacaaaaagggaccaggctgggcttggtggctcatgcctataatcccagcactttgggagaccaaggtgggctgatcacttgaggttgggagttcgagaccagcctgcccaacatagtgaaatcccgtctctactaaaaatacaaaaattagctgggtgtggtggcaggygcctgtattcccagctactggggaggctgaggtgggagaattacttgaacctgggaggcggaagttgcagtgagccaaaattaygccactgcactccagcctaggcaatagagtgagactccgtctcaaaaaaaaaaargggccaggggtggtagtgacaaagagaccctatcccaaaaaaaccgaacactgaatccttgagactgagtaaggacactgtgaaatttttctgggtggggcagggaacagagcgtcttctgtcatttcttccacctgggtgtggtcagctctccctccaagctgcctcctcttcttctcattgtccgggtgttggacacatttggttaactggatagaataacgcgagttcccagggacttggtccatttgctattttattttattttattttattttattttwtttatttatttatttatttakttatttattgagatggagtttcgtttttgtcgcccaggctggagtgcagtggcgcgatctcggttcactgcaacctctgcctcccaggttcaagtgattctcctacctcagccttccaagtaactgggattacaggcacccaccaccataccaggctaatttttttgtatttttagtagagacgggttttcgccattttgcccaggctggtcttcaactcctagcctcaggtgatccacgcacctcggcctcccaaagtgctgggattacaggcatgagccaccacgcctggcaccatttgctattttaattcccatgtgtattagtgtcccacggctgctgtaacaaatgaccacaaactggatggcttaaagcaacagaaatggattcccccaatgtgctggagaccagaagcctgcgaccaaactgttgggagggctgtgcttcctctgggggctccagggaggatctatttgttggcccttccagtgctgtgggtgccagcgttccacacttgtggatgcgccgcctcaacctctgcccatcttcatgtgtccatctcctttgtgtctgcgtctttacctcttcttcttgtctgtgttgcctcttataaggacgtttgtcattgggtttagggcccacccaaatcatccgagatgacctcgtcttgagatccttaacctgcaaagaccctttttccaaaaaaaggttatgctcacagattctaggccttaagacatgggtgtatctttctggggggcactatccaaccccttatacaatgaaagacgggaagagggccaggtgtggtagttcacgcctgtaatctcagcactttaggaagctgaagcrggaggatcacttgagcccaggagtttacaagtagctaggcaacatgatgagaccccatttctacaaaaagtgraaaaaaaaaaaaaaaaaraaaagwwaggtgtggtggctcacacctgtaatcccagcactttgggaggctgaggcaggcagatcacgaggtcaggagattgagaccatcctggctaacacggtgaaaccccgtctctactaaaaatacaaaaaattatggccgggcgcagtggctcccgcctgtaatcccagcactttgggaggccgaggtgggtgaattacaaggtcaagagatcgagaccatcttggctaacacggtgaaaccccatcaagatcacaaggtcaagagatggagaccatcctggctaacacggtgaaaccccgtctctactaaaaatacaaaaaattagccgggcatggtagcgggcgcctgtagtcccagctgctcgggaggctgaggcaggagaatggcgtgaacccgggaggcggagcttgcggtgagccgagatcgctccatgccactgcactccagcctgggtgacagagtgagactccgtctcaaaaaaaaaaaaaaaaaaaaaaaaaaaagaaaattagccaggcacagtggcaggtgcctattgtcccagctacttgggaggctaaggcaggagaatggcatgaacccgggaggtggagtttgcagtgagccgagatcatgccactgcgctccagcctgggcgatagagcaagactctgtctcaaaaaaaaaagccaggcatggtggtgcatgcctgtagtcccagctactcaagaggctgaggcaggagggttgttcgacccacggagatcaaggctacagtgagccatgatcgcaccactgccctccagcctgggtgacagagtgtgaccctgtctcaaagtaagtaaataggaggagagacaagtgggcagttcagactgatggtatgggcacagtagagactggtgcagacaggctggcctgtgatgtcaagcaacttctgtaaytgtttccggcatccatttgtgtgtcaatttccgtgtcagtaggaagactctgtaggctgccaagaggaataagtgggaggatcctcccagagaggccgggcctgcaggagggccagttctcatgagttctyatttggcccctaccctccaggctgtggttctgaggtgggagacagagcctgacctctgtttgtcttgttttgtctttgcagcagcccacccatgtgcccgtgacaatggtggctgctcccacatctgtattgccaagggtgatgggacaccacggtgctcatgcccagtccacctcgtgctcctgcagaacctgctgacctgtggaggtaggtgtgacctaggtgctcctttggggtgatggacaggtacctgattctctgcctgctaggctgctgcctggcatccttttaaaatcacagtccctgtggcatccagtttccaaagctgattgtgtcttcctttgccctcctttcttttctactatgtgcattcggtgctatgaattttcctctaagtactgcgtttcctgcatctcacaaattttgttacattttcattttcaggtagtttgaatatttttacacttctcctgagatgacatctttggctcatgtgttatttagaagtgttgcttagtttctaaagagttggggcttttccagctgtctctctgcaactgatttctaatttaattctactgtagtctgagagcttattttatatgatttctgttattttaaatgtgttgggtgtggtgtttttgttgttattgtttttgtgtctttttgttttgttttgcttcgtttgttttgtttttgagacagtgtcttgctctgtcactcaggctggagtgcaatggcgcgwtctcagctcaccgcaacctctgcctcccgggttcaagtgatcctcttgcctcagcctcctgagtagctgggattacaggtgcacgccaccatacccagctaatttttgtatttttagtagagacggggtttcaccatgttggtcaggctggtctcgaactcctgacctcgtgatccgcccacctcggcctcccaaagtgctgggattataggcgtgagccactgtgcctggccattaggtgtgttttatcacccagcatcatgcagtttatcttggtgaatgttctgtgtactcttgaaaagaatgtggattctgctgttgttgggtggagtgttccagaaacatcaattagatccagttggttaatagtgctcatcaggttgtctctatccttccttcctgactgcctgcttgagctgtcagttattgacaggggtgtggagtctccaactctaatggtggatttgtttatttctcctagtagttctatctttttctctccttctacccttgatcctcttctccccctagggcttcctggtgttrgtggtgggagagtggggtagtgaagaacctggacttyagggccaaaraggccagggttcaaatcctggctctgtcacttcccagttgagtgaccctggctggtgcctgaatctctgtgagcctccacttcctcctctgtgaaattgagagcacttacctggcaggctgtcatgggcatcaagtaacagggcactccacctggaccctgacacgtgatgcacaggaatgccagctgctatgccatgggtgtggcagtagtaataaagtgaccatctgtatcctcaccacagtgaagcctgtccagggctttctctcctatgcccccatgcctccaggtggccttggatcctgttggttctgtgctctgctcagcgacctttctcccgtgggagttcctgggggttcagcttcatcctacagacagcagcacacactggctgtgcacccttttttttttttttttyttttttttgagatggagtctcgcttttttcgcgcaggctgaagtgcagtggtgtgatcttggctcactgcaacctctacctcctgggttcaagtgattttcctgcctcaccctcccaagtagctgggattacaggctcccaccaccacgcccggctaatttttgtattttcagtagagatggtgtttcaccatgttggccaggatggtcttgaactcctgacctcaggtgatccgcccacctcagcctcccaaagtgcagggattacaggcgtgagccaccacacccggagygccggttgtttttagcagtttgtcttgttcctggagagactggctcctgcccaggagctcggggagtagggccgcggggtgctgcctcacacctcgagtttggccgtaagcagaggggacattttgtgactgtccccctcctgagcttcccagcagcttttctccaagttacagcccaaaagctcaggtggatttgcaacccaasggtgtctgtgcacctcccactgatrcccgaactgccctggccaagaaacggggccgtcagaacgctgcactaactgcagccttgggcctccatgccagaggccatgcccttccatccaccaccccctggcctgggccctggccctcctggctcgggaactccaggccccttcctcacggmtcgagagacgtgtatttaccgcacaggtgcttgtcattctcttgtggcctcttctccagggagatcacagaaggacagggcctcactgaggtctcggacatggaccctttgatagtggcaggagccaggctgggcaagaggcggccacagtcacctcagcagtgccatcaccaccgccattcagcccttccctgagccgggcgcgcccctggctctggccccagtgtcccagttacagctcacaggagcttgtggtgcccagcggctgcttctgattgagagtcgaggtcggaggctttgggaggctgagaggctgctcggtttcacaactgctgagggagacttgggctccatctcaggtctgccccatgtcgccctcaacctccagccaccggtcctccgtgtcccccatggccaggcacggcttgcagacatctgtcgttggctcctctcagccgtcgtgggctgaccctggcacgtcctcctgtggctgagcccagtggggacagctgcttccttttattaccckagaactctcgtctttgatcaggccccctcccctatgccacacagtccctgtcactcgggtgagcccagtagtcatggggaaggcctgcgggttccaaacatccaaaggcytgcgtgcagcatgacagcttgaaaccgatgttttttaccttgatcagatttcagcttggcgggggctttgctcagctttcagtgaggcctgggccgatttcccagcatcccctcctgaggccagcctctgtttcctgtgattttctgcacaaagtgggagggaggagtcctaggaaatggggggccacctcgaagcctaggcctcctctggcttctctgtgccagtgcccccacgctttgtgtctgtgtccccagcccatgggactctgctattccctgagtgctgccgcatgcccagcccrcactgaggacgtggagcccygaggggcaggatggcctccatggtcacacgtaggaagtggcctccaccctccgatgatcctctccctcctccctttcagcgccctccccrggggtgtcctcagccctcctgcctgtgctttgtcccgtcttctgcaggcgcctgggacgtgctgacaggtcctctgccggctcctgccttgctatgcgcaygctggtcaccacagaggcctggcccttcttctgtagcagtcccacacccgcaacaggtgtggctgctgaccacctgctttctgcccctctrgtcctgaggagggcrcagtgggcactcaggcgtggctgagcagatgtgtgttgccgggaggaggaaggactgctccagtcagggctgaatttcccacccggagcatttctgctgtatttggtgtagcgcctgctgcttaaagctctgattcccagttggcaccctttcccttctgcattgaaaaacatacggatgcatgtcttcttgcagtgaatgtgtattctcccagcctctcttctgggttggggctggaggtggagcggcacacaggagccgcagcgatggaggatgtgcgggtgcagcaccccrtacagcagggatgccaaacccgcgmtgagtccctctcaacttctgctttgaagcccagtcaygccattgcctgggttttgctgggcggggctgcrtgtgatgttctcctctgtccctcccccagagccgcccacctgctccccggaccagtttgcatgtgccacaggggagatcgactgtatccccggggcctggcgctgtgacggctttcccgagtgcgatgaccagagcgacgaggagggctgccccgtgtgctccgccgcccagttcccctgcgcrcggggtcagtgtgtggacctgcgcctgcgctgcgacggcgaggcagactgtcaggaccgctcagacgaggyggactgtgacggtgaggcccwccccgtcaaggctctgccaagaccctggccctgccctccgggatacgagcttggggctgcctccggcctcacaggagtaggggctctgaaaacctttgcttgcagggagattgccaagtctgtcttttaggcccaacaaggaaaactctgcagttccacccatcctgtcccaccaggtagtgtggcttgaaggcagactgtgagggtctatctcaccttcctgcattaggtcaggagtttcacagaaacctgaggcacattcaggggtgggctgcagaggtccatggctcacaccctggaaaatccgcccccaaaagacagtgctgtctccactgaccagtctgtgggatagtgcttaagcctgagtggtttctatcaacatgtagaatcaggaggtataaagagatttgctcaggcatcctgggccctctctgaccagcaggatcttcctttagatcttgacagtgaaacacatctcttctgtgccccctgtgagttttctttcattcattcattcattcattcattcattcattcattcattcgagacagagtcttgctctgtcacccaggctggagtgccctggtgtaatctcggctcactgcaacctctgcctccagggttcaatcgattctcctgcctcagcctcccgagtagctgggatgacaggtgcgcaccaccatgcctggctaatttttgtatttttagtagagacagggtttcaccatgttggccaggctggtctcgaactcctgacctcaggtgatccgcccgcctcagcctcccaaagtgctgggattacaggcatgagccaccgcgcccggcctgagttttccttttatgaaggacctgcttggttggttgcctgccacatgttgtcagcaccatgggcccaggactgctgaggagctgttgatgccctcgctctcccagagccaccggctctgttagataattcacatgcagtctggccactgtcctacgtcctcattcacaaagagcagacatttcgtagaagatgagggcctgggagtaacctccctgcatgtttttctataaaggcatagtggttaagtccttccagctcattgaccattggagaattttatggaggctgtagactaggggctggtaaactaagggcccaggggccaaatccagcctgccacctacttttgtaaataaagttttcttggtgcacagccatgcccattcattcatttgcacaatgtctgtggctgctttcatgccaaaagcargagaactgagtggttatgctggagacctacggccttcaaagccccagacctcacgtctggsccttgacagacagagcttccccagccctgctgcrcatcctggcccagcatgtgctgtgtgtgtgatttcagcttgcaggagccgtggttaggaattgtccctgtgttggtccattttgcattgctatgaaggagcacctgaggccgggtagattatgaaggaaagaggtctgtctggctcatggttctgtaggcagcaccagtatggcacccgcatctgctcagcttctagtgaggtctcaggaagctttgactcatggtgraagtcgaagcgggagcaggtgcatcacatggtgagagagggagcaacggagagagagagagagcgcctctccctcttgccctcaccttgagaggagatgccaggctcctttaagtaaccagctcccatgtgaactcacagtgagagcccatttgctactgcggagagggcaccaggcatctgctcccatgacccaaacactgcccaccaggccctacctccaaccttggggtcatattttattctgttctatgctatgctatgcyatgccatgccatgccatgccatgctattcctattctattatttgagacagaatctcgctctgttgcccaggctggagtgcagtggcatgatcttggctcactgcaacctccacctcccaggttcaagcgattctcctgymtcagcctcccgagtagctgggattacaggcacacaccaccacacccggctaatttttgtattttcaatagagatggggtttcaccatgttggccaggctggtctcaaactcctggcctcaagtgatccacctacctcggcctcccaaagtgccatgattacagatgtgagtcactgcgcccagtgagggtcacatttccgttgagatttggaggggcagacgttggagccatctgagccccctcgtcccgctctagcttctcctcccgtgtgccccgcggtgctggtggcaggcccttacgccggttctggctgcaygctctgttccagaagctttcttccctgcttggttaccagaaaatcatcccatccattacaaggacagggtccccttatctcccattcccagggcaggacaccgggggcagggcaggtggggaactgagcaagttctctgggggcaggcgtggctatggctccctctgggtgggcgtctggggaggggtggaggcagccgtcagcgccctggcttgctcttcctccctggccagagactgtggccttgtgctgctcccgtgtgggctgcctgcacctccagtgggttgtgctccctcccctcccctcccctcaagctctgctgagcaccactgccttccacagcccccactctcgggaggcgaggctcctcgtggccattcctgtccttggcacccacccccccaccaacctggtagagccttgggcggggtctgttactccttgcatggcgtagacctccccacagtaggcacctgacacatacctcctggggggcaggcaggaggtgcgttgaggtctcagccctggcagtccctcccctgcgtggcataggcctcgccacagggtcatcgagggtgggtggagactgtactagaccactccccgctggtcctagaaagggtcccatctgtctgctctctgtttggagtccagaccttggttgctgtgccctgcatggtgggctggggggcaccctccagcctctctgagtgcatggcctctccttgcagccatctgcctgcccaaccagttccggtgtgcgagcggccagtgtgtcctcatcaaacagcagtgcgactccttccccgactgtatcgayggctccgacgagctcatgtgtggtgagccagcttctggcacggggaaggggcgtcygggctgggttcccccaggaacrtggagtttaggggaggagacgtgcctttccagyggggctgggggctgtgtgggagactcaggcggctgggaggctccttgcgggaggcagggaagcctttcccagggcagcggccaggaggacagactgtgagctgtgggctcggcggctacagartctgcctcagtgggcggggctgatggtgtccaggtgcctgyagcacgcacccacccacgggaccttgctgagcagcgtctgtcaggcagcaagattacccgagggctgcagtggtcctgttccctggcagcttactgtctggctgaggaggagtgatgttcacatatgcacacatgtcatgtgcacacacatgtacatgacaacatcccacatgctcctcaaatagcatgacctgtacagtcacggatatagggcctaggggataggaggccaagacagtcagggaagactttccagaggcagtggctcctgaaaggctgtctgattcaggcaggaagggagctgagttcagataggaagtagcaatgagtcattgtgtctggggacatggccactccttcgctgcagagggacctgggctgagagctcctctcttatggctgcagtcgggagagaagtctgttggggggagaagggggcttcctcaagggaytccctgtgccctttggcacctycgtgccaggtcaggcttgaggcctgaaggcagtggtgggggccaccaagggtcgcctcctctgctgggcaagttcccartctgacgggcctgtgccgtgggccccagctgtgggggcgctgttgatgcgcagccaggcctcgccrccagagcccgcacgcttccattccgctgacttcatcgacgccctcaggatcgctgggccggccctgtgggagagtgaatgtggcttttgccaaagttgagtctggagcctggaaacttccctatgggcagccttgatagtggagtggcccaaggagcccacccagccgaccctgcccctcccgtggctggtgggcggcaccaggggctgcctggctttgctcgttcaccaacatcaccygggctggccagggcgcgctcacttctgccaccaccgagggccctgggcgaaggagtgaataccaggctgccttggcagggatgtgttgagggctgtggggagtcggacagcggcgggggtcagaggaggaggagggtgcaccgtgcaggctgaagggccacgttaccctgaggttggccaggctccccaggcctagcctcccagctcccccactttctccccaccctccaccagtggcaaagccagccccttcagggcgcacggtgtctgcccccaaggagggcccattccrttggggttaatgttggccacmtctttctgtttgtctctggcagaaatcaccaagccgccctcagacgacagcccggcccacagcagtgccatcgggcccgtcattggcatcatcctctctctcttcgtcatgggtggtgtctattttgtgtgccagcgcgtggtgtgccagcgctatgcgggggccaacgggcccttcccgcacgagtatgtcagcgggaccccgcacgtgcccctcaatttcatagccccgggcggttcccagcatggccccttcacaggtaaggagcctgrgatatggaaygatctggaggaggcaggagagtastctgggcagctttggggagtggagcagggatgtgctaccccaggccctcttgcacatgtggcagacattgctaatcgatcacagcattcagcctttcccactgagcctgtgcttggcatcagaatccttcaacacagaggcctgcatggctgtagcaacccaccctttggcactgtaggtgtggagaaagctccttggacttgaccttcatattctagtaggacatgtgctgtgttgtccacaaatcctcatgtaccctagaaatgaatgtgggggcrgctgggctctctccagagctgaaggaatcactctgtaccatacagcagctttgtcttgagtgcagctgggatttgtggctgagcagttacaattcctacgtggcccaggcaccaggaacgcaggctgtgtttgtagatggctgggcagccgcaccgcagagctgcaccatgctggtttgtatcacatgggtgaccatggtatgtctaagaaggtggagtccctgtgaggtctgcaggtgcccccacagctccaggccaccttgaggattgcctctgcctgcccagccctgagttccctctcccctgtcctgtcccactgtcaccccaagccggcctcattgggagcctgttggatggcagggtatagatgtaacctgattctctctggggagcggggttatctggcttctcaagagctcctaggagcccacagtggtggcaccatcacagtcgcagcagcccccagagaacgcggccctgtctgttcctggcgtgctctgtgctgccccgcctgggttccctgccccagtcgcaggccccttggaggaggtaccatgtgtctccygtttcacagatgagccccggggagctcactctagtagtggccagagaggcctgcggctcagggagcggggcacatttccaacaggacacaccgccctggtctgagtctcgtgggtagtgggagcagaggagagcgccctatgtctgtggggcggcttggctgarcctggaagccacctgacctcccccgtcccttccctgccaggcatcgcatgcggaaagtccatgatgagctcygtgagcctgatggggggccggggcggggtgcccctctacgaccggaaccaygtcacaggggcctcgtccagcagctcgtccagcacgaaggccacgctgtacccgccggtgaggggcggggccggggaggggcggggcgggatggggctgtgggcccctccmaccrtcagtgctggccaccggaggcttcccgggttcctgggggctgtgccaccgcctctgaggcatgcttgctttcttcccttttcaaacccttctgcttccttctttaatgacattgttgattgtggataatctgaaaactacacaaaaatataaagagccaaaatctcacccaaatccacctcctagagtggctgttgggctccgtcagcatccaggcggccgtctgtgttccgcacggcccagcccatcgatagccgcctgcaccaggcctgtctgccctctgtgagcctccccacagggttccctccacaaacaccctgttctcccacccagggctggctgcttcctggaaaacagctggatggttttgtgcatgacagacaaacacagggtgattttcgtggctaaaatactccctggagcttttggcagggtgaggggctggctccagctgagccacgccttgagtgaaatgactgtgaggagaataaactgccgctgccctccaggatcactggggctggctggggagaacccccgtttctgggagcacagtcccaggatgccaaggcgagcttggtgccgagatgtgaactcctgagtgtaaacagcgggggctgacttgacatgctttgtatgcttttcatttgttcctgcagctgtatgcccctaaggtgagtccagcccccttctgcttcctctggggcctcgccagtgagccccaccttgctggggctggttcctcctgcccttctgggtatccctcacatctggggtcttgtcttcttgttttctttttcttttttttttgagacggagtttcacttttgttgcccaggcttcagtgcaatggtgtgatctctaggctcaccgcaacctctgcctcccaggttcaagcagttcycctgcctcagcctccctagtagctgggattacaggcatgtgccaccacgcccagctaattttgtatttttagtagagatggggtttctccatgttggtcaggctgatcttgaactccctacctcaggtgatccgcccaccttggcctcccaaagtgctgggattacaggcgtgagccacygcacctggcctttttcttttcttttcttttcttttttctgagacagggtctcgctctgtcacccaggctggagtgcaatggtgtcatcatggctaactgcagcctctaccttctaggctcaagcaatcctcccatctcagcccctaagtagctaggactgcacgcatgcatccccatgcccagctaatatttacattttttgtagagatgaagtttcactatattgcccaggctggtctccaactcctggactcgagcgatcctcctgcctcggcctccccaggtgctgggattacaggcgtgagccaccgtgcctggcctggggtattgtcttcttatggcacctgactgtggtgggccctgggaaggaagtagcagaagagggttcttcttggtttcctggacagtaactgagtgttctggaggccccagggcctggctttgtttagggacaaagggaactggtaaccagaagccgagagtttaaacacccactgcccttcttccctgctcctgctgctgcaacccagcttaaccagccaggagtgctaggaacccaagcagggcccccgagcacacagcaggcagctcacgaattctcttttcctgttctcccttgggagctgggaggatcttaatcaggcaataagagatggcactgagcagccagctaattttttaaatcactttattgtttaaccatatgactcacccacttaaaaaagggtacagttcagtgggttttagtgtattcacagatgtgtgcaaccctcaccacagttaattttagaacattttcctgcccctaaaagaaactctgcatgaagccagctgtttttaaattagcaaagttattttgcatcctttaaatatatgttcatggtacaaaattcaaaagatacagaagagtctgcagtccaaagagactccgcccccatgacgccaagcaggmmtccctgggaggcatggcctcctgcagtgtgtttcttctatgtccccccaggggtcatctgtacatatgcaagcatacaagagcgtggactttgttttccaagccagaagataattgtagatttatgtgcagttgtgagaaagagcacagacccatttatcctctgcctggtttcccccagtgctgcctgccatcttgcatgacttccattcctatcataagcaagacactgataacgatyctttcaccttattcagattgacataagtgttttttgtttgttcttgagacaaacttcctctgtcacccagtgggagtgcagtggcacaatcacagctcactgcagcctcaaactcctgggctcaagcgattctcctgcctcagtcccctcaagtagctcagatggcaggtgtgcaccatcatgccaggctaatttttaaattttttgtggaggtgaggcctcactaaatttcctgggctagtcttgaactcctgagctaaagtgatcctcctgcctcagcctcccaaagtggtaggattacagrcrtgagccactgcgcctgggctgacatatgtgttttcgtaagcccgaaagatagcatctgaagagtcaacattgagccttgccttttgctgctaaygatgtataaaagctgctgttctgagcatttcggaggctcccagctgccgtgtgcaccctgcctagagctctaccgtaacccatctccgggaggaggtgctattgttttcctcattttgcaacaaggaggctgaagaactgagcatgaaccactggcctgggtcgttcggttggtaggcagtggggccaggccatccaactcacaaccaccttctactctgcttcccccgcaccctgaagtttgttytgttttgaggacacagccgtcacattyttggtggctgaacagcactccttgtcaggcgtggctgggcccccactggagggcatcatggtcctctctcctgctgcggttgaaccttggctgtttcaaccactcctgccaagtggccctctgaaagggacagtccatcttttctcagcagagggccacactggcaaaacggtccctggcaccctttctctccacctgtctaatatagagtaaaaatggtatcatgttaagatcttcatttatatttattttatcatgaatgatgtaagcatcattttgtgtgtttaagaacctttgggcccagcgtgatggcttgcagctgtaatctcagcactttaggaggctgagatgagcggatcacttgaggccgggagtttgagaccagcctggccaacatggagaaaccccgtctctagtaaaaatttaaaaattagccgggtatggtgatcccagctacttgggagtctgaagcatgagaattgcttgaacatgggaggcggaggttgcagtgagccgagatcgcgccattgcactccagcctgggygacagagygagactctgtctcaaaaaaaaaaaaaaaaaagaaaagaaaagaaattatcaatctcctcttttatggcatatatatatatatatatatatatatatatatatwttttttttttttggttatgttcagaaaggccttccctgctctgatcataaaaaacaacttattttcacactctctctcttttttttttgagacagagttttgctcytgttgcccaggctggagtgcagtggcgcaatctcagctcactgtaacctccgcctcccgggttggagtgattctcctgccttaccttcccragtagctgggattataggcatgcaccaccatgcctggctaattttgtacttttagtagagacgggggtttctccatgttggtcaggctggtctcgaactcgcgacctcaggtgatccacccacctcggcctcccaaagtgctgggattacagacgtgagccaccatgcccagcccacactctctttcttaacgtcctcctcctttcgttttacgttcacatctttaattcttctgggatgtaattagatttgatgagcaaggtgggcatccagcttgtttcttggctgatggcttatgggtggcgtgaattagtcggggtctatcaggaggcagaaactctatgagaatttgaacagagaaagttccgtctacaggcttattaccagggactggaatagcagaaattgaacagtgagatgtacagagaactctaagaatgcaggaataggccaggcatggtggctcacacctgtcatcccagcactttgggagaccaaggcgggtggatcacctgaggtcaggagttcgagaccagcctggccaacatagtgaaaccccatctctactaaaaatacaaaaaaattagctgggtgtggtggcgcatgcctgtaatcccagcttctcgggagtctgaggctggagaatcacttgaacctgggaggcagaggttgtagtgagccgagatcatgccattgtactccagcctgggcaacaagagcgagactcagtcaaaacaacaacaacgcaggaatagcagatgagccgaggtggggcctccccagcccccaccccccaccccccaccctgggccgagatccagtcctctttgaatagggcctggccgtggttcacgggacatctgagacattgccgaggcgctgcactggtggatcttgccagaagtctgcccagtgcagatttgggcagaatctcaaactgccttgggatgtaggagagaaaccaggcctggtcaagttcatgggaagaggtggaaacagaccccataggctggggcttgggcagctgtaggaagccctctctgctgcctccctgcctgctctctgctttgaagcatcttccccagtgcccccagtctcatgccctctcaacgttggggtcaaatcctgaggaatacccagactggctctctgggccaaagaggaccctctccagaaagagcagggcccagtgcggcttcctaaagggcaggggaagggcctggccactccccagaggctactcaccagccatcaggatagccccaggaagcaggccttctcgagcccattttattactttattttattattttatttaattttaaatttattttttgagacagagtctcactctgttgcccaggctggagtgcagtggtgcgatctcaacccactgcagcctctgcctccagggttcaagggattctcccacctcagcctcccaagtagctgggattacaggtgcccgccaccacacccggctaattttcatatttttagtagagaygaggtttcaccatgttggccaggctggtctcgaactcctgacctcaagtgatccgcccgcctcggcctcccaaagtgctaggtcaagcccattttaaagttgaagaaactgaggctgaggtaaattccctccccagggatcctgctgcagccagaaggtggtaaaacaggacttcacccgggtctgtctggcgtgaaaggcagtgttcttgtaccaccctagggggcctgagagaactgagtccctcgggcataactgacagttctgttcccattattccgcaggggctcggatctggctgtatgctttccaggatggccttggagacccacataagccctacaccctttgggaagctgcatgttgggttggggtgccgtcagtggcacttgtggaaggtgcagacctgtgtgggtgtgtgggcccagggcccctggtcccttcctccctttgtagggctggttgtgtgctgcctggacctggggggcacgttcacgtggtgaatttgtctatttactatccccgctttggggctggtgccagcacaggcccttgtgaagggggtgcctttgtctggagtgggactgtggcccctccctcagcgtggtgacttctgtgtcagggcttcagcagggacgcagagcccctgagtgttcggaacaagggcgtcattgcaggagttagactgtgtgtgatggagggaggaggggcaggaggaaaggtcagaaggagagttcctgggaaggtccctgaggagcctggtgaggtgctaactggtgtggaggacactcagggcctgtggggacatctcctactgctgggggccagccacaaagggaactggccgaagtcctgtccccgccttcacagcccagcatctggtcacaaggcaggtacttggaagggcgcgggcacctgggccaaaagtgcctgggttccctttgcctttcactgagatgaccttcggggcaggtggctgctgcctcccctcctgtccccaggttttgccaactggccagaggaaggggtcctgggaagcaggggggccagaagccctctctgcaaggaaagcccgaggggtgtgggaggaaggaaggaatgcccaggctggcgaggctctaagtcaccctggcttggctctcctcagatcctgaacccgccgccctccccggccacggacccctccctgtacaacatggacatgttctactcttcaaacattccggccactgygagaccgtacaggtaggacatcccctgcagccctccatggccattgggttcccgccagcccgtggtggaggggcctaatccccatgccactgatgaggggaggtattctgggtgctagtgggcaggtgcygggcccagccctgcctccctctgctctgccaaccacactaggctgcctccccagacaagctcagcgggcactgcatgttgggttcagaaatcagcagaactccacgttctgagctgctcttcaagttgctcytatgggggttacttttaagctgggaaatggctgtggcgtcgaggggccgggggcttgggctccagagtctgactgtgtgtttgagtccggctgtggaaacctagccattgagatgccccctcttggtggctctgtcctcttaggatgggacaagtctgtgaaggctgctgcagcacccaccgtagacccctaatcgtgtgacgtcaccaggatggtccgggctgctcacttgccacagtggcctgtttgagcccgggaagccaacggggctgctcagctggacaccagccccccgagctgcccatgttggggtcacaggccccacctccctggttggggaggggcaactgagagtgtggagaggtgggacccaggtgtgctggtctccgcaggggctggatcagagcctgggatgggcagggtgagcctcctgacctttaacccagtggtgtcaggcaacgtggcccacccgccagccgcaccaggccccacccccgcaggtgaaggggtgggataggctgggcctgggccaggacacctctggaccacgcattcctcattgcttgggtccctggagcagcagggcctcccgagtgtggtgccgcctgccacctagtggccatttccacgaactcccaggcctggctggggagccggaactgcagcctccatttccaccccactccgggtcgggccacctccctgatgcctcagtattatatcaaactgtcacagtctgtcccacagccttacagaccactgtctccagaatggtcacatccacactgggcagcccagtctcgctagttcctcgtcccacctcctgcctttgctcatgcccgtcmtgctytgggcccaccgcggacacatcttccccccgcccgccgtytgacctcacagcagctgggccccaagaggagtatcctgtcctgctgcacttttctcaacacccggtgttggctgcaccttcccacccattgcaggcccctctgtgacaggacgggggctcctaaacacaccacagttccgagtctgaactcacacagtgggatgcggcgtttctgggccacagttgggtgcaggtagcctctgggaggatgggaggtcaggagccatcttgcgagtcaggttgcttgaactcaggatggaagtgttccgggcccattggttgctgtattagcctgttctcacgctgctaataaagacatacccaagactgggtaattgtaaaggaaagaggtttaacggactcacagttccacctgcctggggtggcctcacaatcatggtagaagacaaggaggagcaagtcacatcttacatggcttcagggaacagacagcatgagaaccaagcgaaaggggtttccccttgtaaaaccatcaagtctagtgagatttattcactaccacgagaacagtatggggggaaccacccccatgattcaatcatctcccactgggtccctcccacagcacgtgggaattatgggagtacaattcaagatgagatttgggtggggacacagccaaaccctatcggttgccaacatttacagtaacagtgttaggtgaacagttgtccagtctcctgttttgtcggacactgtttctagcaccttccaggcagaatctcatgtatccttcactttcgaaatgggtactatttcatccccacttttatcaatgagaaactaaagctcraagaggtcaagtaagttcctggccaaggtcagctagcaggctctagaggcctcgttctccttagaggcagccttgccagggcccaggcttggcaggctgcagggcaggtgcgggcatgcccatggtagaggtgggaccattgaggctcagagagggtaagtgatgagccctggcgacacagcggggtgggtccagagtccggcctgcatcttctggagctggccagtggacaggcctttcccgttcacagccccggggctgctgtgcccaccagggcggatgtgcctaccgaatcccactcctctgtgtgtgtccctttcaggccctacatcattcgaggaatggcgcccccgacgacgccctgcagcaccgacgtgtgtgacagcgactacagcgccagccgctggaaggccagcaagtactacctggatttgaactcggactcagacccctatccacccccacccacgccccacagccagtacctgtcggcggaggacagctgcccgccctcgcccgccaccgagaggagctacttccatctcttcccgccccctccgtccccctgcacggactcatcctgacctcggccgggccactctggcttctctgtgcccctgtaaatagttttaaatatgaacaaagaaaaaaatatattttatgatttaaaaaataaatataattgggattttaaaaacatgagaaatgtgaactgtgatggggtgggcagggctgggagaactttgtacagtggagaaatatttataaacttaattttgtaaaacagaactgccattctttygtgccctgtgtgcatttgagttgtgtgtccccgtggagggaatgccgacccccggaccaccatgagagtcctcctgcacccgggcgtccctctgtccggctcctgcagggaagggctggggccttgggcagaggtggatatctcccctgggatgcatccctgagctgcaggccgggccggctttatgtgcgtgtggcctgtgccgtcagaaagggccctgggcttcatcacgctgttgctgttcgtcttcctcagattcttagtcyttttttttttttttttttttttgagacggagtctttctctgtcatccaggctggagtgcagtggtacaatctcagctcactgcaagctccgactcccaggttcaagtgagtctcctgcctcagcctcccgagtagctgggactacaggtgcgcgccaccacacccgcccagctaatttttgtatttttagtagagatggggtttcaccatgttggccaggatgatctcgatctcttgacctcgtgatccgyccacctcggcctcccaaagtgctgggattataggcatgagccactgtacccagctgactcttartcacttttaagaaggggactgtgccttcatttttcactgggccctgcagaatatatgcctgggctctgggctcttctgaaccygtgttggcttccatctgacctctctgtgccagcccaaggctgctgctcttcctgagggcaaggagccccatgactgcgtgttgactcgctggatggggctgctgagcccactctgccacaccacgtgcccctggcagggagggaatccctgggtcctcacaggaacagtcagcaagccacacctgacgcctgctgtgggcccatccctgcggtgctggagaagacagacaaggcctggtcactgcctctgcagggtccccagtccgtggaaggagacagtaatctaggcattttcggtggggaagctgagctgttctcgtgtcctgaaggccaggcgggaacagccgtcttcagagggaagggagaaaatgcacatcgcatcagtggagaagggcctgacttccctcagcatggtggagggaggtcagaaaacagtcaagcttgttgctgggtgacagtgcatttaataatcaaaatataggctgggtacggtggctcatgcctgtaatcccagcactttgggaggctgaggcaggtggatcacttgaggccaggagtttgagaccggcctggccaacatggcaaaacctcaactactaaaatacaaaaactagccgggcgtggtggtgcacgcctgtaatcccagctacttgggaggctgaggcaggagaattgcttgaacctgggaggcggaggctgcagtgagccgagattgtgccactgcactccagcctgggcaacagagcaagactctgtctcaaaaaaaaaaaaaaaaaaagcaatacaaaatacaaatatcactttcactaaaagaagggatggaagacccaaaacaaacagaaaacaacaaaatggcaggagtaagtcccyacttatcaataataacattgactgtaaataggctaagctctgcaatcaaaagagtgggccaggagcggtggctcacgcctgtaattccaacgctttgggaggctgaggcggatggatcatttgatgtcacgagttttaagaccagcctggccaacaaggtgaaaccccatctgtactaaaaatacaaaaattagccaggcggtagtggcacgcacctgtaatcccagctacttgtgaggctgaggcaggagaatcactggaggctgggaagcggaggttgctgtgagccaagatggagccactgcactcccacctgggcgacagagtgagatcctgtcttaagaaaaaaaagagtggakgaatggatcaaaaaacaagacccaaccatctcttgcatacaagaaacacactttacctataaaaacacactaggccaggtgyggtggctcacacctgtaatcccagccctttgggaggcctgactggcagatcacctgaggccaggagtttcagaccagcttgaccgacatggcaaaaccccatctctcctaaaaatacaaaaaaacaaaaaaaagaaaaaggctggaagtagtgatgtgtgcctgtagccccagctacttgggaggctgaggcaggagaattgcttgaatccgggaagtggaggttgcagtgagccaggatggtgccactgcactccagcctgggtgacagagcgagaccctgtcataaaaaaraaaagraaagaaaagaaaaacgagaaaaacaaacacaaaattagtagaagaaaagaaataatraagatcagaacaggccaggctcatgggcacagkggctcaactcctacctgctcaggagtttgagaccagtctggccaacatggcaaaaccccatctctcctaaaaatatgaaaaaaaaaaaataggctggatgtggtgatgtgtgtgtgcctgtagccccagctacttgggaggctgaggtgggagaatcacttgagcccaggaagtggaggctgcagcgastcatgaatgcaccctgcactctagctgggtaactggagtgagattctgtctcaaaaaagcaaagaccagagcagaaataaatgaaatggaaatgaaggaaacaatgcaaaatgatacaaaaagttttttcgaaaagataaacaaaatcaacaaacctttagccagattaagaaaaaaagagagaagacccaaataaataaaatccgagattaaaaaggagacattaccactgataccacagaaattcaaaggatcattagaggcaactatgtgcaactatatgctaatgaactggaaaacctagaagaactgggtaaatttctagacacatacaacctatcaagattgaaccatgaagaaatccaaaacctgaacaggccgggcacggtggcttacgcctgtaatcccagcactttggaaggcctgagatcaggagttcgagaccagcctggccaacatggtgaaaccccatctctactgaaaaaatataaaaattagccgggcgtggtggcgggtgcctctaatgtcagccactcgggaggctgaggcaggaaaatcacttgaacctgggaggcataggttgcagcgagccgaggttgcaccactgcactccagccttggcgacagagccagactccatctcaaaaaaattaaaataacaaaaacctgaacagaccaataacaagtaatgcgatgaaaactgtaataaaatgtttcccaacaaagaaagcccaggaacaaatggcttcactgctgaattttaccaaacatttttttttttttgagacggagtctcgctctgtcgcccaggctggagtgcagtggygcaatctcagttcactgcaagctcctcctcccrggttcawgtcattytcctgcctcagcctcctgagtagctgggactacaggtgcccaccaccacgcccggctaatttcttgtatttttagtagagacggggtttcactgtgttagccaggatggtctcgatctcttgacctcatgatcagtccacctcagcctcccaaagtgctgggattacaggcatgagccactgcgcctgaccaagatcctgtcatttataacaaagcaacaacgtggatggaactggaggtcattatgttaagtgaaacaagcgaggcacagaaagagaaacttcacgtgttctcacttatttgtgggagctaaactttttttttttcgggatggaatcttactctgtcacccagactggagtgcagtggcgcaatcttggctcactgcaacctctgcctcccagtttcaagcgattctyctgcctcagcctcccaagtagctgggactacaagcgcccaccaccacgcccagctaatttttgtgtttttagtagagatggggttccaccatgttggccaggctggtctcaaactcctgacytcgtgatccacctgcctcagcctcctgaagtgctgggattacaggcgtgagccaccrtgcccggccggggagctaaaaattaatacaattgaactcatagagatagagagtagaaggatggttaccagaggctgagaagggtagtgggtttggggggtgaggtggaggagagatggttaacaggtacagaaatacagttagatagaatgaagaagatccgtatttggtagcacagcagggtgactggagtcaacaataatttattgtacatttaagaataaataggctgggggcggtggctcatgcctgtaatcccagcactttgggaggccgagacgggcggattaygaggtcaggagatcgagaccatcctggctaacrcggtgaaaccctgtctctaccaaaaatacaaaaaaaaaaattagccgggcacggtggcaggcgcctgtwgtcccagctactcgcgaggctgagacaggagaatggcatgaacccaggaggcagagctaggaggcagagcttgcagtgaactgagatcatgccactgcactccagcctgggcgactgagggagactccgtctcaamaaaaaaaaaaaaaaagaataagtaggaaagtataattagatttttttttgtaacacaaaggataaatgcttgatgtgatggttacatcatttaccctgatgtgattattatacgttatatgcctgtatcaaaacatcatggctgggcacggtggctcaggcctgtaatcccagcactttsggaggctgaggcgggcggatcacgaggtcaggagatcgagaccatcctgtcccacatggtgaaagcccgtctctactaaaaatacaaaaattagctgggtgtggtggcgcgtgcctgcaatcccagctactcgggaggctgaggcaggagaatcgcttgaaccgggaggcggagattgcagtacgccgagatcacgccactgcactccagcctgaggacagagtgaaactctgtctcaaaaaaaaaaaaaaaaaagtttcatgtacccctaggctgggcgggcacggtggctcacgcctgtaatcccagcactttgggaggctgaggcgggcggatcgcttgaggccagggattcaagaccagcctgggcaacgtggcgaaaccctgtctctactaaaaaaacaaaataattagccaggcatggtgcgtgcgcctgtaatccggctactcaggaagactgaggcaggagaatggcgtgaacccgggaggcggagcttgcagtgagccgagatcatgccacyaccctccagcctgggcaacagagcgagactgygtctcaaaataaataaataaataaataaataaataaataaataaaataaaacaacmcacacacacacacacacacacacmccctaacacaaagacctggaagaagtgcctggagagagtctcctggcytcccaacaggaccccaaaaattgaacccttgatcaatggggctggatgtgcagaggtggtgacagcccagggaggctgggtctcctgaacccgcctttcccgcccacgcagtcagctggggagagtgaggggctcatccgccggctgcctaccctctgccaagtacatccttcagtaagtgcctgaagcgggcacagccctgcccttatgccacttatgtgctgggagacccagagattagtcaggtgtggctcctcccctgcatttgctccmaatccaggagacagcggggttccaaagccataaggaagcattgttctaagataccctagagcccagagggccgtcatattcacacaggaagccagagggggcttcttggaggaggcagtgtctgagctgtgtcttaaaggaggaggtgaagttaacctggcttatttaaacttcacaacagtccagccaggtagggggtgttcccagaatctacttgagggaactgaggtttgggtaaaaagaagcaaagccaacatttttttttgcatccgtttaatcttttgtttatccaatacac

SEQ ID NO: 9996 - DNA, 18071 bp, Homo sapiens
ggagctgagtccatgcctttttctctctgcgttgggaaagccatgctagctacatgcatttttggtcatgaaccagtcttagatttaagtcaatgtaaatttggcctttgccgtgttcttaatgtcttctttacatacctaggaaaagtgaaggagargtgagaaagacagagtggggaggaacccgtgtctgtgggtttgtrctagatgccaacctggctcttcacatcctctgtctcatccagtcaagcagccacactgagtcccccagcatgagaacagcttccacagagcaggagattctgggtctgaaatgaggagagagctccagtcccaccagtgccctagagcatacctcagaatgctcctttctcctggtgggatccgtggagtctgcctgctcttccaaggatgcctcagccttttaagtaaggcctagggaggggccctgaaactaccaggacctgaggagaagcaggawtctcagcgtgatttcacaccaccctaagccgccgggaatacttgctgctcattatctctctattggagtctcatggaacacattgtgggaagtgctatagaattctagggacatagtgggcaccaagtgaatatcagttactttaattattactaaatttatctccctaacaggaatttactatcttaccataataaactctgcttacatwctcatataggtgaatacacctgccctaagtcatctctacagcaagagcagaggccacatctacctccagggttattgccattctcacaaaggtgaggataagtcaccacrgggaacattgcttctctgcaggctgtgacactttccagggcatataaagcccatgaagaactgagatgtttgctgagaagagagcatacccaccgaagacagtggaaaatgaaaaaacaacaggagtagaaacttcccaatagtgatgtcaaactgtattagttactaattgctgtgtaacagcaaacctagcgacctaaaacaaacaaaaaaattatttaacaaagacagagtcgggaataagaaaactggcttggctggagggttcggctcagggtgtctgattaggttgtaggaaagatgtcagccaaggtttcagtcatctgaaggcttgactgggacygaaggatctgtttgtaagattgctcactcagaccattggcaggaaaccacagtttctcaccatgtgggcttctatataggggtgcttgaatatccttattagatggcagctggcttcatccaggtgagtgttctaagagcaaggaggaaactgcaatgccttttatgacctggtctcagaagtgacatgctgccatgttcaccatgtaacatactcattagaaaaaagtcactaagtccagtccatactcaagagaagggcagttaaacttcctctctgtatcagtctgttctcacactgctaataaagacatacctgagactgagtaatktgtaaaggaaagagattgaattgactcacagttccacatggctgaggtggcatcacaatcatgatggaagatgaaggaagagcaaagtcacatcttacatggcaggagggaagagagcttgtgtaggggaatgcccctttataaaaccatcaggtctcatgagacttattcactagaatgagaatagcacaggaaagacctgccctgatgattcagttacctcccactgggtcccttccatgacatatgggaattatgggagcaacarctcaagatgagctttgggtggggacacagccaaactatatcattccacccctggctcctcgcaaatcacatgtcctcacatttcaaaaccaatcatgccttcccaacagtcccccagggtcttaacgcatttcagcattaactcaaaattccacagtccaaagtctcatctgagacaaggcaagtctcttctgcctatgagctgtaaaatcaaaagcaagttagttacttcctaaatacaataggagtacaggcatttggtaagtacagctattccaaatgggagaaattggccaaaacaaaggggctacaggccccatgcaagttcaaaatccagyggggcagtcaaatcttaacgcttcaaaattacctcctttgagtctctgtctcacatccaggtcatgcttatgcaagaggtgggttcccatagtctttggmagctccactcctgtgactttgcagggtacaaccctcctcctggctgctttcatgggctgacactgtctgtggcttttccaggcacacagcataagctgttggtggatctaccattctgggatctggaggacagtggccctcttctcacagttccactagacaatgccccagtggggacattgtgtgggggctcccaccccacatttcccttctgcactgccctagcagaggttctccatgagggctatgcccatgcagcacacctctgcttggacatttagacatttccaaacatcctatgaaatctaggcggaggctcccaaacctcagttcttcacttttgtgcacccacaggctcaacaccacatggaagctgccaagggttgggatttacacyctctaaagccatgacccaagctgtacctttgccctytttagccaaagctggagtggctgggatgcaagtcatcccaagtcctgagactacacaaagctgccaggccctgggtctggcccatgaaaccattttttcctcctggacctcyaggtctgtgatgggaggggcttctgtgaagacctctgatatgccctggagacactttccccattttcttggtgaaaaacatttggctcctctttccttatgcaaatttctgcagccagctcgaatttctcttyagaaaataggtttttcttatctcatcttcatgctgcatgttttccaaacttttatgctctgcttcccttttaaatgtaggttccaattccaaaccatatatttgtgaatacataaaactgaatgttatcagcacccaaatcacctcttgaatactttgctgcttagaaatttcttttgccagatgccctaaatcatctctttcaagttcaaagttccacagatttctaggtcaggggcaaaatgctgccagtctctttgctaaagcataacaagagtcacctttgcttcagttcccaacaagttcctcatctccatctgagaccacctcagcctggaccttattgtccatatcactatcagcattttggtcaaagctattcagtgagtctccaggaagttscaaactttcccacatcctccyatcttcttctgagccctccaaactgttccaacctctgccttttacccagttccaaattgctgggtaacaggcaaagtgttaaagtgctgaaatgccaatagtgatgtcaaggtgtgttagttaccaattgttgtgtaacaaagtatcagcaaagttagcagcttaaaacaagaaaaaattattatttaacaaaggctgagagtcaggaatgagaaaactggcttggctggagggtttggctcagggtgtctcattaggttacaggaaagatgtcagccagggttgcagtcatctgaaggcttgactggggctagaggatctgcttctaagattgtgcattcacagactgttggcaggaaaaaatagtttctcaccacgtgggcctctccatagggctgcttgagtgtccttatcacatagtggctggctttgtccaggtgagtgatctaagagctaggaggaaattgcaatgccttttatgatgctgccatgttcatcatgtaacatagcgccccactcccagtatcaatttactatatcagtctgttctcatgctgctaataacaacataaccaagactgtgtaatttataaaggaaagaggttgaattgacttagagttccacatggctggggaggcctcacaatcatggtggaagatgatgaaagaagagcaaagtcatgtcttacatagtggcaggcaggagagcttgtgtggggaaattcccctgtataaaaccatcagatcttgtgagacttattcactatcatgagaccagcacaagaaagacctgcccccatgattcaattacctcycactgggttccttccatgacacgtgggaattatagaagctacaattcaagatgaaatttgggtgggaacagagccaaaccatatcaccttcttaaagatgaagtttccaagaatttatggacatattttaaaacagccacacatggtttgcgaattggcagcattgtctttaggtagtgccaaagtttatttttcagaagttcaaaacttgactctcatacacacatatagtgagcatgtgtcaaagatttactatttttcataagtgagggaatcagcaagattataaagctgattatcaaaagataattcagggaatggaggcttataccgtcagtcaagaaataaaggctgaaataggttggctaagttacgtttttaaagacagctttatgacttgtgaggcaataaaactgcaccctttggagttatcttttctatcagacaggaataatgtgtaatttatcaatgttctcttagttcatggctaatttcacagagtctgagacctaattagtaagtcaagcaaagggataggtccagagagaacttaytgttggtgaggcctgtttgataatgttttcatataatattgacagtatrcacagtcatagtttcattttacttattatttatttatttattgaggcagagtctagctctctctgtcatccaggctggagtacagtggctcaatcttggctcacygcaayctccacctcccaggttcaagcaattctcacacctcagcctcctgagtagcttggattacaaatgtgcaccaccaacccggctaatttttgtgttttcagtaragatggggttttgccaygttggccaggcttgtctcatttcatcttatttctactgtcattccatttggtcaatttgtaatttaataattttgtacaaggcagtttctacattaattttatttttctgaaaagtgtctatcatattagtggcattatgaaaatcgtagattattttctgtgttttgaacaacttgatattttatttattcttgaacacttgtaggacctcttggctcatatgtctgaataccatttctttaaaatgtacgctttaacatgtayacatatgtaacaaacctgcacattgtacacatgtatcctaaaacttaaagtataataataataataaaagaaaaaagaaaaataaaacttaaaaaaaaaagtgtatgctttaacaataaattattaataaatagttatctgtgttattcaagatataattaaattgttttttgtgcactgacccttacctttatttcagatccatcacagagagtgcatggaggtatttaaactgcattaactgtttcacaattaagtattatcttatcaattaggtattcaagaaagatcacttacagaattatagatggcatgagctagattttactttctaaagaaataaccagatacatgagcaaagatgttaatacaaagatgtttgtcacaacatggttttcaatagcaaaaaaagagagaaaaatatataaaagacaaataacagtggataggtttcaataaataatgttacagtgatacagttaaatactatacagctattgaagcatgtcattattcatatttagtatggaaagatattttgctattttgcyacatgaaaaaatgaggttggaaaaagtataggttttgtgaatctgttgtatgaaagctgtctatagttacatgtgtatgtgtgtggaggaaawagtgttgtcattggttttctgatgatgcactcagaaaagacaagtattcacattttttcttgtggctgatctggattttcaggtttttctacaatgaacatgtaggctgaacattccctaagcaggagagtcccacctctaacatctcctgtaggcctggcaatggcaggcaggaaagacagaggaaggaaggagggagaagggaaggagtgaaggaaggagtgaaaaaggtaaggaagaaagggaataggggaggaagggaggaaatgggaagggaaagaaggaaaggaaggaaagagggagggaagaaaggaagggaaaagggagggagtgagtgaatgaaagatggaaagaaggaagaaagggagggaggcagggaggaaagaaagtygcgcttcccttgagctgccatgggcactgactcttagggtctgaaagcccctgagatgcaaaagcctagtgctcacaaagagctggaaagcctcaaggaagttcttcaatatttytggaaggaaactgtctccagaagcttccctccccacgacagayaatgagcagcaagtgcttctggcgacttagggtgatgtgaaatcacgctgggaatcctgctcctcctcaggtcctggcagtttcagggcccctccctaggccttacttaaaaggctgaggcatccttggaggaacaggcagactccacagctcccgccaggagaaaggaacattctgaggtatgctctggggcgctggtggtaccggagctctctcctgaccccagacccagaatctgctccgtggaggctgttcacatgctggggagctcggtgcagctgcttgctccccagaccccagscmactcagcctctctctccatgattttctgttgtttattccaaaataggggagtctacaccctgtggagctcaagatggtcctgagtggggcgctgtgcttccggtgagtgtatgaggccctggtttggtggtgtcctccggaggaagtgagttctggatagacccgttgtccagctctgagcaggagggaggaagggaggggctgccattgcagctgggaaattgtgaccagcacctcaytgctcttagagttttcccagcctttttcaaataggggcaggactggggcaggccatctcacaaggggtccctgatgctgagggggayaagtgaacctcccagtctagagctccagccaagtctatccaaggtgggaacgggggccaggatccytgctcagagctccgccattgtcccccatcacagtgaatggatgtaagctcacccactctgtgcccctrcctccctgctactctttggggataataataaaacaaaaaccattaccatcagycagtctgtccacccactggcatgtaccaagccagacactctgccgtgttctgggcttwacaacagaggatgagagtggtcctttctctcagtctaataaagcacttcccaygatgtgttctatgggactcgattagaggagtcccacagaggcatccaggagatgctttacacagtggagctctctgatcaagtaaatgcagggaattctgctttctacatcctctcataagagaaccacagcccagctcagcatatgagtgaytgaggttttctgaagtaaggcaacttgttgaatygtatttagcyatgcatcgacccaatttttacactgcatccttttcccccatataacttttggagaaacccactttaggatacatcttccacctcataggatgccaggaaatcaactgagttcaaagatgagaaacaactttgaaaagttaaataaaagaaatttaaatttaaagaaactcctcacttagtaaggaatatatgaccaaatagaaatacatgtatcttgaagaattgaagaatcaggctttaacgtggaagaggcctggatgttatccaacccatcatcttagtgtagcaatggggaggctcaggcccagagtgggcgagagagttgtctcctgcgactcagcagcattggaggcakagatggggcaagawcctagggctctgactcaccgwgcagcttctcttccarcaggagatgggttggggcagaaaaggttgaatagggtgaaggagcaaaccacagactccagtgggagactgtggggtcatcctccttgtagggcatgagcccagcagggctgggagacaaggctgtgctgttacttctggcacagtaggaagaaagagagacaaaatgcctgagatcagggggttctctggatccagggcatgctggagtgtccaccctcctcctaatgtagtcctcaccccttcctgatgtttcagaatgaaggactcggcattgaaggtgctttatctgcataataaccagcttctagctggagggctgcatgcagggaaggtcattaaaggttggtgatgaaacatgacccactttccttggtctctatacactctcaggggagggggcctgaagagggcttagaatagtcatacagattagcataggcctacagagcccaggcattrgggcagcacaaaccaggctctaagcaaaggcaaataaaatactacacctctcagcaaagtgaagacacasgctctggggccacctgaagcttctrtgcagaagtgrgaatgttttccaagaggcttgtcttgtcattcccttacaggtagatttaggtcaagcattgcattccctgggagccagtaagtaccaaggagagaactaacgtagattctctataccttttttcccatatgggagtgggtttctgcctctccaccctgggtcccctctgctctctgaagatcctcagtcacttagagtggagggacccagagaacaggtggcattgttggacctcctgcttgctcactctgccccatgcactgcaacasgtccctctctaaaatagtttgcacctgcccacctggggcacccttgctgagcacagatgccaggtagatccttcagctaggccatatgtgtatgtgtgtgcttactggtgtatgtatgtgtgcatgcaggcatatatgtgtgagcatrtgtgtgcatgcatgtatctgtrtgtaaccatgtatgtgtgagtgcaggtatgtaggtatgagcatgtgtgtgwatatgtatatgtgtgcatgcatgtatctgtgyatgtatgtatctgatgtatgtgggtggtgaggggatgtacagagaggaatgagaccctcttttgctctcagcaacmtcacagggtgtagaaagttgtccaaacaattccaaaggggggcttatyaagacagggttcagaaaaaggcctgagacccaagggrcattaaaggagggggttgartctattttgggktgtagaggcttgaagatttgaccctgaactagagggtggagtggaggtggtacaatgtgcttccatgccttgatgtccactctgrgccagtggacaggagaagccatgtcatgacagctgctgagaagcctcccttctgcccagcctgggggcaggccgtctyacagcagtcctgtgccctagagcccaggacaggggaagaaggagggaaaggcatccagggccctgcatctggcctctttcccacaggtgaagagatcagcgtggtccccaatcggtggctggatgccagcctgtcccccgtcatcctgggtgtccagggtggaagccagtgcctgtcatgtggggtggggcaggagccgactctaacactagaggtgagacttggggcatcctcactggggactcagccacagatgctgagcctactgaagccgggcagcccacagccctggtgctgtgggacaccctagcaggattctgttgatggcagctttgcctcctccctaaggatcctgcccagccctccctctgcccctgcttctgccctcacctgacctcccctcctctgccggcagccagtgaacatcatggagctctatcttggtgccaaggaatccaagagcttcaccttctaccggcgggacatggggctcacctccagcttcgagtcggctgcctacccgggctggttcctgtgcacsgtgcctgaagccgatcagcctgtcagactcacccagcttcccgagaatggtggctggaatgcccccatcacagacttctacttccagcagtgtgactagggcaaygtgccccccagaactccctgggcagagccagctcgggtgaggggtgagtggaggagacccatggcggacaatcactctctctgctctcaggacccccasgtctgacttagtgggcacctgaccactttgtcttctggttcccagtttgsataaattctgagatttggagctcagtccasggtcctcccccactggatggtgctactgctgtggaaycttgtaaaaaccatgtggggtaaactgggaataacatgaaaagatttctgtggrggtggggtgggggagtgstgggaatcattcctgcttaatggtaactgacmagtgttaccctgagccccgcaggccaacccatccccagttgagccttatagggtcagtagctctccacatgaagwcctstcactcaccactrtgcaggagagggaggtggtcatagagtcagggatctatggcccttggcccagccccaccyccttccctttaatcctgccactgtcatatgctacctttcctatctcttccctcatcatcttgttgtgggcatgaggaggtgstgatgtcagaagaaatggytcgagctcagaagataaaagataagtagggtatgctgatcctcttttaaaaacccaagatacaatcaaaatcccagatgctggtctctattcccatgaaaaagtgctcatgacatattgagaagacctacttacaaagtggcatatattgcaatttattttaattaaaagatacctatttatatatttctttatagaaaaaagtctggaagagtttacttcaattgtagcaatgtcagggtggtggcagtataggtgatttttcttttaattctgttaatttayctgtatttcctaatttttctacaatgaagatgaattccttgtataaaaataagaaaagaaattaatcttgasgtaagcagagyagacatcatctctgattgtcctcagcctccamttccccagagtaaattcaaattgaatcgagctctgctgctctggttggttgtagtagtgatcaggaawcagatctcagcaaagccactgaggaggaggctgtgmtgagtttgtgtggctggaatctctgggtaaggaacttaaagaacaaaaatcatctggtaattctttcctagaaggatcacagcccctgggattccaaggcattggatccagtctctaagaaggctgctgtactggttgaattgtgtccccctcaaattcacatccttcttggaatctcagtctgtgagtttatttggagataaggtctctgcagatgtagttagttaagacaaggtcatgctggatgaaggtagacctaaattcaatatgactggtttccttgtatgaaaaggagaggacacagagacagaggagaygcggggaagactatgtaaagatgaaggcagagatcggagttttgcagccacaagctaagaaacaccaaggattgtggcaaccatcagaagcttggaagaggcaaagaagaattcttccctagaggctttagagggataacggctctgctgamaccttaatctcagacttccagcctcctgaacgaagaaagaataaatttcggctgttttaagccaccaaggataattggttayrgcagctctaggaaactaatacagctgctaaaatgatccctgtctcctcgtgtttacattctgtgtgtgtcccctcccacaatgtaccaaagttgtctttgtgaccaatagaatatggcagaagtgatggcatgccacttccaagattaggttataaaagacactgcagcttctacttgagccctctctctctgccacccaccgcccccaatctatcttggctcactcgctctgggggaagctagctkccatgctatgagcaggcctataaagagacttaygtggtaaaaaatgaagtctcctgcccacagccacattagtgaacctagaagcagagactctgtgagataatcratgtttgttgttttaagttgctcagttttggtctaacttgttatgcagcaatagataaataatatgcagagaaagagaaacaaatgcatttgttttattattgcaattttctccaatattttttattttctttctcacaatgaacaactatccttcatttacccaaatattctatttaaaagctaataatacagcatttgttgagtyatctggttctgcaagattgagatcctcttgtcctatgtgccaggaatgaactccagtgtccccacccaaaccctggggaatgggagcagaagccagaggaggagcccatayctgagccccaggtattccacctgcacttcacctgttggaccagcttggtggttgagagtccactgaggcactggcaaggaggtggccaggacagacaaggctgcctctatggacctcacagctccagcccagattcagctgaagtcctcaggcaacaggcagcacagctcctaccccaggcctctcagggctgccaagaacatgagctccggatgctaggctgtgtttcagaccctgttcacactctctttgtccatgggcccagacacagtcttgtgctgctccctctgcttttgggtcctccatccatcctctctgcctagataaatctctcatctttcaataccctgctaagatgtcacctcctccaagaagcttttactgagttgagacacccccagctatctgatctggcaatgtttgtatgcacctccctgcactgtagtaccttaacttggagtctgtggcccctgggatgaccttaaggttagggacatataagtttgtctcttagcaccttgcataatgcttggcacataatggaaacccaatgagtatataatgtagaaactatttctccaccctggaatattctctccttctcctccacccatctaaacaggcccacctctaagggagcagcttaaattccacctcattcttgaaggtttctccagcctgaatttgttgcttcctcatttgtaggatgacagaactcagaagagctttagccatgatgagccgacacaagtcagtagtaaaagaaggaatataaaatgcctccttcaggaatgtacaggctggacatcatgactctacaagtgaaaaagagttagtggctttagatttctgcaattttggtataaatcactggcctggacctgtatttacagagatgcaatactcacatcatgtggggtttgtayaaattgcagacatcgaggaacagagaatgttccaagggcaggctgtagggaagaggctacgatgtgggaggtattatcctgaaaaargcaatgcacagggagccctcttcaagcacttaaaggcttgccaagtagaagaaygtgcttgttctgtgtaattccagaacacacaagcagaaccaatgggtgcaaattatgtggaggctgtttttcctatatgacccccatattttaaccacaaggaccacaaacattgatagggtttcttcaagaggttgtgtggtccctgaccctggagatgttaaggcagagcctaattaaccaatttctcagggatgccatagcacagatttctccaattggagggaaactatgattccatgtctatgagatggagtttcactctgtcgcccaggctggagtacagtggtgccatcttggcccactgcaacctctgcctcccaggttccagtgattcccctgcctcagcctcctaagtagctgggcctacaggtgcatgccaccatgcctggctaatttttctatttttagtagacacgaggtttcaccatgttggccaggctggtttgaactcctgacctcaagggatctgcctgccttagcctcccaaagtgttgggatacaggcatgagccaccatgcctggcctaaagtcctttcaattctaagattttttttttgcccaaggagcttatctgccactattgtttccaacatgtccttggcccacagcttagagagtctggtcttcttaattatcttttcaagtgtttatgacttagttcctcagctagactgtgaaactacttaacaacaaggactgtgtattgaatgtctgtgtcacacagcagtgtaaatgctgggtaaacactcattggttgcctgacatagtaactcatgctttaagccttcccatagaagggtgagagattgggagagtggaagaagaatgatcactggccttagaaagcagaaatctggtcccatttctgcccatcttttctcatttctcatcctgcaggcatctgagtcttagacccacctatcccacttcctcaagaagcccttggtggaactttgcaaatgaccaaagagggagaattataataaggttgttagtttccagagaacattacacctaagcttctccacgcttgtaatggagggatggatggatggatggatggatggatggatgratggatggatgaaagggtggacagaagggtggatggatgggcamatgggtggatggatggttggatggatgatggatggatggaagaatggacagatgggtagatagatggacagatgggtggccgggtggatggwtggatggatggactgagtcaagtaatgtcaattagagacctgagtgttctttcctctgtgctctactcacactatcatatttcctagcagtccatggcacatgatgtctgctcagtctcagggtgaatctgaggtcaatatctttgcagttgggtttccctagatgttctgtcccatcaagctggtaccaactaattaaacccactgaaaagcagagactcccttctcgtctttccaaacagagycacactcacagtgctatcagccccttctcttattctggctgtctggccacagcctggattccggcatcagaatttgttctgtccttgggcttgccagacatactttctcttgtattcaccacctcttcaagcctaggatggagccccacggggcaccaaagatgtctgaccccagcactgtttatctggctgcaaacccactaataacatagtcaacracagtcagtacagagcaggggccccataccttatttctgccaaggctttatggatgactctctcccccttcaacaaatgctcmttaatgttcccaccatcttattattcatgctgtaccaaagacattgtgaaatgcccaggctcttcttccttcatgtcctgcagccaattatagagattggtgcaggcctgacccacctgtaccagacggtataaacacagcgcaatgccctggagaaatcagttggagtctccagggatcagggttccaggaactcaggatctgcaggtcagtgatggacaggcaatattctctctctcttttctttcttttctactctctcctgtcaatatctctggtatgccctctatcccttcactcctcctggcaagctgtctaggtaacaaggtagtcccctcatatgacatgatgggacatcaaaaacatttaggagcacataaagagatttgaggagaaggaataggttaagccaaatcaagatttctgaactacttagaacaactgactttagaaagtaatctcaaaagaaaccatctgggccaatggtattcaaaccgtgtttggtggaagcttaagagattttttgttttcgtttttttttttttgtgctccttggtagctcctcagtgtcttctttgcaggcaagagaaatactagcagggttccaaagtctccattgcttcctgtgtcagcaaagcagctgccctttatcctttttacaatcattagaattctgcataaaattttattgtgaaacttaaaacagttttgaaagataccttactcaatctttccatccaatgttgataagttgaaggcccagggataaaaggtggcaaaataaattggtagcagagctaggtctaggactcagcctttctattcaaagtctgctctgtgtgtttctatgtcctggccacaaggaccagggtagttcaattagggtggttggagagagcttcaagtgagctgtaagccatgcttcatgacttcaagatcttataaacttttataagggaaacaaatatctttatgtacaacaataaataatacagtaaaatttaataggagttcagagtagagttacaatagtaagggaaagattcattaaactctgagtcatggaattataaatagtttggcctagaaagaaccttcataaccacataatctaatcccatgaatgtatagtgctgaaactgagggttggaggttaaaagacataaccctgtatgtctaagctgtaactctacactggtaattaatttgatagaactagatactgaacccatctatactgatactatctccagtgatcttaatatcaaaagatctgaatggatgacaatgagaagggatgacttttgaggcagggagaacaatgggacacctgtgagtacgtccactgagaagataagaaaggaattatgtcgccaggaggtgtggtttagtgtccatggagaagtgagatgctatcacacaagaaaatcagtgccagacggtgacaaaacagtcagtcactgtagattctagagctgggcagggatgtggtgaaaaaatctttagaacgtgggtccacattcctcacataggttggaatgaatgaaaggcagaaaaaccgggaatacaagtacagtagtaatggcaattaaaaacacaaagttatattttaaagaaataacctgtagggacttgataagttagacactgagtcaggagaagtaggagatattgtcaatgagtctcaggttttgaatatcactggtgagaggaatattatgacagtgagagaaatgaaattgggaggaatgtgtgggctgggaggagaagataattaacttaaccttaaatatatttggttggatatcagcaggatgtccaaagtgggctgtcctgtaggctgcaggaggtaaagtgggatgtgcagtctacatttgggagccattagcccaagataatcattgcagctgtagaagtcaatgaattgcagcttaatatgatgtgaaatagaagtgcttaggaccttgttagccttaggggtggccccagaaggaggtgaaatctacaatgggagaaagaggtgtgaagggagtcattcaatgtcaagggttccaaggaggcaatgactaaatatcaaaggaatcaaaagaatctctggatcttgctccacagaagttaatattggtcttggacagaacatcccacatagatactgtgcaggagaatgatgaaggataggacagggtgctgtgcaaaagaacatggggaaagcccaagtttagctgatggcagtgtttgagccaggacaggtgaattgcggaggtctgagagccagatgccatgtccagggagaaatgagaggaagaaaagagggatatagactgaagttcagtgaaaagtcatttgaggaaaatagggaggggaagctttgggggtgaggcatgtggcacactgggaggggcttggcacacagcagaggttcagcaccaagacccaggctctctgatggaccagacgctagcttcctacccttactcacttcatcacaatctatcagaacccaggcggagggagccgaataggggagcctttgggaaagacactgtacattttggctgtgccagaatgggaggtttctagggcccatgggatccagctggactggaccagcattgaatttcttccagctctttgagctgacactgacccagagtgggagtcatcagcttgctatccaccttcacccagggccctccactttgttgccccacctagatctgggcacagctaccacactgcccactgtcctgctgctacaaccaaagaagccccagtggtttggccaaggggagcccatcatcaagtgggcttgcattgaggccatgatgctgttgagttatctgtactgggggattgtctagtcctttaggactcaaagtgctggccaggaggaaccagcagcattgacatcacctggttgcatatttgaaatgtacag

SEQ ID NO: 9997 - DNA, 42793 bp, Homo sapiens
tctttccatctttcattcactcactccctcccttttcccttcctttcttccctccctctttccttcctttccttctttcccttcccatttcctcccttcctcccctattccctttcttccttacctttttcactccttccttcactccttcccttctccctccttccttcctctgtctttcctgcctgccattgccaggcctacaggagatgttagaggtgggactctcctgcttagggaatgttcagcctacatgttcattgtagaaaaacctgaaaatccagatcagccacaagaaaaaatgtgaatacttgtcttttctgagtgcatcatcagaaaaccaatgacaacactwtttcctccacacacatacacatgtaactatagacagctttcatacaacagattcacaaaacctatactttttccaacctcattttttcatgtrgcaaaatagcaaaatatctttccatactaaatatgaataatgacatgcttcaatagctgtatagtatttaactgtatcactgtaacattatttattgaaacctatccactgttatttgtcttttatatatttttctctctttttttgctattgaaaaccatgttgtgacaaacatctttgtattaacatctttgctcatgtatctggttatttctttagaaagtaaaatctagctcatgccatctataattctgtaagtgatctttcttgaatacctaattgataagataatacttaattgtgaaacagttaatgcagtttaaatacctccatgcactctctgtgatggatctgaaataaaggtaagggtcagtgcacaaaaaacaatttaattatatcttgaataacacagataactatttattaataatttattgttaaagcatacacttttttttttaagttttatttttcttttttcttttattattattattatactttaagttttaggatacatgtgtacaatgtgcaggtttgttacatatgtrtacatgttaaagcgtacattttaaagaaatggtattcagacatatgagccaagaggtcctacaagtgttcaagaataaataaaatatcaagttgttcaaaacacagaaaataatctacgattttcataatgccactaatatgatagacacttttcagaaaaataaaattaatgtagaaactgccttgtacaaaattattaaattacaaattgaccaaatggaatgacagtagaaataagatgaaatgagacaagcctggccaacrtggcaaaaccccatctytactgaaaacacaaaaattagccgggttggtggtgcacatttgtaatccaagctactcaggaggctgaggtgtgagaattgcttgaacctgggaggtggagrttgcrgtgagccaagattgagccactgtactccagcctggatgacagagagagctagactctgcctcaataaataaataaataataagtaaaatgaaactatgactgtgyatactgtcaatattatatgaaaacattatcaaacaggcctcaccaacartaagttctctctggacctatccctttgcttgacttactaattaggtctcagactctgtgaaattagccatgaactaagagaacattgataaattacacattattcctgtctgatagaaaagataactccaaagggtgcagttttattgcctcacaagtcataaagctgtctttaaaaacgtaacttagccaacctatttcagcctttatttcttgactgacggtataagcctccattccctgaattatcttttgataatcagctttataatcttgctgattccctcacttatgaaaaatagtaaatctttgacacatgctcactatatgtgtgtatgagagtcaagttttgaacttctgaaaaataaactttggcactacctaaagacaatgctgccaattcgcaaaccatgtgtggctgttttaaaatatgtccataaattcttggaaacttcatctttaagaaggtgatatggtttggctctgttcccacccaaatttcatcttgaattgtagcttctataattcccacgtgtcatggaaggaacccagtgrgaggtaattgaatcatgggggcaggtctttcttgtgctggtctcatgatagtgaataagtctcacaagatctgatggttttatacaggggaatttccccacacaagctctcctgcctgccactatgtaagacatgactttgctcttctttcatcatcttccaccatgattgtgaggcctccccagccatgtggaactctaagtcaattcaacctctttcctttataaattacacagtcttggttatgttgttattagcagcatgagaacagactgatatagtaaattgatactgggagtggggcgctatgttacatgatgaacatggcagcatcataaaaggcattgcaatttcctcctagctcttagatcactcacctggacaaagccagccactatgtgataaggacactcaagcagccctatggagaggcccacgtggtgagaaactattttttcctgccaacagtctgtgaatgcacaatcttagaagcagatcctctagccccagtcaagccttcagatgactgcaaccctggctgacatctttcctgtaacctaatgagacaccctgagccaaaccctccagccaagccagttttctcattcctgactctcagcctttgttaaataataattttttcttgttttaagctgctaactttgctgatactttgttacacaacaattggtaactaacacaccttgacatcactattggcatttcagcactttaacactttgcctgttacccagcaatttggaactgggtaaaaggcagaggttggaacagtttggagggctcagaagaagatrggaggatgtgggaaagtttgsaacttcctggagactcactgaatagctttgaccaaaatgctgatagtgatatggacaataaggtccaggctgaggtggtctcagatggagatgaggaacttgttgggaactgaagcaaaggtgactcttgttatgctttagcaaagagactggcagcattttgcccctgacctagaaatctgtggaactttgaacttgaaagagatgatttagggcatctggcaaaagaaatttctaagcagcaaagtattcaagaggtgatttgggtgctgataacattcagttttatgtattcacaaatatatggtttggaattggaacctacatttaaaagggaagcagagcataaaagtttggaaaacatgcagcatgaagatgagataagaaaaacctattttctraagagaaattcgagctggctgcagaaatttgcataaggaaagaggagccaaatgtttttcaccaagaaaatggggaaagtgtctccagggcatatcagaggtcttcacagaagcccctcccatcacagacctrgaggtccaggaggaaaaaatggtttcatgggccagacccagggcctggcagctttgtgtagtctcaggacttgggatgacttgcatcccagccactccagctttggctaaaragggcaaaggtacagcttgggtcatggctttagagrgtgtaaatcccaacccttggcagcttccatgtggtgttgagcctgtgggtgcacaaaagtgaagaactgaggtttgggagcctccgcctagatttcataggatgtttggaaatgtctaaatgtccaagcagaggtgtgctgcatgggcatagccctcatggagaacctctgctagggcagtgcagaagggaaatgtggggtgggagcccccacacaatgtccccactggggcattgtctagtggaactgtgagaagagggccactgtcctccagatcccagaatggtagatccaccaacagcttatgctgtgtgcctggaaaagccacagacagtgtcagcccatgaaagcagccaggaggagggttgtaccctgcaaagtcacaggagtggagctkccaaagactatgggaacccacctcttgcataagcatgacctggatgtgagacagagactcaaaggaggtaattttgaagcgttaagatttgactgccccrctggattttgaacttgcatggggcctgtagcccctttgttttggccaatttctcccatttggaatagctgtacttaccaaatgcctgtactcctattgtatttaggaagtaactaacttgcttttgattttacagctcataggcagaagagacttgccttgtctcagatgagactttggactgtggaattttgagttaatgctgaaatgcgttaagaccctgggggactgttgggaaggcatgattggttttgaaatgtgaggacatgtgatttgcgaggagccaggggtggaatgatatagtttggctgtgtccccacccaaagctcatcttgagytgttgctcccataattcccatatgtcatggaagggacccagtgggaggtaactgaatcatcagggcaggtctttcctgtgctattctcattctagtgaataagtctcatgagacctgatggttttataaaggggcattcccctacacaagctctcttccctcctgccatgtaagatgtgactttgctcttccttcatcttccatcatgattgtgatgccacctcagccatgtggaactgtgagtcaattcaatctctttcctttacamattactcagtctcaggtatgtctttattagcagtgtgagaacagactgatacagagaggaagtttaactgcccttctcttgagtatggactggacttagtgacttttttctaatgagtatgttacatggtgaacatggcagcatgtcacttctgagaccaggtcataaaaggcattgcagtttcctccttgctcttagaacactcacctggatgaagccagctgccatctaataaggatattcaagcacccctatatagaagcccacatggtgagaaactgtggtttcctgccaatggtctgagtgagcaatcttacaaacagatccttcrgtcccagtcaagccttcagatgactgaaaccttggctgacatctttcctacaacctaatcagacaccctgagccgaaccctccagccaagccagttttcttattcccgactctgtctttgttaaataatttttttgtttgttttaggtcgctaggtttgctgttacacagcaattagtaactaatacagtttgacatcactattgggaagtttctactcctgttgttttttcattttccactgtcttcggtgggtatgctctcttctcagcaaacatctcagttcttcatgggctttatatgccctggaaagtgtcacagcctgcagagaagcaatgttcccygtggtgacttatcctcacctttgtgagaatggcaataaccctggaggtagatgtggcctctgctcttgctgtagagatgacttagggcaggtgtattcacctatatgagwatgtaagcagagtttattatggtaagatagtaaattcctgttagggagataaatttagtaataattaaagtaactgatattcacttggtgcccactatgtccctagaattctatagcacttcccacaatgtgttccatgagactccaatagagagataatgagcagcaagtattcccggcggcttagggtggtgtgaaatcacgctgagawtcctgcttctcctcaggtcctggtagtttcagggcccctccctaggccttacttaaaaggctgaggcatccttggaagagcaggcagactccacggatcccaccaggagaaaggagcattctgaggtatgctctagggcactggtgggactggagctctctcctcatttcagacccagaatctcctgctctgtggaagctgttctcatgctgggggactcagtgtggctgcttgactggatgagacagaggatgtgaagagccaggttggcatctagyacaaacccacagacacgggttcctccccactctgtctttctcacytctccttcacttttcctaggtatgtaaagaagacattaagaacacggcaaaggccaaatttacattgacttaaatctaagactggttcatgaccaaaaatgcatgtagctagcatggctttcccaaygcagagagaaaaaggcatggactcagctccaacagactggcgtaatgagtgcagaatatgctgtgaggttttaaatttgctgacaagaaaggttaacgtttgttacacattcactctgtcaggtacagtgataaaagcaatatagctattatgttgcctcattcccacatcagtcctctaaggtaagtgctatgcttattcccatttaactgataagacaaaacgaaaattagagaggctaagtcacctaaggtcacaaaactagtaagagatggacctggtattggtactcttgcagcttgacttcatactaattcacacccattccccaatatgaaaaataagctgtgtaatgcttataaattcacacatttggaatagaaggcagagctcgaggctgggggaatgaaggagtctgcacaaaggaccaacaggctttctaagaagataatagaaaccagccaggtgcagtggctcgcacctgtaatcccagtaccttgggaggtagaggcgggcagaacacttgaggccaggagttcaagaccagcctggcaaacatgaagaaaccccrtctctactaaaaatacaaaaactagttgggcatagtggtgcacacctgtaatcccagctacttgggaggctgaggcacgagaatcacttgaatcccaggaggtgaaagttgcagtgacctgagatcatgtcactgcacttcatcctgggcaacagagcaagactctgtctcaaaaaaaaaaaaaaggagagagggagagaagataatagaaaccaacagagttggtgcagagacaaaggagtgccccatagcagagtgtggcacactttgggttggacggaatttatcactccctggagtgacttttggtagctgaggacatccgtgaaagtccttcctggagtaggagtgatggtgtgcatgcacagacacagcctccagggagccgtgagcagaaggggacctccagctgcatccaggactcyctctccaacccagccacatcagargggaagggtaccacttggctcatagcgctttcgagaaaccctggatgccagtgaagtcatggggaggctgtgggccaggatccacagggctgcagctgggtgctgagccagaggccagtggctttgttgcctgccctcagccccgtggcaccctctgcctgggaggctggggaagggccaggtgcacaggccgggatctgagagagcgcgtgggcagtccacagggcaggtgaggctctgagagagagtgtgggcagtccacagggcaggtgaggctcyggtgtgtgtcacacccacagtttctgctgactgagtcccatgaacagggccagagccaccggcaacttctgtaccccagatccacattcaggcgctttcctcgtctgtgcctcagaggcttccagagcctgcggactcgcctccgccggactgtgtagtttgaccattgctctccagcaggaaactggaaataaacccagggctaggcactggcygagctccattctccccggtcctgcgctggcccctccggcggggcctgccgctctcagtgtgccgggccaggatctaccggcagggggcgctctccaccaggctaggtcgggaggccacgatgagaggcacggcctccgattcaaggatcgggaggccacgctgagaggcacggcctccgattcaaggatcaggaggccaggctgagaggcacggcctccgattcaaggatcgggaggccacgctgagaggcacggcctccrattcaagctctcttcctctttttctgtctctttccacaaggatctgcagccctcacccgagtagcgagcatctaaagcaggactagacgaggcaagggagctgcaccagggctacccctgagaaagccccagctctcctyggctttctcagtgatgtgtggctttcgtgggctcctcaaaaacagaaactatctttttttattattattatctgtccctttttgctgtttttgataacttatttattcgatagatgtctgcacatttgcctcttttgatatatctttaaattgttattattaaatgtggtaagatatacataatataaaaattaccattttaaccatttttaagtgtacagttcagtggcattaaggacattcacattgttgggcaaccatcaccaccatccatctccagaactcttctcgttttgcagaacagaaattttgtacctacaaaacaataactcctcactcccctctccccagcggcccctggcaaccaccattttactttccatctctatgaatttgactgctttaggcgcctcatatacgtggaattacacggtatttttttttttttgttattagtttatttcacttaactgagtttactttcaagattcatccatgttgtagcatgtatcagaacttcattccttttaaggctgtrtsgtgtgtgtaccacattttctttattcgttcatctgtcgatggacacttgggttgccatcaccttttgggtattgtgaataatgctgctatgaacatgggtgttcaaatagcttttcaagtctctgctttcaattctttgtgaatatacccagaggtggaactcctggatcatatggataattctatgtttaagtttttgaggaacaaccataccgttttccacagtggttgcaccattttacattcccaccaacagtgcacaagggttccagtttctccacattcttttttttttttttagacggagtttcactcttgtcgcccaggctggagtgaagtggcgtgatctcagctcacttcaacctctgcctctcaggttcaagtgattctcctgcctcagcttcctgagtagctgggattacaggtgcacgccaccatgcctggctaacttttgtatttttagtagagacagggtttcaccatggtgaccaagctggtctcaaactcctgacctcaggtggtccgcccacctcggcctccgaaagtgctgggattacaggcataagccatcacgccccacccaattcctccacattctcatcaacacttgttattttctatttttttctaatagcaaccatcttaatgggtgtgaaatagcagtatatcattgtggttttgatttacgctttcctaattattagggatgttgagcaccctttcatgtgcttattggctattagtatatattatttggagaaatgtctactcaagtcatttgaccattttttaactgggctatttgcttttttgttgttgagttacaggagttctatatatattctagatgtcaaccccttatatgactttcacctatttcctcccattccctgagttaccttaacatactattaatagtgtcatttgaggtacagaagttttaaattttgatgtagtccaatgtatccattttttcttttgttgcttttgttgcctattttttggtgctatatgcaagaaatcattgccaaatccaatgtgataaagctttcccctatgttttcttctaagggctttaactttcatttaggtctttgattcattttgagttgatgtttttatgtggtataagataagggtctaatttcattcttttgcatgtgcaccatcaccacttgctccaccatcaccatcatcacccaccaacacaactgccatcatcagtatcattattgtgtgatgcttcctcttcatcatcattaagaagaacaatagctagcatattttaaattattaaacatttttaaaataaattcaattgctttcatagaaatgggattactcaggttacttacttcttctgtgggttttagtagtttggctttccaaatgttggtccattttatctaagatgttaaatttatgggcataaatttgtttgtagtatcctcttattacccttctaaagtatgtgtaatcagtagtgatgtccctcttctattcatgaaactggtaattagtctcctctcatttttcttgattttttaataatcagattttagcttcattaatattctctactgctttctgcaatcaattctattgatttttgctccgatcttataaatttctttcccactccttgctttgagcttgttttactcctttttctagtaccttcaggtggaatctcaaattattaatttgacrtctttcttcttttctaaacatttatgctatttttccaagcatgatttagttgtatcccacaaatttagctataattttgggggtgttttttgttttttgtttgaggcagagtctcactctgtcactcaggctggagagcagtggcgagatctcagtccactgcaatcttcgcctcccgggttcaagcaattctcctgcctcagccacctgagtagctgggattacaggtgcatgccaccatgcctggctaactgttgtattttttacaatttaatacaattacaattgtattttagtagagacagggtttcaccmtgttggccaggctgaactcttgatctcaagtgattcaagtgattagtatttgcatgatacatctttctccaccttcttacctttaaactgtctacagttttatatttcaagagggtttcttacagacgctatatatttagatcttgcatttttatccaatctgacgatctcagtcttttacctggcgtgtttttatcacttacatttaatttgagtattaatatggttggattaatatctaccatcttgctgttttctatgtgttccatctgttttatatttatttttcttcttctgtcttctcctgagttaacattttttattattccattttatctcttttattgacttattaattataccattatatatttatattggttagtccagggcttccaatacatattcttaattaaagtctacctttaatttttttataccactttaagtctaccacaaggaccttacaacaatatatttccaattctttctttctacactttgcattatcattgtcattatccacaaggctggggataaaaacatttcaaaggtcacaatacctgttcccactgtctggcctggaaaaccttatcattcccaaggcattggttacagtattcagaaggatcttgcttaagtaatggaaaataactagacctaaactaaatgcttctcaggttcaacytatcaaatcctaaaatcaagtcccaaatggatcaaattcttgccaagagccttaattacactacggaattaagctcaagaatattcatagtacaagttgagcctccctagtctcaaaattyaaaatctgaaatctttcaaaatccaaaactttttgagcaccaacatgacactcaaaagtcatgctcgtaagaaatgctaattgaagcatttctaattttgaatttttggatcagggatactcaacctgtaatacaaaagtacccaacacccttggcaaaatggctgaatttgggacgggcacagaaaatacacaagagcagcctaagcatgttgttgtaacaaaaagtaaggaaatacttaaaaaaatccacagtgattggtatgtcaaaggaacacaggagctaaataaaagtgcttccaatggccaaagctggaacaacttaagtagcaaaataaataaagtagcactggattataatttaaaacataaaacaaatatcagtgagcaccagctgactaaataaataaataagacagactaatctcccatgcaaaataattccaaattatttatttagctatccaactctcaagaaattacaacataaccttcaggctctaagtgtgggctacacatagtaacttctctgtaatgaatatagtatggaaatgggggtgaaagagtaactttacagtggagaaacctaatgaacactatctcagccaggtaatcaagattaacatcagcagtaataagttatgttgacagtatgtaccttagatatgatatataataaaaatagcattttatctctgtgatctccctcccccaaacccataaccctagtctaatcataagaaaaacatcagacaaatccgaatctatttactgtactcctcaaaaccgtcattaacaacaaacaaagcctatgaaatttttatagcaaagaggagtctaaggagacatggtgactaaaagtcttatctttgatggaatggtggaacaaaaaaaggatattagataaaaactgaagagggcaggcgcggtggctcacgcctgtaatcccaacactttgggggccgaggtgggcggatcacgaggtcaggagatcgagaccatmctggctaacatggtgaaacaccgtctctactaaaaatacaaaaaattagctgagcgtggtggcgggagtctgtagtcccagctactcaggaggttgaagcaggagaatggcatgaacccgggaggtggagcttgcagtaagccgagatggtgccactgcactccagcctgggtgacagagccagactccgtctcaaaaaaaaaaaaaaaaaaraaaaaacctgaagaaaccagaatataaactttatataataataatgtatcaatattggtgtattcattgtaacatgtatgcaaaacaaatgtaaaatgttaatacacaatctttgcactttttctgtaaatttgaaagctttccaaagtaagaatgcattattatgtattaaaaaagtacttagcagctaacacagtaaaattacagtgtctgacatccaaygcttacaagaaaggcaaagaaacaggaaattcagacacagtatgaggagaaaaattaatcaaagccaacccagaactgatacagatgttaaaatgaacaaatacacattaaaatgttatgtctaaattctgtatatttaataatttaagtagagacatgaaagagcttaaaacagactcaagtcaaactccaagatgtaaaaactgccatgtctggaatgaaatatacactacatgaaattagcatacagaagaaattattagtgaatttgaggacatcgaaatagaaatgttccaaaataaattatgaagtgaaaaataaaaataaaaggacatacgacacatacaagaacagagaatcagtgatatatgggactaattcaaggggcctaatatatggaatttttaaaggaaaagaggatggtgggaacaaagatttttttcaaatgttagccaaatattttctaaatttcatgaaaaccataaacacaggttcaagaagattgatgaccccgtgcacatgaaatatgaagaaaactacagcagcaaaatcataaacaaattgctcaaaaccagtgatactgagaaaatcttaaaagtagctggaggaaaaaggacacaatgcatacaaatacataaaaagaaggatgacggcagattttttgtcagaatcaatacaagtgagaaagcagtagagcaacatatttgaactactgaaaaaaacattgtcaattatgcttttgcggttataaccagcaaaaaatctttcaaaattaagatgaaataaatgtcttttcagacacacacagaaagaaaataatactgtatggaaataagaattttaatacagaaaataagctccagaaatgataactatatttatacatatgtgagatttttaacttaatatttaaatccctttaaaagataattatttaaaaaacaataacaaggtatcattaggattataacatatatataagtaaaacgaatgacaaaaataggatatggtttaggaggggagaaatgaaagtatattattttactatgggagactgtgacaaattaaagatggatactgtaattctaaatcaactactcaaacaacaaaataattagtaatcactagtaagttaacagaggagataaaattgaatcagaaaatgttcaagtaatccaaaaggactcaggaaaaaatggaacaaagaactgatgacaaatatagaaaacaaataacacgatggtagacttgaacctaaccacagcaatagcaacattaaatataaatagcctaaacactccaattaaaagattgtcagattgaattaaaaagcaaaactttactagatgctaccaacaagaagtgcactttaaaggtaaagacacaattatgctaaaaggaacatgatggaaaatgatayaccatgttaacaccaataaaaagcaagttggagtggctatattaatattagacaaagtgagcctgggcaacatagtgagaccttgtctttacaaaaaataaaaaaaatagctgaacatggtggcacatgcctgtagtcccagctactccagaagctgaggtggtaggatcacttgagctcaggagttcacagctacagtgaactaatgatcatgccactgtactccagcctgggcaacagagcartgtttctaaattcacacacacacacacacacacacacacacacacacacacacacacatatagatatagatatatcaaagtaaattgcagaataaagaatattgccaaggataagaagtttatttcacaatgattaacagtacactgacacactgaaaattttaaaatattgctaaaagaaagtttttgaaaggccyaaaaagccagaacgatatgccttcctcaagggtcagaggattcaatattattaaaaagtgaattttccccaacttgacctgtagatccaatacaatcccagtcaaaatcctagcaggcttttattaaagaaattgacatgctgattattacatgtggcattggcaaaaagatagacaaataggtcaatgaaaaaggatagagtccagaaatagacttacacatatatgaacaactgattttcaacaaacatacaaatacaaccagtgtggctgggtgcagtggctcacacctgtaattccagcactttgggagacctaggtgggcrgatcacctgaggtcaggagtccaagacaagcctggccaacatggtgaaaccccttctctactaaaaatacaaaagttagctgggtgtggtggtgcatgcctgtaatcccagctacttggaagatagagaattgcttgaacctggggagcggaggttgcagagagctgagatcgtgccatgcactccagcctgggcgacagagcaagactctgtcttaaaaacwacaacaacaaatacaatcagtggagaaaaaaataccatgttcaacaaatggtgacaaatcaatgagatattcatataatgacaacaaaaaggtgaattatgatccatttcttgcagcatatggaaaaataattcaaaattgatcataaatcaaaatggaaaacataatctacaatgcttcataattaaacatagaagaaaccyttttcattctattaagcaaagatttcttagatacagtgagaaattatggtaygtatgattttttaaattgctaaatttgactttattaaaaacaaaaatttctttttgaaagattctattcagagaatgaaaagagaagtcactgactgggaaaaatacttgtaatgtatatatctgagaaaggacttgtatccacagtatataaagaactctcaaaacttaataaaaaggaaacaaaaaagacaatttttaaaatgggcaaaaacttagaacagatatttgtatcaaataatatatacagatgaccaaaacaaaaagcctacaaaaagatgttcaatataattagtcattgggaaactgcaaataaaatagcaatgagctattagtattgcttacctattactattgctaaaattaaaaagactagctataccaagtcttggtgagaatattagagaaccagatctctcacataatagtgatgaaaatgtaaaatgaaaaaaaaaggtagtttctgttaaagttaacatataccaaccctatgatccagccattccacttctaggtattaatttaagagaaaagaaagcatatgtccatactaagacttgtacatcaatgttcatagtagctctatttgtaatagccaaaaagtggaagaaaccaaatttctattaaaaactgaatggaggacaattaaaaggaatgactattggaacaacttgaatggatctcaaggaaagtacactgagtgaaggaagccagacaaaatcaattatatactgggggatcccctttatataaaattacaaaacaaatgaaaacaaacctatagtgacagaaagcagatctgtagattcctggtgaataggacgggggatgggagggaaggacagaytccaggagacatgaagactctttgggggatggtgaatatgttcatgattttaattttgatgatggtttcacaaacatagacatatgtcaaaacttatcaaattgtatattttaaatatgcgccgtttattgtgtgctaattattcctcaataaagttaaatttttttcaaaccctgagtgcaggattaagggatatagctagcttaggcattctaggaatgacctattatgtgtccctgaatagtgagaagctcggaaaggcaagacgactcctgccctaatagaggttccattctggatacgacaacatagggtgacaggtgaatgaacaggtgcctcagatacagcccttaaaacacttcaggtgctgaaasccatggctggtgtcagaggcacctcctagtggttgtccttatgaggtgaagtcctgctctctttcccctgatgttccatatcagatgtcctttgtcactactgtcagctccctggaaaaagcctcccagcatccttgagggtaatgccaccccctttccaggcactgagacctcgtcaccatcatcccagaaagccagcccattttaaaaattagattgttaactcgggaggctgaggcaggaggatctcttgagcccaggagttcaaggctgccttgcactgtgattgcacctgtgaatagccactgcactccagcctaggcaacataggtgagaccctgtctctaaaaaaattagattgcttaactttttatttgtcaattataccagttctttatatatgttgaatatcagttgttgatcagatatatgtctgtgacttgctacttgtttccttaacagtgtcatttgatgagcctaataagtaagtttttattttaacaatgtctagtttaatctttatttctttcatggttatttctttctgagatctgcctaagaaacctttgctcaccctcaagtttaagaaatattagccttttttctctaaaagcgctaaggttttagctttcatgtttaggtctgtaattcacctcgattaaattttcagtattatgtgtgaggtagggtttgagattcatattttctcatggatatctaattgttctggcactgtttgtttaaaaggtatctctttctcccactggatcactttggcatataggctttctattcgatttgattgttttatttatcactcctcatgctgctagtaagacattgtcttgatttttgtcattttgtggtacagatagtgatttcttggatcatctttctccaagcttgtttggcattttctttcctttcttcttcctttttttttktktttgtggcaaagtcttgctctgtcacccagggctggagtgcagtggctcaatctcggctgactgcagtctcaacctcygcagactgaagtcatccttctgcctcagcctcccaagtagctgggaccacaggcgcaagccaccatgccccactaatctttgtgtttttttagagacagggtgttgctaagttgcccaagctggtcacaaactcctgagctcaagccatcctcccaccttggccttccaaagtgctggaattacaggcgtgagccactatgactggccagcttggcaatttcaaccaaaaaaaaagcctagtgctattatggtagagatgtcatggaatcyatagactgacatcttaaaaatattcagtcttttaattcataaacatggtatataccttcaattatttaggtattctttaatctctctcagtaacaytttgtagtttttggtgcacaggtcttttatatactttgttaaatttattcytaagtatttgaagtttttgatgctatgtaaatggatttgatttttgctttcattttctgatarcctgctgccaktatataaaaatacagttaacttttctataaaaaatagtgtatcctccagccttgcacttattagttctagtagttgttatgtggatttcttaggattttctatataaacaatcatattatttgaggagagttttacttattttctgatttytatttcttgtgtatttttagcagacttctcaaaatgactaggacttcmaatacgatgttgaacaaaagtggaaaaagcaaacattcttgacytgttatgaatcttagggaaaaaaatcaattctttcaccattaagtatgwgctgtagacttttttttcttgggcactattttaacatgttgaagttttcttctattcctagtttgctgggagtttatatcctaagtagatgttacctttggcctaataytttrtctattaaaagatttaggtggcatttctcctttattccattaatgtagttctgctttacaattcttgtctggacaatttcagcaktggtcttcattgatgatctttattcttgatgyggagtcacatctgttcccttattcttcaagaaagactattggattttctacactgtgcaacttcagcctgcccaccttaygaaactttcaaaaatgggaaattgacccatgcagatgattttccccgagtgactactccctccaggatctgcctgcatgccttgtcttatgcttattcaccgatgtcagcagtttcccaccccttygctatctgacccaggtcttatagctgtttttgtaaaagtcctgatccaatacaagccaactcagtgacacaaaaataaactcgtgcctttctgttttaagaaggtctcttttaatggagaattaaattcatttaaatggactgtggtttctgaaatatgtggatttattcctaccatgctttmattttttctttgctttttttcctgatacctctttttctgttcctgtttctccttccctttatggcttcaactggattgagtaaggtggttttgtttgtttttcctttgttcatcctcccctctagtttggaagttatatactctccattaatttaatacataatggctagtatatttatttctaggcctcttcagatgagaaatcagtgtgagcctaagactgtaatattgtaaactctattttatcagttctccttgacttaactaaacacaaagttaatcagtactttaagccagggaactgtgccacggtgagggtggttgcaggggtgggatagtggccacttcctggagtatttggtttttccctctttgggtgttccctgagttttgtgactgggacaccctggggatctttttgtcttataattgtcttagtgaggggtcaagcaagagcaggttccagtgctctgtgcctgtctcatccctcacagcagacaccgactatatccttgaactcccaagatgaccagagtgagtctcatatccaggggccaacctggactatgctgatatcccaatctagagagaggargctggatgcagaaatccaaggccaacctacttttccttccttctcatcccttaaacttaaaggacagaacccacgacgacttgccttcactctggtgagaaagggacatgggaaaacatggttaatccagtctgaaactgacagtctcccactgagtcactcactgtagaacccatcacctraaacaagcatagatggagatcaggcattgagaggacagcctctctccaggatgtctctgaattaatgattggctctgcagctcaatcttttatcctcatctctgtctctttgtctccctctcctaccactagtccttgaagccatgaagtttacatcttctctcagctctctgggattataccttccaaaagtaactaaccccacagcctgccatctgagcttcaggcttgaagtcattactattctgtatctgcccctacattaaccaacctcctcagtgtgtggccaaattggactgagacttggggatgtcacccagaaccgcacatctcactctgcacaaactaccacagtggagcaaccagcagtcacagctgcgcttgagatctcccaccaggaaatacttacttttcgaaactggaccttctaaagaggaagcatgaaggagagatttgctgaaagcaaatgggaaaaacctagaaccatttcagacttcctagtatgaaggctcatctatcttcacagaaatagaagtggcacaggatgaagtctggtccagaatgaccatactagacactgggcagatgtctgagcccrgtcagcagtgaggagcactctggaactgggagtgaggatctggtccaggggtcctgttctcagaaggcctctctttcaacaacttgtagcaagaagaaaagcatcatccctgtctggaaagtgaaaagcccagatcccaaactacctcctggcccaaattatcagtacaatctgttctctggaaatatctcagtcccacttaaggttttgtaaattccagggaaggaccttgaagctataatttaacctaaggaggagcagtactaccagacttcaaatgtcagcgtcaaatgctcgtcaaaaactcctgttattcagatctgccctaattgtgaagcataaattaaactaaagaaagacacacaaattatctatgcaaatttagtagtatcagccacccacttctttaattaatctgacctaatttcaaatcaacacgtaaaatgtagtatataatttgatgagaatttacctctacagcatagaatctgatggttattaaggccaattgcctaaaaagtacttacatgtgtacaaaatgacagaaaatattaaaggacaatcataaggatatagaaaactcctctatcattcatattatggtataaagactgtacaaaatcagaaagtatagaccatttggatttttttttttttttgagatagagttttgctcttgttgcccaggytggagtgcagtggcgtgatytcagctcaccgcaacctccgcctcctgggttcaagcaatactcctgcttcagcctcccgagtagctgggactacaagcatgtgccaccacgcctggctaattttgtatttttaatagagatggggtttctccatgttggtcaggctggtctcaaactcccaacctcaggtgatccgcctgtcttggcctcccaaagttctgggattacaggtgtgagccaccacacccagcctcaattggattttctaaatgagctggctcttctaaaaaagccacaaagttgtactctctattctgttccagagaatccacaaaggagtatcattgaactccaagtaacaggaaagtgactttatgctgggaacatccctggggcctgtgacacggaaggacatggataggtggacacacagcctcrtggacgttgagagccataggtacctccaactgtggtcgctgatccacacagatgctcacgctcatcatgggaaggtacagagggagcggccacctggttcttaagcacttctgagcgcacctaagagtcaaaggagaaattcagagccaaggttccctcaactccatagtttcgactggatcttagcacttgtgctaccacagttactgtgactctattacattccccagactggagaatcggagcagcgcaaattccctgcaggcaggatgcaggcaagataggcaggctacacagggcagtgccgtcctagattttgtctggcycagatgcagtcccttctgactggctgaatcaccaaggctgggcctccgacatcatccacctaccttcacaccaggaaaggaatatctgggctctcagcttaaagaatcaggataaggcgctctgggcaggatcaaatgcttatttattctatgcctcacaggcttctgaaggcctgagtttggcctatccaggaattaagctattttagcacccacagaaatgtgttcttcctgggggcaggaagaggaaattcctgctcattactgactttgtcaccagaaggacagagactgaggcagaatctccaacctgggaatgaaaactgagcttcatatcaagggttggatgccctcagctgcattcatcagatatttggtttttctctctgagcaaaaagagaaaagatgccatgrggtgtgtctgaataagccctcctaagtttcctatatttatctccttaaaggagactcagcacccacttcatgaaaaaaaaaaaaaaagcaaggtgttttcagataaataaaatgagggcatggaacgtgactaattagttttaatctttttttttataacaacacatgtatattgctttaaaaataatatagaatcaggcctggtacgctggctcacgcctgaattccagcactttgggaggcagaggcaggcagatcatttgaggtcaggaattcaagaccaggctggccaacatggcaaaactcatctctacaaaaaaaatacaaaaattagccaggtgtggtggtgcatgcctgtaactccagctacttgggaggctgaggcaggagaatttcttgaacccgggtggggcggaggtttcagtgagccaagatcgcgccactgcattccagcctgggcgacagagcaaaagaaaagaaaaaaacaaaagaatcgaaaagtgcaaaattaccaacaacagagccctgaccatttcttccccaccaaatcctactctcctgaggcaaccacttcccttcttttatctcaatcctctgatcagtcaggaaaggcattgtctatgtcagagacacagcttcatcctgggaatcttcacacctcctccctgggtgaagccattattccatgactcttgggattgccttcttcttaatctatttctgtttctaactcatttatttatctcacccatttatttaccatcaagtcatctaggtataaacatcaaaatatttttgttttttccttttcttcttctttaatttctactttcgatgttgctatattcacttgctttttttctcactggatatcaggtcctctaacaacatccctgccaaacttcacaactttcttgttgctattattattttttttttcagaagagcttctcaagatggtgggcataggcgaatggatcatgtacccctaccagtgctgagatgttaggggccaagaaaaagcacaggaaaggcagagttcttgcagcactggctttgggtttgcagagggaggggttcccacagtttctggtacagtctgatttcattttatttcagtacaccgtgtgtgtagtttcttggacagggtgactgaccatcagtgtcaccctgtctgtcttcatcattaagcactctcaggacctgaatagatcccagattcaaattcttttcatggttggacatcctatcacttgacccattgatcccttggggaaaatctcatggttccaacccttctgccaaccactggcttctttgcatggagtcatgagagccttcagtcttccacactttaaatgtctaaaagttctgagttggggtgggagtttctgccaagttcttccaaggaatgtgaccccatagtttctttaggctctgctggtgctgggaaggttagagccttgtctgtatctctagagtacaccacacttcagtaaaatcacatcagggtctccctgaactccctcaccacacactgccctggccaaggagccaaggtsagcctgtgggtctctaggtgtgccagtcatccagatgrgggcaaagctgccagtcccactgactgtttgagtgattctcttgggaggctccatcctggcgataggagagcatcccctggcccttctccatgaggaggtcaagaactcacctctcaccacaagtgatgcctttcctacaaagcatcccactccccttttctcttccctgtcttcctcttattcatgagatactacatacatttatttgtttatcaaaaaatatttgttagttcccataagaggtccrcaccattcctgccactgagcacatagttctctggcctcaagacaaaacaggttccctggccccacagaactggcattttggtagtggagataataaataaataaatwgatggataaatacrttttccaaaaccatggaagcatacattttatgaagaaaatagttgagcaaaataaggggctaggacatgggtgagggactcttggagataggctggctggggaataccttattgagaagttggcttttttgcatatgcatggaagaagcgagggagtggaccacttgttgacctggggaaggctgttccttcagaggaacaggaaaaactccctgcaggcgaagataagcttgcagggcaagaaaatcagcagaatccagtacatccagagcagggaagtcagatgggcagggatagaaggcagcagaaagataaagaggacccagatcatgtgggcttggtgagggctttggttatttggggcataaagcaaagctattagagggttctgtgcaagagagtcatacgactttatttacatctttgattctggtcactgctaggtggacatctgactctagggaggtaagaacagaagcaaggagactattgcaatgctccagaagatagagtcaatggtggatttccaagagcagaaccacaaagagtgattgggagtaggactgascaataatattcggtttcaagagtaatgattttctttcatagccaacattgaagccgcgtctgactcctaattcagagttagaaagccacaagacctccaagttctctcctctcctctcctggacacattatagatttttcagtatcctcaactgaatgcaagactgtgttccggctagtgcagtatgcaggagactatgacccaggggaggcatgtcacataatcattaagaatagagagacttggcttctaacttggctagatttcttagtagctgtatgactttggrtacattctgtcatccctcagagccgctgttttcttacatgagaaataaaattaatggcccctaaagagttgtgtgtgggacgggygcagtggctcacgcctgtaatcctagtactttgggaggccgaggcgggtggactgcctgagctcaggagtttgagaccagcctgggcaacacagtgaaaccccttctctactgaaatataaaatacaaaaaactagcccagtgtggcagtgggtgcctgtagttccagctactcgggaggctgaggcaggagaatcacttgaacctgagaggcggaagttkccatgagccgagatcgtgccactgcactccagcttggcgacagagcgagagcgagactccatctccaaaaaaaaagtaaatgtagcgtgaagattaaaaggttactcaggtaaagctcttacaactttagcagaaacagaataagctctcaatatttgtaccatataaatgtgacatggtgggtgtgtaaaactcctgcaaggagtactgtgattggcctaacatcagatgcaaacacagcaatggcttcatgcagtttagtgggtcaagagagccacacctctgcctccaagggagacacacctctgcctccaaggaagaccagtaaaggcaytctcctcaactcagcatctggcctaatccgcatttcctcattgctgttttctgatgttgcctctgctcttgttaatcaggaagcacagaccagtcatgcttgtgttgctccactgtcagtcctccagagcctcaagagatctttgggccatatcagctttctttccaaaatgaacacacccaggggcaggaaagaatgctctttccttggtcattaaggggcctgggagtcctggaccagcttttcatgcagctagaccacttacatgcaactagagccttgactttgaaacsarggacaaaagcatctcttgctaaaggtaacttctgctgcttagaacccaggtatggggaacttctttcatgtctctgtgtttagcctcgaagtgcctctgggagtcttgtcaaaggtacagagtactgaaggatccagggctgcttacaagggtgcaggttggtgatctgcttatccactgtgtagggacaactattgaatcacacatcaaggatcctgagagaaggagggttgtgaacaactggttctcattgtggagtgtctgtgatattcttggggactgttctggtgccctaactagaaaaccagaggcagatgatccctaatagtcaaagcaccttgtggggccctcagtggccatgtgcatgatccttacagatgtctctttggatgaggaatggaagaagatgggctcagtgaggcaggttagctacaaattacttaggagtgttcagcttcaagtcaggaaaagtggtgattaacctgctgtgtggagggctaaaatggagatacacacacacacacacacacacacacacacacacacagacacacacacgcactctgtctctccctccttcctctcaacccagagactcagagtactagaaggtgccygtggtgatgtgttggaacctcctaacaatcccagatgtgattaatggaaagcataccaagaccatcacagcctagagaagcaggactgtgccagccacagcagagatgggagcttccttttagggttttctggccttgaaatgtcctgtacccatccttattctcaaatatgcatctaggagaggctctcagggcagctctctctaaagaatttttacagtaaaattttagggggagaggagaaaaaagcataacatgtttcttctctccttctctcacatggccaactgttaacagcctcctcaccaccatctgatctatcttrttctcttcacaaaaggctctgaagacatcatgaacccacaacgtaagtggtgaattgcaaatcagcttggaaatatctccatctgacctcatcaaagacaataggatggaaggacccctatcatttgctaagctataaatgtatttkctcttgctaaaacactcagttcctaaaacggcctttgaaaatctcggggcacctagctcttttattattatctgtatttagaattgcttgtttattttgatgagaggattttaaaaaacaacatatrgataactaatttaaatattatggrkttttttttaccacctagacattttatcattcggaaaaagacaagtcactaatagccctagaaaaaggtgaatcttgggactgtgactgcacgtagatcctttcaaatgctttgattcacaaactagtccctgccctatttcccctccatttatcgttatagccactacttctcagagcaatgagwctctctccagaaactcaaaagccattaataccaggatgcaactggagtcctgaagttgataacctcacgtgtattttgtgcatttttgtcatctggcaggggaggcagcacccaaatcctatgctattcgtgattctcgacagatggtgtgggtcctgagtggaaattctttaatagcagctcctcttagccgcagcattaagcctggtgagtgacaatcaaacccactgttgcttcttgasgtgatgccatcttcaccaggaatgaggctgagcttgcataagcctggccctggacctcacccacttctaggcaccagcccaacagccacaggaaggtcaagtgagaaaggacactatgattcccttccacaaaggaaatcccatatctagaaatgagggtgtgaagggttgacagctcctcttaccaaaagaaaatatcttcagattagaagggcttatccattcaaacaacagctaaccttctccttggagtttctctccttcaggttccaaccattgctacctgtgtcctcagattcaaactccgtcatctttccaccaccaaacctacacagctttctaagttggcatcctcttttctaataatggggaaatattcctttctcccatcaaaagtcagtccatctcagcttctttccctgtatccagaacttcaatgtttaattcctcgcttccctgcaaattccacctttgtttactggaccctttctatcattgtcagacatgctgcaaccttctcttgattcccacattttcctcctactaacacattttcttgtgccaatcatagcaaaacttcacgagagctggctgcataatttgcagtctaacatctggattactcttcctactcccccccaaccttctatttcacccatgaccttcaaatactcaaacccaaaggacacttcttggtccccatgctatttggcccttagctcactagtgtaatggaccatttccttcttgaatactctacatcttctcccttttttttttttaaacggagtctcactctgtcacccaggctggagtgcaatggcacgatctcagctctctgtaacctccacctcccaggtttcaagcaattctcctgcctcagactcctgagtagctgggattacaggtgcccaccactgtgcctagctaatttttgtatttttaatagagatggggtttcaccacattggtcaggctggtctcgaacccctgacctcgtgatccgcccacctcagcctcccaaagtgctgggattacaggcgtgagccaccgcacctggcccatcttctccttctattagaatattacttctcatgaggtttgctggctcctcttttgcattttcttttatgactctcctttgtctctgaaatctccaaatgatggcgttcctcagggctcagccagtcatcatttacaagccctgtgaatgggtaatgagctgatcttttgsattgatgaatcacccctacactcattcactctgccgtttacacttccaacacagatctcctctctcaatagtttacccgtgtcctcttgaggtcctctcagatacctctaacttcatgtatcccaagtgggactattgatctgtcttctcaaaaccgctaacattctctgttggtggcacttctgtccactccatttcctcgagccggaaatacaggagacatccttgattcctcctttccctcactctccatccaatctattagcaaagattggtaggtctacgtgcaaaacatgcctgatttctaagataacatcatctcttgcctggaccactgccatcacattctcactacccacctctcactttatttgggtagcccccatcccatctcatattgtggcccatgagatagaagctccccacttttatctcatgggccacatcttaagcatatgaccacattttgctgcaagtgtggtaggaaattttacttctttttgggaagcaacatgtcctggtsacaactggggttctgttattaaggacgaaaaacaaaataggtttgaggagggtgatggagggtctctgccacatggctaatgggaggagcctgtcactattccctacctggggggagtaactgagtgtcagaccagaaagactgaaacatcttctccattttcctttgtgtttccagtcactcttcatttaatagcctgtagagacacagaattcagtgacaaggaaaagggtaatatggtttacctgggaatcaagggaaaagatctctgtctcttctgtgcagaaattcagggcaagcctactttgcagcttaaggtgagtgattgygcagctaacgagagaagtactgtcatatggactttctatttcatttactatgttactgaataaaaataatatgcttgcaaccctggactattcaatgtaaggaaataattctgacctggctgatccctgaatctataaatgctgcctttggaatggatataacacttcttttaatgtcagagcatagatcctctgaaagatagaaaatacacttacaggaatgtttcagaaaagccaaagaacagtattttctccattctcggtcctgtttaactgcattctggaaatcctctaagacaacgggatgctctcactacaccaaaggtgactgcacagcagaggagacaaaaagattttgaatgtggttatggtctgtgtaccataaacacataactcttaccaaggcaacattgtagttatgaagctaattcttctgctattgttggaaattgtaatgcataagcccacttggaggttgagaatgcagcaagactggcctgaacctgcagacaaatgcatatcaaaagcaccaagaaagagatttcaacctccctctgttccagggaagacagtgatgcttcaaagagtcagagcaccttgtgtcagaggatcctggggtggagccaggctatgggaacccagtgagttcccgtttttaacastctaatgccctgcttcatctgcctttgtccctagcctctgtcccttcctttgggggcagcagtccctctcctgttacacactcagagctgagttactttagcttcctcctcctaycctcctctctaacaagcctcttttccacccccaggaaaaaaatatcatggacctgtatgtggagaagaaagcacagaagccctttctctttttccacaataaagaaggctccacttctgtctttcagtcagtctcttaccctggctggttcatagccacctccaccacatcaggacagcccatctttctcaccaaggagagaggcataactaataacactaacttctacttagattctgtggaataaatccagcctaggctgtgggtggctggttccaggatagagaatcaagctgtcagagtcatcttaacagatcattatgcgactgagttcactagcagttcagcccatccatagcttacctcattcttactatccaaaagccacctcctcctccaaacatccatttctgtaccaagaccctcactcgaatgtcactatcccaagatgaaacctaaaaatyactttccattctttcttgatcttaccccaccatccactcagctgccatgcccagtttagtyaaccccccaaatgctgcttcatgcaaccttccattcctattccttttgccaacccatgatgtagagatgtggattcatgacattttgttcatacaacttcttcaataaaacattataatatgtgccccaaagataaagctgaagaatgagatgaatgtgaaattaaaggtttgcatgtcttyctaatcctaatgaattcttaatgtcattcgttaataatttgacacacagtgtatacacttaacccttgaacaacacgattttgaactgcacaggtccacttaaacactgatttttttcaataaaagttacaccaaatgtccctgcttctcctgcctccccctctaactcctccacctcttctgcctctccacccctgagacagcaaaaacaatccctcctctttcttctcctcagtcaatgtgaagataatgaggatagattgttatgatgatccactcccacttaatgaataataaatatgttttctcttccttacgagtttcttaatagtattttctttcctctagcctacttcattgtaagaatacattatataatacatataacatacaaaatgtgttaaatgactgtttatgttattggcaaggcttctggtcaacagcaggttattagttaagtttttctgaagtcaacagttatacatgaatttttgactgtactgctacccccatgctgttcaagggtcaactgtactttggttaagatcaattgctaaccatggtgaatgtaaaccaatccatattttaaaaaatcatttatattggctttaatttctttcagacaacttctagaactgaatgtttttttgtttttactttataaagttgctggaagaagaagcatcagctatgatacttccttgttattattcatattttctggaattttgttagtgtacattcaatctaccactcctctatagggatacttttaagccagttgtccattttgtgagagttattttaattaaagtttgtaatataatctgcaaatccactaaccaagtacatgtatactgcaataaatataccataatatcctgagcatgaacatgagcataacaggctgtcttctctcaagagaacttgtccttctttgcacatgacaagcaggcatattgggtcttgcaatgggtacccactgctaagttccaatttctcagccaggcataatttgtccccaaaactatgcttctggcattatctcttattgcttcagtgccccgcattctctttgggatactcctgaaccccaccttacatgctgtawgcaggccttttactccagtcattgccgtgcaaccaactttgagacagtgtaacctggcagtgtattatctcagcaacattgaacatttctctcttccagcttcagggctcccaagataacatagggaaggacacttgctggaaactagttggaattcacacatgcataaacctggatgtgagagagagctgcttcatgggaacccttgaccaatggggaataggagtgggtgaggagsaaattctyttatccatcccacaggtggacaattctgagatgcgttcattcttcatggttcctcagaggatcccagcagtattgagacataatcacccatgrcaggtctaagttcaagaatacatcctgaattgacttctctcacttccctgtttcaatttccccagtcccttctcatgttccctagggtcacttgtcatcatcttgcatgcaaacccttgtctcagtctctgctttctggtataaacctagctaagacagattctatcaaaaccaacttcttttctcaactagccacctccaacacgttggatttcttccctctatgttcctgctcatgcctttgcacacatctcaaacacttccattgctgcctatgtcttactaacatcctaaatcccttccagctgttttacgggactctcctcatcttcccaaccgwaggcaacatcttatcttctgcgaggtccatagcatttttgccttctcatggaacatttattttcttaggctttgtgctatagcttcttctccttgtcttggcccatttgctctcttctcgtcaaccaaattctaggtacatagaggcagaaatttgtctctttcatttatgcactccctttagataccaaatcttccctccctcttagcagtttctcagaatgcactgttgaagcaaattaattttcatttcatgtattagcatcttcccattaataccaaagtgtgtcagggagaatcttgcattatatcagggcagtcctcaacttcaagaagggtccaaggaactggaaagcttctcacagaatatggagaggaaaaacatagaaaggctgctcagaaatttccctgtctcaattcttcctcctcttccccttatgccaatatggctccaggggaatgtgatgatacaagggcatccactcgggaggagatggctgcagaaatgaaacataaccaagggtatccccaggagcttttagccagtatcctctgcctccctcttggagggctcggtgcacagtctgagggtttgcattttgtccaagcctttccccacatgtatttatgcatatgcacaacagcataggggcacaagagaaggagcccagggaaattcaccattgcaaatattttctctgacaaggtcatgactaagcacaaatggcctcaaggatggccatgagagacttgcaacaatgtacttggatacgtagtacataggttttctgagaagggctgcaaagaatgtgagttctgtaaatagctaaatgtgcagraagaatctataggaagatggtgatgaaaaatgcaatgtaatcctggacagtgcttataaatatcagcttcccagctattccaagggcactgaacatgagcaagagatagacagccagcccatcttacatcacaccacctgtgccctctgccagaggagtgaggacattgtgatggtgaaggaggaagaagaggaggagaaaccacagaaagactcaagaggtgtcctcaaatattttatttgctctcctggatcgagagctgtgatgttctttgcttaaatctaagaaccacaggagaaggcacgggatgacagatttctgttcaatcagtaycagaaggcacttcccaaacaatgtgggtttcctaagccttgcaaggaggtaggctaattccttgtctatctgtagtatggaaaaaataaggccaacataaacacacacacacgaaatagaatatcgataaatggagaaagagcacagtgttattccccctgttccagtctctgaagcactagttcctatgaccttttttttccagcctatgagatactctaatattcacggaggtgttgatgcttttgttgctttcttaagcaagagtcacggtcctcaggcccaggactattgaatggtgggtttttcacagggtggtagagagggagtttacccgtgtgacactcaaagatagtttgtcccctgaatctcttctattcagaaacctaaatgaatgcacgtccatttcagagatccctacatgcttccacccatctttctcttcaatttccatcagcatgcatatctgccctgtccttccctccacttcagtttcctttattcttcagaagagaaaatgtaaaaagctctataagcttgcaactgagaatctttgtctctcacttaggtcaataagtttattttaacgttgttgatgatctaatgtgaattaggggcaagaaaacaacacgggttatcaacaagaaaggaggggagataaatatgcagttaaagaactgatcagttaactaccttactagtttgagtcacttacaagtagaasatttctgattataaaaagaatacttcaaagtcaactctaggccgtatggttgggaagtaacaccagaaataagtgaataaactacatggaaacccataatgtcattcccttaatggttgtctccttaactaaggatgcaattaaaaatgagacagagactagcaaagactgtgcagctgacagagtgccacctcccaatatctaatagcaaccatcaaaagatcaaaaaccatacactgatgttctctattgctcgtrcagtttagcaggttaaattttgcagattacagctctagttcactaaaatcagttttatctatgcctataatagcagtgtggccataataaaagccacatctaactgaccaaggccaaagccactagcaatgtcttctccaaactcaycatgtagtttgaaccccaaacaacaaagcttgtttttatctcaaaggaagtgtcaggatcaataatctgaattattcaacaaatatgttttgagcacctatgctgttctaagtgctggggacatagtagtaaacaaaaaggggaaaatatggccatccttatggaactgacattaaatgttgaaggttggtaggtaacagtccctccttccaatcgccatccacgttcaaacatttagaaactatgttgatgccaaaatcaaaatcatagcagtgcctttattattgttacagctggattagggaagtgaggggtgcctcttagtcttctggggcctcaatctagacttttggggcaaaaaccatgcccaccaactctaatttcattttctccagtcactgtaataatccatcactcttcagcagaatcaagtgagtaaggctgagaggaaggcaaactccaatctcctccaggagcctccgtgtagaatctgcccttttagcccctattcaattggtggtttagcaaatgtccacatcttgctaagcctaggagatacttctcctttcctgcaggtagaaagaagtggaagagttcctttcaacatcaccatctcaggaagaaggacaaagatttctcatccatgcggaccaacataggaatgccaggaaggatgtagaaataaggggaggaagattcccatctctacaatctttgagtgggtttgctatcaatgaaatgctacaaatggaataagttgcagaaatttttctcttttcttgggttctggagagtttgtaaaacaaggacactatgtatttttaaagagttggtaaatcttacctgtaaagctagagaaggtyggagtctttttaggagtagatttggactacataacctgtaaatgtgttttgtccagtccttagagtgttttttaaaaaattgtaaagtcraggttttcatgaaaaatgggaagatcagacaacattgctcctgaattcccacagagcagcaagctactagagctcaatctgttatttcttttcctgatgtayaggggttaagtcctatggaagaaacagcagaattattcaaaattatttacataatgtgcaattattcactagagcatgaggagtgaaacgctctgtttagtatgtataacttaaaaggaacacatacaattaaaagtaattgaaagacatttcttcttaaaaattctataatcttacactggtaaaataaactagtttttcccatgtaatcaagtctatatgatattatttttatagtatattatttttcttcatccatttgcctttaactcccatgtgggctgctctttatctaccataggcagaaccatatatttccattcctatgtaataggatcccartgagtctttttctcccaaaagatgcagcaacaaaaagttagggattatagccatggaaaagacagtcagttgtttcttacaatggaatagtaatagtctaggcctcctactgtaggcaccgagtagccaccctgggtatccactctttcatccactgatttgctcagaacaacacctagctattgtatcagaaaattttcaagcatacagaacataacggggaccacagcatttgagaaacacagcctctgctaaagctactttcttcacatgctgtttacacttttcacttttaaaaacgttaatttttcagttattaatacatcracacattcatcttgaaataaagttaaaatataccagataaatccaaattctttccccccagatcctagttcctctttctccaccccaatggtaaccactgttatgaattggtgtcactctggctatttcttatgcatttacgtactcataggctctattggaagcatacaatgttgtcttatgtgtacccctgtgcatctgtatgtatgtgtccatgtgmgtgcatgtttctctaactggaataataaaatacatatttttctccaactcacttttctttttttttcgagacagagtctcactctgtcacccaggctggagcgcagtggtgcaatctcagcttacttcaacctccgcctcccaggttcaagcgattctcctgcctcagcctcccaagtagctgggattacaggcgtagggcgccaccatgcccagctaatttttatatttctactagagacagggtttcaccatgttggccgggctggtcttgaactcctgacctcaagtgatccacctgcctcagcttcccaaagtgctgggattacaggtgtgagctactaygcccagcccaactcattttttcactgaaaaatgtgttcaaatatctgtctacactggcatggatggctgtctcattcctttacaactgctgcagagcacccaacagaatggttttaccatcctttgtttagccattccttcatggatggagagttaggctgtttccacattttgctactttttttttttttttttacaaacaatgtggcaatgaacattctagtgtatgccttctgtgcagacatgcaagactttctttggaatagataagtgatcttagacaagatagctgaaaaaaatagataaatgaattgcttgaccatggagtaagtccattctttatttcaatagataatatctgcccttggatgtggcttttctaatttacacttccaatggtgttttcattcttccctgccctacatttttaytttttaaaaatttaaaaagtattgttgtcctagcatataaagcaggggtttccaacccctaggccatggtccgaaatttttttaaaatttacacttccaatggtgttttcattcttccctgccctacatttttactttttaaaaatttaaaaagttttattattctagcacataaagcaggggtttccaacccctaggccatggtccatggaccgttaccagtccttacctgttaggaaccgggctgcacagcagaaggtgagtggcaggcgagcgagcagtactgcctgagttctgcctcctttcggatcagtgggaggtattagatgctcataggtgcgtgaaccctattgtgaagtgcgtgtgcaagggatttatgtgtgcgctccttatgagaatctaatgcatgatgatcttctaagaacacccacatccccagtccatggaaaaaatgtcctccatgaaaccagtccctggcgccacaaaacttagggaccactgatataatctctcactgttattttcatttgcacatgcctgattactgattagtccttcagtactctgcactctccagtctgacctctgacatctgacttctccaccaaaacctttcttctgagcaccatcaatgacacccctgcctgtttcctgatgccaatgggcactctgctgtcctaatctcaatcagcgctaggcacactccactgctcccacacatctttacatgcacatactagggattctgcaacaagtctctctgggctttcctcagactcactgaaattttctttttactttcrtttactggctccccstcatgtgacttcttgtagttgaaattcctcagaactcatccttgaatcctcttctcctttatactatttcactgggtgacactatttgtttcatgaacgggtgtatgtggacgtattagttggttctcatgctgctaataaagacatacccaaggctgggtaatttataaaggaaagaggtttaatggactcacagttcakcatggctggggaggcctcacaatcatggcagaaggcaaaggaagagcaaaggcacaccttacatggcaacaggcaagagagcttgtgcaggggaactcccatttataaaaccatcggctctcgtgagacttattcatactgtaagaacacatgggggaaattgtccccatgattcaattatctccaccaggtcctgcccttgacatttgggtattattacaattcaaggtgagatttggatggaaacacagccaagccgtatcagttgacaattttatccctggcccagaagtctcctctaaactccagatatgcatttgtagctaccaatgtagactgtctctgaacttggaaattgaatatgtcctaagtagaacgcttgatccttccacaacctgcacattccaacactcagttatctccgtctcagttacaacagaaacctaggagtgatccttgatttttcctttcgctgaagtcctacatccaacctattaaaaargctgtctctaaagcagaytwtctccaaaatatgtcttgaatctacccgtctctcttcaacttccttgtcacccaccactgaatgccagacaaccaccaaggctcatctgaatgtggatccacctcctgcccmttgcccttcgtctactcctgcacccattaaattcattctccatgagacagccaggattatctctaccaatggaaatcttaaccgtgccagtccaatctctagaccccttcaacgtttccatttgcacttggaagaaaatgcaaagtccttaccatcatttacaggcttgcttgaatcatctggcctgcctccaacccctcttccagataactctttctttccatcagtatcttcagttattccaatctttcagctctttgaacatgccaagttcttcacagccccaggacctttgcatatgctaagttcatgtacagccttttacctgtattagtttattctcatattttccttttttagctccttcaagtcaccttcctatatgtgactttttggccaccatgtctaaagtaatctccttcctctacctcttacgtcagcttttgactgtttccttcacagggtttgtaatcactttattgatttgcctctatctttctttccttcccccattaccttataaactctttgattgcagggaagtgatatttttctagtttaccattgtatttccagcccctaacactgtgtctgtgtttaataatttttgttgaattattaataaatcaataactgaataaatggataaatgaggaactgacttccttcccaggcagtccaccttttttaacaagactagtctcactcagaataaaatctgtcttcctgttcctcagccttgatgtcgcagagaatgaagggactcccaggtccacccaagtccttcagtttgtgagtgcagctgtcayggcccgctttagcctcccctttccctttgacataactctccaaaggaagaacagttctttcctcctcatgattccttctattaaacacttggctttcttcctgccttcattcacctcagccaagtgaaaagaaacccatacatcctgctgcacacctattatcctgctgtcattastgataccaccccttcccctcttaaaaatgacaccttatatataaattatgtggtcatactacatatgagaaactaagagtgtgtggactaactgctgtctatctactttccattgaaaaccaatagaattgaagaaagctttcattttgctctgttccatcatgattcactcttcttctcctccttctccctccttctccctcctcctcctcctccagctcctttttcttcttctyctcctccttctccttcttcttcttttcttctcttttctttctttctctctttctttctttctttctttttctccttcttcytcytcttcttcttcttcttcttcttcttcttcttcttcttcttcttcttcttcctctccttcttcttcttcatgtgtggtccaactgctgtctacctactttccactgaaagcaaatagaattgaagaaagctttcatttttctctgttcgattatgattcacccttctccttctccttctccttcttcttctccaagagacagagtcctgctgtgttacccaggctggtctcaaactcctgaactcaagcaatcttcccacctcagcctcccaagtgctgagagtccaggtgcaacccaccgtgcccagccatgatttgtacttttatgagagccatcttccctgtggttctgactgtgacatgtgtgactgcaattctcattgtctcattctgtgctttactcatttgcagaaataatccacaatcaatatcagctttatcaataataaatgtatcaataaacaaaaaaaagtctttgtcttacttctcaattggttcataactcaagtgggaaagagggattacctctattacccctcccctcaagcactaacaattaacgtggcaaaaaccaattcttcatccatggccaaggtcattggtatcaatgggtgcttcctaatccagacaggactaatagtggagttcagtctgaaatgatggctaagcccaagcactaagcagtgctggtgaaggaagatggctcattaataggggtagcaatgcatactttagtcactcatctaaaatattatgtgcactgggtctgccattaggacccatctgggcaggtcctgtgcctgactatcacattgtccccgccccatcagcctaaaatcaacaggaacaactctgtagtccaacaaagtcagatttattgacttactgcagtaagagagactgtccatcaggaacctgagccatagcaaggaagaaagacaatgtataggatttgggggaaaagtaatatttaggcaaaatttaaatgaagcaaagtttagatggactcaaagcaaaaagtgctgtatggagaggggtctacattaggtcagtagtgtaaagaggatctagggtctgtgtcctgtgaaactacaaagttaagatacatgtagaatgttgtgaccagaaaccttttatctgaagctttgttcacaggctggagactgaggctgcttctctgtgtcagcatgatttatattattcaggcaaaactggaatgcttcattcttgttcatacaacttgaaaagtcaaatgtccaattgtccatggttgtaaagaacaaagtctcttagtgattaaaaaaatagtagccactcaaagaagaggaatgttatgatactacagctgcagcatattattgggagaaatattattgcttgttaatttgcagtgggctttatctgtgccttgttattccagcctcatgtttttactttctaaacacagtgtgtccagtggggagcacagagcacggtcccaccaactcactgtccaacaagaaacagctgtccctttgattccagcacaagcaaagaccctcatcgatggccagtgccaggccaaaggcccagcagtgagcttggga

SEQ ID NO: 9998 - DNA, 81660 bp, Homo sapiens
agctgcgcatggttgtgcacacctgtggtgccagcttcttgggagactgaggtgggaggattgcttgagctcattgcaaggctgcagtaagccagcctgggcaacacagtgagattttatctcaaaaaaaaaaatttatttttgtaatgtgtgagtgagtcctataggtagagagaagttaacatttgtatgtatgaactgttgcatgaaatgtacagaaaagtagcaacttsttcaggaaattttaaatgtatggcaggattatagtttatagaacttaccaaatgaagaagaatttctaggccgggcacggtggctcacgcctgtaatcccaacactttgggaggctgaggcgggcagatcacctgagttcaggagttcgagaccaggctggccaacatggtgaaacacctgggctggagtgcaatggcgtgatctcaactcactgcaacctccgcctcccgggttcaagcagttctcctgcctcagcctcctgaatagctgagattacaggtgcccaccaccatgcccggctaatttttgtattttagtagagatggggtttcagcatgttggccaggctggtctcaaactcctgacctcatgatctgcccgcttcggcctcccaaagtgctgggattacaggcgtgagccatggtgcccggctgccccagcctcattttaatttccaaagcaatatctttttatttatttaacatatacttgttgaaattctatatgtgttaggattttccccccagtagcatgaattatatggtttccacgtgatacagagcatagtgtctagcaacaataggcctcagtaaacatttgtggaataactcactaaatgaatatattacattgattcatctgaaactgtcatttttagaggtcaaaatggttaaatatcagcaattcaatattcaacaaatatattaataagaatcattccagtataaaagtgaaaatacatattactccttgacactgttatcaatgtgtataattttctttcattagactacaaaacttgacttttctcttctttgcctaccaggaaacacgaaattatccagaatcatatccacaactgccaagggatgaaacagtggagaatcctcatctccagaagcacattttggaattagcatccattctggatgttcgaaacgtgttctttgagaataccattgatgactattaaaacaaaaaccctgttgtcgaaacaagttttcattttccacaaattttaaatggtgcagttttctaacgtgataagacacatagtggtgttacttagtttttattttttaatttagggccaccattttaaaaacaaacaaaaaaatgttcacacttttagggtaactgttttaaaatgcaacctttcaggtcttttaaaatcttaaccttggaatttttattttttgattttgagggatggatatttacctccaacttctaatcctacactcaaatagtcactattctcaccctgagaagagtaaatcatttatttttgtataatgaggtaaatccaactcttatacttggacctaagttaaatgtctggatttggaaatatgtaatggttcataatgatgaagctagccaccatggactactgaaaatcaagaacagagtccctccataatatattttttctcattccaacttagctggtagaaaaatgtttgatcctttgaaacatgatcaagccagttttttgaaatcatttaatttctttcaatactgtcataatttcagaaattggattgaattgcatctgaaagctacatcttgattgaggacttgaggtggtaatattacttggaatgtatgagtattatgagatttatttgcatattttctttgtagtctgtgaatgctggaaatgaaaaaggaaacaactttgaaatattttagtcaaaaaaccatgtcattggtttcataatacaatgtctccaataggaattctatttaaactcttggtttatgagatcacatttaaagactggattgatgtctgtgacataaagttttaattttttgcctcattcaaatttatgagacttcaaagtcatagatgttttaaattttggtaaggggtaactgggtgttatgaaacctaaaatgtaagttgattttgcattggtaatttggaaataagatttattaacattccctgtatttagtattttatattcatgcacaaaatttttattatcttaaataggactcagtgtatattataaagatttttcttttttgtgttttccttccctgtcattccctttataatttcacagtcacttgctatgaagtcctccctcctttttgattatgcagcattcaatttcagaaatctatgaatgagaaggccttatacctaattttctgtacaggatcacatctggcagtcccaggagaagtgagctgattgcttttgatatctctttcccatggccctaggtaaattatactctaaatttatttattttttttgaaacagagtcttgcttttgttgcccaggttggagtgcagtggsgctatctcggctcactgcaacctccgcctcccaggttcaagcaattttcctgcctcagcctcccgagtagctgggattacaggtgcccgccaccatgcctggctaatttttgtatttttagtagagacggggtttcaccatgttggtcaggctggtctcaaactcctgaccttgtgatctgcctgcctcagcctcccaaagtgctgggattacaggcgtgagccaccgcacctggctattatttttaacttggttttcatttmtggcatagagactaatttgggtctaagttattcccattcctgctttgatttgctgatttttcaaacctgaagtccaaagttactgtttttggggtttggggacttggggagtattttacttttttttttttttttttttaagagacagagtcttgctttgttgcccaggttggggtgcagcggtacattcatggctcactgcagcctcaaattcctggattcaggcaatcttctcacctcagcctcccaagtagctgggactacaggcatgcgccaccatgcctggctaattttctttattttttaattttttgtagagacatggtctcactttgttgagcaggctggcctcaaactcctgggctcaagtgatcctcctgcctcaacctcccaaagtgctaggattacaggtgtgmgccactgtacctggcctgtttactttttaaaaatttttttgtttgttctttcaaacagtatttcagaaagcttgggaaaagttaccctggaaagatttcctttgctagtgggttttcattttcaggtaaagactgctttccttttttttcagtatcttaataaacttcatagctttcctttagtaacagtgttcattgaactacagcaatagactatcttcggttttctgacctcttgtttcaattccccttaagtcctgtgccagttatgctcctaccaacacagagtttcctgtcctctaatgtttaaaatagtatttactgttctgagctttatcctcccccgttaagcataaagaacactggtctgagaactaggagacctaagttctagtcctggctttcctggtaacttaagcgttatgccctttgacaactgtcttcatgtctctgcttgttagcactctcatctgtaaaatgaagaggttggcccaggtcttctccaactctgattctgtaatttggactcttggttccaaaaatattgatttccccactccaaccaccaagagaactatttaccctgtttgtagtgtacacaaccttttcttttgtaagtcatatttacctagattttgttcaagaaaatctgggtcccacttagctgttttagaaactagtacagacagagactctcctgaggaaattagagcttttatgattagaaacatgcttgtctaaaaatgagggtcttagaaatcacaacattgacccttatgatgttgccccttaagctaatagtgtaattccttactggtagttaaaaatctaaagtggactgaagtgatcttgaatcttcaaagagaggaaaactgtgctggaaaatgttattgtttcattgatgccttcaaaaaaatgcgtattaaacaaagactatactccagattttcttctgggcattggggaagcaaacaaaatagacttaaaaatcctcatgttcatgaagcttacattctagtagaaggagtaaggcaataaacataagtaatttatgttagaaaatgttaagtaggatggaaaagtgtagattatggtaaggtaaatcttttgtttgttttcttaagagaagaacaatgtttaaaagagtgatcaagcagggcatggtggcatgaccctattagtcccagctacctgggaggccgaggtgggagggtcacttgagcccaggagtttgtggctgcagtgagctgtgattgcaccactgcactccagcctggatggcaaagcaagacctcgtctctggaaaaaaagaaaagaaaaagtgatgatcagggtaggcttcattaggaaggtcacatttgcatgaacactttgccttttctttctttttatgaaagttttaaacatagtttttttgttttttgtttttgagacggagtttcactcttgttactcaggctgcagtgtggtggcaggatctcagctcactgcaacctccaccttccagtttcaagtgattctcctgcctcagcctccccagtagctgggattacaggcatgtgccaccacacccagctaattttgtgttttgagatggggtttcaccatgttggtcaggctggtctcgaactcctgatttgaggtgatccgttggcctcggcctcccaaagtgctgggattacaggcatgagccaccacgcccagcctaaacatacagtttaataaatcctccttgtacctyacccagcttctgtatttctttaatcaagggagaagaattatctaaaaggacagttgcccaatgggcttgagctgatgatagtggcaaagaatttcattttttaaaaatgcataccacctgccctttataaaaaaatttaaaccctaatgtatttaattttataattcataaaaatttaaatattggaactaagaacagagcaaagcaaagggaaaaagcactcctttgttttcaaattgcacaaactgtccctggagattctgatagtctctcatctctcttaactatcactgtaaacaacatagaaagcataagactgcaagaagtcagttatacacaaaacaaaatgaagcacagtggaattttctctttctttatctgtatatttctgaagttggtaaagcaactatcttctctattttacagaagagaaagctgagacccaaaaagctattcatagtgatagagctagaactaaaactcagatctcctcatctcagcccagtcttctcagtagctcagactgctttctataatgaacaagaaagaataattagggatttgtattttggcacaaaacagtatcaaatttttattgtaaaaatccacaaatctgacattttatcttttattctagccaggatgtattcttcatttgcatgtgtgtgtttctcttagaaagtggtgctctcaaacctttcaaagcacagaatttattgtaccctctttatttttaccaaattgaaacgtttcaggatttcagaagcaaagtgcaatccaattgtggctggagttttcctgatagaggatccgggtggttccctcccctccaacttctggctactgccctttatttcctttgtgcaatagaattccctgaaacagattatgtcgtaattatactgatttagtcaggataatgggaaaagcgacaaatcggatttatgtattaggtattatggagctttctttagcactctcctccaagtttaatctctgacatgtgtgrtatagtaactttctgtctctgagaagcagtttggacccagctgaaaaattttatttatggagacttgtaatcagcctgatatacagagaacactctggactggaaatatagtcaggtaccaaggtctgctaatttggccattgccagtgattcaaaaccacctccccaccctgagtaaaagatttgatatgaatatgaatgctatgagtctcctggtgatgttttgggtgtatatgttcctgtgwgtgtttggaaatcatagagggtatttaccttgagggctcttttgttgaccttatttatttgaaattcttattttatttgtaatggcatatgtatatttttgtgatgctacatgcaatctctgtgtatactttttgtatatatgtatacatatttgtaaatatattggtatgcagtgatacagtatgtgtatattatgtacccatacccattgtgggctgaatttatttaagttctgtgaggacatcctagtggcattgttcatgctgctgtaattaggttgtggctgtatctcattcataagcctctattttgagaggcttgtgtttggataaaatgggctaatttggagttgaaattaggatatgaagatcttaacagaaagctagatatttattcttagctttaaaatcacctgcaaatttttatttaaactgatgataaattagtgatataacctgaaaaacctaagtatgtgaaactgagacaccagcagattcttaggctgtagtagtcctttattttcttgatccatatttaagtattattactgagtagtaaattatgtatattggggcttaatagagaggctgtggaaaaaaattgctttaatcacatttaaaaacataggaaaatgtccattaaataggggaaatatattcccagttgtcatttttatgcctcatactgaattttgattttggaacaattcttttttcatcagtgttttatgtgtctctatgaggcagaaaagggggcattagctaagggatggcctaacctaagtaggataggatttagtgaggaacgggaggttgttaatttgtatatttgcagcagctatgattaatttagtcctgtcttggcatttccggctacagattttttcttactggacttgcatatcaaaggtgagtaggctcatctgagaaaatgcttccactgaataaaatgccttcactcgtattgctgtgtctctatgagaccacttgtgttctgcaagttgatgatatattcgcacatgaagtagagtttttaatattagatgcatggtgtgctataaaaatctgggccttcaaacctctcccaaggatgatagggttggggaggataagaggatagtaaatacgtgcaatgccaatttgtgaacctatagaatgttgccaagtatcaatgtttggttacttcagttgacatatttatttgcatgaaagagtgtaggagatgtttaatatacayttaaatacattcactgcagaaattaagtagaggttatttttgcatgataaaatataactgcaaagcaacwttttacaccgtattctttggaagattaaatctatctgatccaatattatcttaaaatagagaaattatctcaggagtctgttttaccacccaaaaaaatgttacatttgctgattcattatattttaaataaaacagccaactattcataagacttttcaattatagtattaaattcagaaataattataacagcatttttcttgaataaatattaaaatttggtaatttattatttctgaaaaatcagtgaaaacatccataggatctgatggtttgttgtttgaataaccaaatcattgtttttgcactggagagtagtagagcagatattataccatttaaaattcatggaactgactcaggctccttgtggatattaatttgaggacagtagtggtaatcaaaagtacagtagaaaacacttgacattgtgaatgtgacctctgaccccaaccgttgtaaagccaataactttgagggtgaataaggtaacacttgcttagaaaacccagccctttcccccagtctcctgcgctcttatacattgatactttacaactatttttgctgtacctctcagtctttcctggataatgggaccacttaaaaaaaaaagtgattcatcttcctcaaactagaatttcaaagcctaatactacactatgttccagcttcactgagttttgaacaaaaagacttaagcatgccttgtgtttaaggaaaaataattgatgtgtgaatggaatcaatcacctattgacgggaagggtgtcaggatgatgtagggtgatatgcctttaattggataaagagaactgtattaagtataactaatttaataactgattgaagcaccattcttaattttaaaatatttttgttaatttcttttgtggttttaaaaattaataatttttttttttttgagatggagttttgctcgttgcccaggctggaatgcaatggcgcgatctcagctcactgcaacctccgcctcctgggttcaagagattctcctgcctcagcctcccaagtagctgggattacaggcgtgtgccaccacgaccagctaattttgtatttttagtagagatggggtttcaccatgttggccaggttggtctcgaactcctgacctcaagtgatccacccgcctcggcctcccaaagtgctgggattacaggtgtgagccactgtggccggcctaaaaaaaattctttttaatagttatcagactactttaaccagtgccatgtttaaacatacttggacaatagactcagtttttttaatagtttgaagtacattatattaaaactacaaactcacttattcaagcctaaatttcatcatagactataaattgggtatcaatttcctattttggtggacaattccagtctgtctactacgacaatcatctttttaggtgtaatattgtttaagacataggtaattttaggttttatacttttctcctaggcttatggaatgaaagctaataggatatcactttcagaatgaaatagggaattatggctagccttcttatagggctgccgtaaatgatacttaaatgtttgttatatcactgattttcttttctcttctgaagctgttgtgaatgtccactttgccatgattaaaagttgagatttgtaaacattacaatttgaaccataaattttytcaaacatgaaatcagtatgaataagtataaaatttgaaatgatcatacatgagaatcccaaaagtaaatacttccaaaccatagagggataaccactgtatttttaaaaagcttatttccacccttaaagaagcatgctactaattgctttttttctaaattaaaactatgtactgtggtaaattaaaaatctgcaggaaaaattgcttagtgttttagcmcaataagaatttttattactcaggagttggagaccagtctgggcaatacagtgaaaccctgtcgctaytaaaatacaaaaaaaaaaaaaaaaaaaaaaaaattagccaggcatggtggtgtgcgcctgtaatcccagctacttgggaggctgaggcaggagaactgcttgtaacctgggaggcggaggttgcagtgagccgagatcgtgccattgcactccagtctgggtgacagagcaagactcattctcaaaaaaaaaaaaaaaaggaatttttattactatttcctgaagaatggtttttgttaacttgttactgtatcattaaaaagaccttctaatggttcagtacaataatctagaacttgatttatgtggctttttatagttatctgaatgcattccttttgccacatagaccatatggctagttctccaacttttttgcttatttttaataaaccttgctgttcaacaatcagagaaacctttagattttggatgattcttccagttgaggtagaaacatcttagataataggaaaggcaaatacaaagtcctaacattttcatagtagagtttacaagtaaaataacttatccatataggttatcttcgttgtgtagcaccagtataaatagtgatttcattaatcattgaatcagatgaagcagttataaatcactttttactttgtgctaagaattattgtaatttcaggacactttattatttcctctgagcagtttccattggaaggttgagtttcccttttttaagttctaatcatcactaaaggttaagataatcaaataggagttaaaataagttatgtttgatctttttcccttgaaaataatgctgaacttattgtctacattctgattattaggcagaaatgcacttgtttaaatcatagaagtaattcatttggaggatataattactcgattttctagtggtgtgaaatactttttaacaattgtgcttgtctgtaactgaaatgttataraattttaacactatagggattatagagttatattagctctcctcaagagactgaagcacaatatttttcatgtaacaattcttatccaagtgctgctaatctgtcgtgcaaatartgaagctatttggttgcctatttagctattcacaaatcactgtaatctttgaaacaatcttgtcgttcatttgtattaatatttggatattgtgagttaatactttagaaaaaaatccatcaactcagccccgttagcaaaactgtttggattcatagtttttatatgtgttaacagtagaataaattttgaaggggctatttactaccaatgactaaggggaaaattatactgtcactatcatttgacttgaacatttgtggtattgtaaaagtcttgtcagttgtgttctaaattgcttaagccatacgttctcttaaacaggatgtttttttcttcctttccagcagcctttttcttctttgtctgttatggttaatactccatagattttagaaattgagaagttcttgaaacattttattttcttgagttcatcacttttgactcttgtatgagatgtgatttgtcataaaagatagccttccactacttcactaaatgaatttcagagtaaacactgtgattctgcagagcggattcagtaggctttccaatgttttctcctgctatacagtgcctaccaccttgagggcacttcagtactagaggatgaaaactgaaacgttgttttgatgtttattgaataacgagattagagaatatttgatttttgttgtcagtgtattaaagaaattttcacattgataaatgttctctaggaatgtgtctacattcatcaggtgtgaactcttgtacatgaattttgtaccttgaatccacatatatatwaagtgtatcatcaatataaaaataaacattatttgcttaaagtttttggtactttttcggtattgacagctgaactgttagggtttgcttcattcaaatatctcagaggctttgaactatcttggggttgatgcttcttgttagtttgtcaatgtttgaatcctggttttggttttttccctgccctgctcctgcaggtcagaactggaacacgcgagggaagggactgttgaagaattgggtggaatctgcttattcttgggcttgtgttgagtctggggatggaaccagagttccttaaggtggaatggctggcttggcattgacgagttcagggacctgacttagggtactgatttggaccgtgactttttgtttgagatagagtttcgctcttgttgcccaggctggagtgcaatggcgcgatcttgactcactgcaacctacacctcccgggttcaagcgattmtcctgcctcagcctcccaagtaattgggattacaggcatgggccaccatgcccggctaattttgtatttttagtagagacgaggtttcgctatgttaggctggtctgaactcctgacctcgggtgaaccacccgcctcggcttctcaaagtgtggggattacaggagtgagccaccgcgcccggcctggactgtgacttggaacaagatagtttttcctcttttgtttattttcctactgcctgcatgattgctatttatttaaagagacggagtctcgccacggtgcccaggctggtctggaagccctggtctcaagagatcctcccacctcggtcttccgagtagctgggaccacagaagcgcgcgccgtgcacttttgatgttttcaacttccttcctaagcagaaaggagacggcccagcagcggatggtgaagctaatccaatatagtgagctgccaccagcgtttttaagtgcattacatagtaagaacgtggttctgctggacgttatgtactcggttgcgatataaaacgcatcatctacagtaggtgacaggcgccaaagtctaaaaactggtctcaaggtgtaaggtcccaggactagtttctggagctactggcttgtgagtgaagctggaggcgcagacttcccgggtcacacggtggcaaggcagctgcctagggtgcggcgggaccgggcggcgcgggggggcgcctggccaagcagtgcagccccggccgggtttgtagccagcacagcacagcggggcctgtggcaccgactgggttcttttacttttgacacgaagcccctcccacttaccacgctctgcacgcgcccctgttaaaatagaaaaagaccgagaggcctcggagactcagtcatcatctgtggctctggccgctcgctgacgtggcgaactgggctgagggagcgcccggctgggcacccgagaactccagccgttccggcccagtcgccgctcagaggtggtaacagtagccgccaaggccgcgcacgggcgcatgcgcgcgtcggaccaaccccctccccccaccgcgcagtcacttccggcgcgctgggagacgtgcggttccgggtcgctgctcggctcgccggctgggcggtgggggttggtgacgcgggccggggctcacgagaggcccgggaggcggggctttgctggcttcccagagagaggcaggtgcgcgggccaggactccgggaatgcgagcaggccccttattctcccagtggcctcggtctgtccccacagcggcccggtcagggttgcccgagccccaaggcggggggcggcaccggggtgctgaaagggtgagagtgggggcggaggcgggctgccccggcctgggagtctggagcctagggttccgggattcctccctgcgcgaccttggacaagtcgctcctcctctctagggctcagtttccytgctgtcaaatgggagagatgttggatccttcctttctttgacagtccaaagcacgggcggggctggaggtagcctgagggagtgagatccaaactgccgtggcaggcacctgcctgcctccctgggggttagacatctgtctttacccaattttgccttgctttttgtcagtgcacatccgtgaccagacgcccagggtctggccgggtaaacagtatgtgagtgtagtaatcaactgagaaataaatactggctccaggaaaacttaacctcattcaaattgttttgctcagggctcccagggagaagtgaatttaggcacccgctgcggtgatcaattctgttctatgcgcttgtaagtgaagctcttaggcaaaaaacaatttcataggagatcagggttagggagggtatcccattgagagttgtgacaggttttcttaccccctttaatccttcttctgcccctcctcttccttcacttcttccccctatccccacccaacattttggccatacacttgaaaagaaatacccaatgcattttatctttgtcttcatgcaggacagaatgctttgacctccaagctgttttaaatctagtagataagccaggtgagtaagtggtttacacacattgaaagtaaagtttctgaagaattgtacagccttaatggaggatctgaagtggtaagatggcatttgtgtatctcagagcagagcttaggtatcctccacaaaacatggaaagttaaggttggaaccagaatattagtgttttatacaccattaggaggaaaaggtttttgaatcttactttgaatatcatgtcaaacattcttaagaaaagaaactgtgaggccgggcgcagtggcttatgcctgtaatcccagcactttgggaggccaatgcaggtggatcatctgaggtcaagagtttgagaccagcctgaccaacacggagaaacctcgtctctactaaaaatataaaataagccgggcatagtggcgcattcctgtaatcccagctactcgggaggctgaggcaggagaatcgcttgaacccaggaggtggaggttgcggtgagccgagatagtgccattgcattccagcttaggcaacaagagcgaaactccwtytcaaaaaaaaaaaaaaaaaaaaaraaaraaagaaagaaagaaaataaactcattggaggtaattttatcaaactcaaaaccacacagcgtctctagaaaatgttcaaggatatcagatacttatataatagagttgtctggtgtgtcttcttttttctgttaccagcttttcctattggacagttgattgcaaaccatcctgaaacagtaggatattacaccttttacatattgaattacatattgaatattgaattacatatgaattgaattacatgcatttttgtcttcaacttaaagaacactaaactgtagttaagcttattggaggaaggatttgaaatcattaagtcatgaatatatgatgttgatgtctgctctgggacattttaccaagtgtgttatatgtcatagccaacatgtaattaaaaaaaaaaaacgtagagatttgtgaatcagagtcctctgttcaaataccagcccttccacttagccacacaatctttggtaggttacttcatcttcttgagactgggtttcttcatctgtatatgcatatgaagcacctgagtgctttttaaatgtttagtaattgtgttctataagtgtacatgtaagttatgaaacttagttttgaaatctaaaacttaacaactcagatgcgaaatctttccaatgtttaacttttgaactgtctctttcatctgatttgtagatcctgtgttgccataagcccttggcccacatttaagtgggaatgcagctagcttggatgtctgaaactttgtaggcgcctctgtctgaatcctgaacacaggcaccaggactactgagagctcgtcatctgtgcaggatagccacacagcaaacatgtttgcaaaactgaagaagaaaattgcagaagagactgctgttgctcagaggccaggaggtgctactaggatcccacggtctgtgagcaaggaatcagttgcctcaatgggagctgactcaggagatgactttgtaagtacctttacttaagaaataaagatacttttgcagggtattcttccaataaatattttaaattgcttgattatttcatacctttcatggtttatagctgtacaagagcctgtacatctgattcttcttactctgaggtacctttttgttaatgtttggtttgtaaatgttaaggtactctatwtttttkscttatttttctgtgagttcctctccatattctctccagtgtcctcttgtactgtttttccgtctatataccttatacatcttcttttgcatttcatttctgaaaatgtctgggcctgttttcattgcagacatatatacttatataacaactaagtcattgctgcttaacaaggtctctgagttgtggtatggggttagcaagagtgcattgttgtattgggacgattgttggaaagatggccccagtgattacagtatgttgctttttttcttttttctttcttttttttttttttttgagatggattctcgctctgtarcccaaagtggagtgcagtggcctgatcttggttcaccacaacctctgcctctggggctcaagcaattctcgtgcctcagcctcccgagtagctgggactacaggtgtgttccaccatgcctggctaattttttgtattttagtagagacaggttttyaccatgttgcccagggtggtctcaaactcctgagctcaggcgatccgcccaccttggcctcccaaagtgctgggattacaggcgtgagccaccatgcccagcctacaatatgtttcttattagtaaaatacatttgtgactataagatttcaaaaaatgaagatgttgctatatgagggaaatgtcatgcttaaaaaataaagtgtggcttttgcatatgacaggatcctcttaagttagataaatttcttttctcttcttttttttttttttgagacagagtctcactctgtcagccaggccggagtgcagtggcatgatctcagctcattgcatcctccacctcccgggttcaagcagttctcctgcctcagcctcccaagtagctgggactgcaggtgcccacgaccacacccggctaatttttttttgtttttagtttattgtttttgagatagggtctcgctcygtcacctagggtggagtgcagcagcacaatctcggctcactgcaacctccatctcccgggttcaggcgattctcctgcctcagcctcctgagtagcttgggactacaggcacccgccaccacgtccagctaatttttgtatttttagtagagacagagtttcactgtgttggccaggctggtctggaactcctgacctcgtgatcctcccgcgtcggtctcccaaagtgctaggattacaggggtragccaccacacttggcaataaatttctttaaaactcatttataatrctggatatatatataaaagaatgtatgtaatatatatgtaaagtataaagcataaagtaaatctatcactcatctgaagagatagaacactatcaattctgttaagccacttatatgtttcttccaatttcctctacccaatttaggatagcataaccactattctaaattttgtatttttcatttacttgctttttaaaatatcttaccagatatgtatgtattcataaacaatttattatttaatactgcttgtttttgaagttataaaagttgcacactgtagacttcttggatttccttttttaaaatttaattcaacatgcttataaaatgcatccatgttacaggaagctgtggttcatttatttttactgctgtataagattccaggctggacacagaagctcacgcctgtaatcccaatgctttgggaagctaaggcggaaggactgcttgaggccagaagttcaagaccagcttgggcaacatagcaagactgcatatctacaaaagtttttttttttttttttaatttgcctggttggtggtggtatgcctgtagtcctagcttcttgggaggcagaggcaagaggatcgcttgagcccaggagtttgggattgtagtgagctatgatcgtgccactgtactccagcttaggcaacagagcaagactctgtctctaaagattttttttaaaaaaaagatcccagcatttgaaaaggccacatttaatgtctgtcttctcctggcgatagacatttgaattgtttccgttgtcagatgagtcttcctcctgctttcttgtactgcctggatcccaggtcagattacatggcagaagttattaggttatcgggatggagcaataagattaccagatctacattatcactggctcctatatttaagaggaaatataagcacacatttgagcatcgggctgaaggatgtagttttaaggctgggttctgtgacagatggacctgttttgccttcatgctgacaccctaaatgaagtcttttatttagtaatgtattccaaatacagagattgacccagattcaggaagtaatttattttggggtttctcaagttttgaacttaatacagcctgatcctcagttcctatctccagacccttatatccaactgcatatgtttctccaaacagatccctcctctgtggcatctcaaattctaaatgaacaaaattgaattcattatttccatctccaaatgtgcaccttcatcttcccaagtcaccagccagaaaccctggaggtattttaggctcttccctcctttcacttcttggtgtccaatcagtcaacacgtattatggcttctatttctttcttttttttttttttttttggagacagagtcttgctgtgtcgcccaggctggaccctgggttcaagcaattctcctgcctcactcagcctcccaagtagctgggactacaggcacacaccgccacacttggctagttttttgtatttttagtagagatgaggtttcaccgtgtgcccagtctggtcttgaactcctgagttcaggcaatcctcttgccttggcctcccaaagtgctaggattacaggcagctttcatttcttaaatgtctcaaacttgcctccctactccatcttctagtagtacatttactagcagaggttaagcatccctaatctgaaaatttgaaatctgaaatactccaaaatcttaaactttttgagcgccaacatggccacaagtggaaaatttacacataaatacttaacacaactttgtttaatgcatatcatttaaaatattgtataaaattatgttcaggctatgtgtataaaacgtatatggaacataatttcacgtttacacttgggtcccatccccaaaatattatattatgtatatgcagacattccaaaatctgaaaaaatccaaactccaaaacacttctgatcctaaactgtttgggcaagagatactcaacctatactatcatttgatttcaagctgcctttctttctgggacaaacttgtagtctatctgggttccctgtccccaaagtgacctttttttttctttgagacagggatctctttctggcacccaggctggagtgcagtggcccgatcacagcccactgcagccttaacctcctgggctcaagcgattctcccatttcagcctcgtgagtagttgggactacaggcacgtgccgccacacccagctaatttttgtattttttgtagcgacggagttttgccatgttgcttaggctggtctcgaactcctgggctcaaacgatctgcccaccttggcctcccaaagtactgggactgcaggtgctagccactgtgcacagcccaaagtgatctttctaaaagcagatctgttcatgtctctccagtacttaaaactcataaaactcagtggcttccccattattttcaggatgaagtacagactcattattatagcataatggtaaactgtcatggtcttctctcagcttatatggccagcattatctcactgtactttgctacaccctgtgccacagccagactgaatttattgcactttctagaatggaccacattctttcatgcttacaatttttgcacatgctatttcctctctctagaatgtctcatttcccctttcactcctgcattcctctgacagactcttgtgcatcttaagactcagctcatgtgttacttccagcaaactcccttgacctgaccttctcctctggcagccccctaccctttacccctcctggctgtttggtgccttgtcttctgctaacctctgtaatagcacctgctgtactgcattattattgatgatttgcttgtttgtctcttccactgaactgggagtttcatgaaakacaataaagtgtagcccttaggaactcaggtcaggttatagagtcatatctgctctattattattatgtgactttgggcaaatttcttcatttttccttgccttatttttcacatctataaaatggggataggaactgtatctacctttattaaagtatgtgtgtcaaggatccccaagatcatccccagatttaattattcactaggaggactcacaagactcaccatatagttttactcactgctatcatttattacagtgaaaggatctaaaacagactcagcaaagggaaaaggtgcatggggaaaagcttggaggaaacaggtgcaagcttccaagattcttctcccagtggaattacataggacatgctccattctcccagcaatgagttgtgacaacacatgtaaaatgtctaccagggaagctcattagagactcagtgtccaggctttttattggggactggtcatgtgaacaccctctgcctactatgtatcaaaattccagaatccaggccaggcagggtggctcacacctgtaatcccagcactttgggggaccaaggcagatggatcagttgaggtcaggaatttgagaccagcctggccaacatggcgaaaccctgtctctactaaaaatacaaatattagctgagcatggtgacacacacctgtagtcccagctactcaggaggcaggagaatctcttgaacccaagaggcagaggttacagtgagccaacattgtaccactgcactccagcctgggtgacagagcgagactctgtctaaataaataaataaataaataaataatccagactccagaaggaaaccaggtattcagcataaacccatatttttgcacaaacattttaggcacaatgagccattcttaacagaatgatgggaaccctcccaaaatctaagttcccagatgccagccaaggaccaaccttaaaagcaggcctttctaaggataacagtctgaggcctgtaatgtcagttcttctgcgtagaatctaaagcacttagcatggcgtctggctctaagcatttcataattagcttctgttgctgctgctgctgttattttggataggagctctttgtttcaccactattcctagtgcttagcacagtagkgagacataggatgtctcctatgtctcactaacagtaataatcatarcagcttcttatactgctagtggtgtggtctgaatgtatgtctccaaaaattgatatgttgaaacctaatcactagagtgatggaatgaggaggtgaatcgtctccgagatgattagctcatgagggaggaaccctcatgaatgrgattagtgctcttacaaaagaggccccagaaagctgccttgccccttccaccatgtgagggcacagctagaaggtgtcatgtatgaaccagaaagtgggtcttcactagacaccaaatctgctggcaccttaattttggacttcctaggctccagaactgtgagaaatacatttctgttgtttataagtcacacattctatggcatttcattatagcactcaaacagactaagacaactagtaatagatgacacatattaaagctaatatgtgccaggctgtgttttagggatttgacaagtattgatttacttaatcctcatcacagctctgtgaggcaaatgctgtttgttatcacagattgcaaatgaggaaaccagtgcacagagaagttgagtaatgagcctaagttcttacagctcgtaagtggtaaagctgcaacctgaagcaaggttttctgacaccagagactctcctcttaactgtccactgtcctgaytctcagtacatattggatgggcaagtggctggacatgtagatgaatatttgaggtgaattattgaataatctttaaaaacattttggggatacaatgggaaacatgattaaggactggatgttagtattttttgttaggaatgataatcatatgttgcctatgaagagaaatagccttaatttttggagtatttaggatgaaatgccatgatgtctgttatttaaattacttcagaaaaataaaaattgatgaagcaaataagggaaagcatcagcaattgtgaaagtagatggagagcattatttagaccaatctctctccctttctatattttgaaaaattgtataatgaaaagtaaaagagattttaaaaactgagttattagcaattgcaagcagtgcctatagcaatagtagtattcatttattttaaaataatctggtttgttggggaaaaatgtatgcctcattaatatattggtttgttgaatgcatattatctgctgaagtctatgatgcaagttagagttttagattgatatccgtttgtttcatagatgaagatactgaaactttatcaatatcggtgaaagattcgtagtcatagaccagcttttgatccctaaagaacccccgccttctttatcccaggactttacttttggaaagataaagtgatttttttatcatggcaaatatagtttttgtattatatacttgctgtaataatggatctatttactattatttatttcagtagcatgcgtacacataaaattgatctgtttagcatctcctctctccttcactttataagaggaagaaagcgttgcttccactttccaggtagagaaactaggcccagcttttcagtgattacaattaattaaagtgtaaccaaacctaaaataagacttgtcactttctggctcagtattgtggtctcacacatatatgaatacgaccttccttgtgtctacctcaacaggcttccgatggaagcagctccagagaagatctttcatcccagcttctgagaaggaatgaacagatacggaagttagaggccagactttctggtatgtctaagaactcataaaaagcaaacaacaggaaacttgccttgcttgactctcttcctataaaatagccatataggatgactttatagttattttcacatatcattttgatctttttagaaaggagcaagtataccctcttcttttgttagtgtagtaaatagtataaattcaaaactgaatttgaaagtttattaaaaaattttttctgctcctgaggtttctagccatggaaataaaagataataataatatatgtacaatagatttgaccatcttccaccattagcatagcctgctttcaggtggaaagggatggcgttagtatttaaagggaatggccracagatattggattcatcagcaccagagattggtgctgtgttgccacttcctgcagctcataccacctgtgtaagtgttgttgtaggtctttgggccacttttcaatggtatttctgacttcagcacctgcatagaaggtgtcactctcattatgtcttttgtctgcagtttacaatttacacagctcccattatatcctttgcctgaggagggcatggtcatgatagaattgtgagttattattttggtttctgccagtggatacatttggaaagcttcatcctgtaaagtggttcatggcttctgtgtctctttttgtcccttggccttttaatgcccattttattggagtaaaacagcagaccgaagttcaccaagtggtatgtgaaatatttatatttgtgtagctatcagacccaaattcaccaaattgtatgtgaagtatttgtatttatgtagttatcaaaggttcatagcatagctcacaactaccagttaattattttgtcctcactagagccttattaggcttagcaaggttaaggcctcacaagtagtaagtggtagagctgggatccaaacccagatttatttgatgctagagtcttaattccatctgccttaaacttaattgttgctatcctgytactcctacccataaataatatcagtaacagaggtaaagtaattttacatttgtttaatgttggagagagagttataaaataatatatataccttccccatatggtaggaagaatagttgagcttgacttacgttagagaagggacagggaagagcactgacatttactgggcccactatgtggtgagtattgtcctacagtattagtatgagtaatgataatagtcacagtaacaataagagctacattttattgagcactgtgtgcaaagcacttaaggcacgtaaaatgttttatctaatgcatcttttgtggtaggtacaattaatatcatcatttaatatatgaagaaactaatactacaggaccaataatttgcttaaggtccccagctaaggactgacagagttgggatttgagctactatgttttcactaaaccataactatcttctttggccacctagataattaattctgacattcacatttaatgtagcgtaggttaccaagttcctgtgtagaaagggagctcacttttttagagaattaagtgctatcactataaagacaatgctgcacctaaggtgtttgttattgccctaactactgttcctgagttgtgtggactataagcgagctgtttagtgagttcactttgatctatcctactgctaagaccggaaaaggaagtggaaactgagatttgaaattaagtcatgagataaatctgtgtttttcatagcaggacatttctgatcaccaggctaagcctaattcttgtttttctatcaaggctaaacaaacttgcctttttgtactcaccatttatacaccatggatagtttgtactatacttgttttcctgtgttgttcattgttaatgggaggctgtctgtctagctttccttaacaggaatggttttcaggttaagaaaatcatcatcatttccattcatttttttgtttaattaacttcctttcctgatgtttgtccatttctggtatgtgcgtcaccctcctcacccaagactatgctgaacaggtccgaaacttgcagaagataaaagagaagcttgaaattgcattagaaaaacaccaggattgtacgtatttttttcctgcttttttcaatcttttcaaggtttagtttttgaaatgaaacartagtgtatggttaagtttgtccttcttcaaagcacaaatctttattttataagtagtgtacttcttaatcaggttgatataacatttggatgatatttataagtatgcaagttttatttatgttggcttatgggcatgactcttaggagtaggtcattatgtgtatcagcttgtctctatccagttgacccctttatttaggctaccctcaggttttaataaaatctagtacccatcccttaggtctggattaggaaatgggttctcaccacagcttcattactgctgtgttgagtaactgggagaaatccctgtcatcactccctcagcaataaatcatacattttgtgtagtctaccctcaatcatatattctttgggtaccatccaagaaagatgttagtagaagtagaaagttattttttttgttgatatgtactaaaacttttaaggaaaataaagtaaaagaaaggttttttgtttgttttgatttttctttttgtttttaattctgataaagtggtagtagccatcacttagcatcagctttgatgttttctggcaacctacctaactcagtgttctatcattgtaccatttaaaaagttaccttttggcatctttgtaaatatatatacttgtctattacaaaaaacaaaaacgataaggaaacaaacaaaaactgtggtctattaccaaggccaaaatattcttctggaaagttgaggtggatccagcttttcctagtatcacaatccacttatgtgactttggcctttttcattaggtgacagttgtaatcacatgggctatttgtcatgctgtttctgaagtgttttcatatctcaaatagagcctctttgttaacagcttccatgcggaaatttcaagagcagaatgagacattccaagccaacagagccaaaatggcagaaggactggctttggcattagccagaaaggaccaggtattttatatgtggcactgcccagaactggtggaaagatttcacttagtgacgtgatttcaaaaatcatgacataacctatagaaaatatttatagcctaggagaagagaaatgttaaaagttcgttaaggttttctttggccttttcttgtaaagtgaagaaactttacagttctaatcatgaaatgtgtccagaatgtgagagtatcattccttgtatctgtgtagtttcataaaattgagaagggaaatagtgtatctgtaatctgatggcaggccccaaaataagagaaaaggtctctcccctctaaaaacctctctgaaagtctaacccccaaacatttgccttttatcctggagaagatgttattaacttagtcataatccatagtatacagagttcttccaacctctgttcccacgtttcttcaatcccaaccagcaggacagaggggaaatcctataatctcagcagaaccaaccactggaagatgctgaatgaataaccacaaggaaggaaaataattctgttactggctattacagtaattatgaagtatattttgttcaaaataatagatgacattttaaatttaagataagcatcaatatattataatgttaattttgatttattaagacagagtttattatgtttcacttaagaaattgtataatttatttcatctggaggaggtgggttggttggttggttttaaagtgtctgttcatcatctaggacatttactagccagaaaaaatacaatttaccaatacttagtggataactgtggtatgaatgtatataaatgaagaaataatctaaaattgatggattctgattataggcaatcaggatattgcctttgtgcaaatgggctttttttcccactattttatggtttgtgaataaggggcataattctttttcttttgacttacacagatggcataaagcatgttggtaaaatcaaaatgaaaaggaaaatgattatcagggactgcaaaagatcccccctactcccccagtttcaggaattaatttctaaacatcatttccagaattactcaactcagctggtcccagctacccactcccaagaaataacagtactcatggcaaaactcccaggaacaagccaaaaagctgcatcagaacagcagatacagcttttcttgggtgccctgcttagtaaaaatctgcaggcttatattcatgaattcattccattctagaatcttagataaagttcattttcttctatttttgtgactcttgcctttcttaatattaaaccaagtttatagatttttttttaattggcttttttgttttgtttggttagttgctttctgggaagagttgggttgttttgttttctgaaaatcttggtattacagatactcttcactggaaaccatacttttttattgttttgttttaggaatggtcagaaaagatggatcagcttgaaaaggttagttcatctttatttttrtctcatttttgttggtctcgtctctggggtatggaaaacgttttatccggtaaccaacatactgattgctataccacctcttggaagcaggacagtttatgattagatactgacttgaaaagctctgatcctccccttttttggtgaatgtgcaggatgtcttttgtttgcccctcttgatatactctgcactcctcctctcttccctttctctgtgtacctgaacgccgatagaaactgtatcagcagggctcagaatgccctctggcatccggttgggttcagccagtggggaaccctgaaagaaccatgtgtgaaagaagatgtggtcaggatgtttcttcccccacctytctccatgtgggctctcttcagcttagttgcatcccatggccaaagtcacagcttcagttggaccttyggtttgccttcttgacatagtttttgtctctctgggtttcctataacctcttcatctttttgcctctttatggccaactgttgccagcacattatcttttgggctatcttacccatcccacagctttgataagcccctttattaaaccatcctcaaaatgcctgatttgagatggccgtctctttcctgctgcggttctgattgacacgtggtaatattaggaacacttaaagatgaagcagtggggaaggaaggcatttctcaaggctcagcattgaacatatatgagaacctcttggctagatgtagatgaggaaattgattattctagtaccattgcttgcataacaccgtacaggtaccttaagtaatatattcctggctcccacatataaacgagatgaaatttcaagtctacaattggaaaaacattttagttttaaaataatcattagtgtcaactattttttttccataaaacaccaagttaactttactttctgttctatagaaatctgattatcaagctgaragaatacattaactttttttgagacaaggggttgttctgttgcccaggctgggagtggcacaatcacagctcagtgcagcctcaacctcctgggctcaaatgattttcccacctagacttcctgagtagccaggactgcaggcttgagccacagtgcccagctaatttttaaaaaaattttaatagagatgaggtctcactgtgttgcccaggctggttttgaactcctagaccaaagtgatcctcctgcctggcctcccaaagtgctaggattacagtcgtgagccactgtgcctggcaacagttttatataaggaaagaattatagaaaagtcaagtcccaaggaaacctgtgcttgaaaaaaaaaaaaaaaatcctcaaccatatgctattaatgacagtcttcttaaatatggagatatgggttgggttaaggttttcttgctgtraaagaaactcttaagattatggcaattgaaattctcattgaactgtttttttatcttttaaaattttggtaaagggtatccatataggactgaaccaactaaaaaacctacttaggttcacaaggttcacaaagggaattttctctttgttttgtttttgttcttttgaaggagaggttggggaaaatttttcttttttttttttgagacggagtcttgctctgtcgcccaggctggagtacagtggcatgatcttggctcactgcaagctctgcctcccgggtttactccattctcctgcctcagcctcccaagtagctgggactacaggcacccgccaccacacctggctwatttttttatatttttagtaragacagggtttcactgtgttagccaggatggtctcgatctcctgacctcgtgatctgtctgcctcggcctcccaaagtgctgggattacaggtgtgagaggttggggaaattttctagagtaggaaatagtaatgagacacctatataggtcttcgaagctacttttcatcgttaaagttttttttttttttttcagtcaagagttagaaactgtaacagaagggttagtccttaagagagtccttttttctttttttctttttttttttttttgagacagggtctcaccacgatgcccaggctggagtgtagtgcagtggcacagtcatagctcactgcagcctcgacttctcaggctcaggtgattctcccacctcagcctcctgagtagctgggattacaagcacatgccaccatgcctggctaatttttttgtattttttatagagatggggtttcaccatgttgcrcaggctggtctccaactcctgtgctcaaccgataggcccaccttggcctcccaaagtgctgggattagaggcaagagtccactgctagaaatgatcatttaataaattgtaacctgctgacaccagtcatgtctaatttttttttcttttttttagcttgttaactgaaatcagttctacttttaatctacgtgcatttaatttttttcaggcattcaatcttactggttactcatgtttttcagccagttcagtgtgtcactaagaatagacatgtaaaataaggctgggcacagtggcttacgcctgtaatcccagcactttgggaagcagaggtgggtggatcacctgaagtcaggagttcgagaccagcctggcaaacatggtgaaacctcatctctgctaaaagtagaaaaattagccgggcatggtggtgcatgcctgtagtctcaggtactcaggaagctgaggcatgaaaatcacttcaacctgggaggcagaggatgcagtaagctgagatctcaccactgcaaaccaacctgggcaacagagtgagactctgtgtcaaaaaacaaacaacaacgacgaaagartagacacataaaatatatatctggacttgctaaacagatgtaagaactttaaagttctacataggccatgcacgatggctcatatctatcaacactttgagaggctgaggcaggagaatgtcttgaggccaggagttcaagatcagcctggataacagagcaagatcctgtctctaccaaaaaaaaaaaaaagttctacgtaattgttgcttttattcccctttttcacaattatttaaaacacatttatttttaaataaagaattaaattctctagttaaaggattaattcaattaaagaatttgtaaataatgccatatttctgtaatgctttccattatcaatgcatcattgtccactggcatgagatttcctgaagatttttcctttattaagaattccactttcaggccgggtgtggtggctcatgtctgtaatcttagcactttgggaggccaaggcgggaggattgcatgagcccaggagttcaaggccagcctgggcaactagtgagactctgtctctaaagacaaaaattttaaaaaagaaaagattttcactttcgtaatacagatttctaatgctttcgttgcctgagttgatgtcttcttctttcaartaggagaaaaatattctgacagcccagttacaggaaatgaagaaccagagtatgaatcttttccaaaggagagatgaaatggatgaattagaggggttccagcagcaggaactaagtaaaataaagcacatggtatgcatttttgttttagtagctaaatactgaatagatgattattcactctgattttactagtcatcactctctaattgctgataaacatacaccagtaatatgtgatattaatcatatttgatattaatcatatttgtatgtttttaaatttattaaaatagaaaagttctgtttaaaatgttctttttctgttttgttttgggttttgttttgttttgttttgttttgtttttaactactgggtatataaattctcttataagcccacaaaaatgttatagaaatttggctattggtccacatttttttttttaaatagatggagtctcacggtgttgcccaggctggagtataatggctactcacaggtgcgatcatagcacactgcagcctcaaattcgtgggctcaagctgtcctcccactttagcctcccaagtaactggaactgtaagcatgtactgtaggtgtgtgccaccatgcctgacaagcttagatttttttttttctttcctttctttctttctttttttttttttttttgagatagagtctcactctgtcacccaagctggagtgcagtggcatgatcatggcccactgcagcctcgacctcccagactcaagggattcttccacctaagcctcccgagtagctgggactacaggcgcactaccatgcccggctaatttttgtattttttgtagaggtggtgtttcgccatgttacccaggctgctctcaaactcctgggcttaaacgatatgcatgcctcaacctcccaaaatggtgggattacaggcgtgagccaccgtatccagccgagatttaagtgtatttttcttttttacttcttttttttttttgagatggagcctagctctgtcacccaggctggagtgcagtggcgcgatcttggctaattgcaacctccacctcccgggttcaagtgattctcccgcctcagcctcccgagtagctgggattacaggcacccgccaccacgcccggctaatgtttgtatttttagtagagatagggttttgccatgtcagcaaggctggtctcaaactcctgacctcaagtgatccacctgcctcagcctcccaaagtgttgggattacaggcgtgagccagcatgcctgatcttaagtgtatttttcttagcatagcccaatgaaactttgtatttttgtgtcagcttttaaaaaaagaagaaagtctagggaaaatggaacaagaattggaggcacgaaccagagaacttagtcgtacccaggaggagttgatgaactccartcagatgtcatcagacttaagccagaagctagaagaattgcagagacactactcaacgctggaagagcagaggttcttgcttggtctgtggggcccttgggaagaggtgttagtgtagttctggctatagcctgcccacctttccccattgttcattacaccactttctgattccggtgctggcaaaggcttctggacacatccttacctgcctaggactcaggcctcaccctacctccaacccattttccccttcagctgctgaaactcaggacagttccaccctgctgaacaattcagtgtggttttagtttgtaaagtattaatagactaaggaaaggcaggtcaggatttctttcttaaactagggtggactttttctctttgggctcctgcttcagagagagccgaggctttttccgttgaaaacctgcatgtggctaatgatgcttgtagccctgacacagaagaaaccatttgtatttttcctgcagaagactgtatattagatgagatatccaaatttgttcattgtctgctttcttttgatgaagagatcatgtgatagcttcaaaaacaggtgcagaaagtaagatcacagccctggaacaaaaggaacaagagctccaagcactcattcagcagctttccattgatttgcaaaaggtaagtagaatatgaggagaagacctggatttctaagattcataaaaactaattctttcagaaatttctgcctgagagtagctactgaacatacatttctcatgcagtccacatggctccatttcctgtactagccaggctgcactcagatggaaatggccatacagctgaacaagggttgcttagcagaagtagtcagtattttcctgtcaggaattctcaaagtacaccatttggtcgactcaaatatgtctctcttttttttttttttttctttttttttgggacagagtcttgctcttgtcgcccaggtattataggcgcccgccaccacacccggctaatttttgtatttttagtagagacagggttttaccatgttggccaggctggtctcaaactcctgacctcgtgatccaccaacctcggcctcccaaagtgctgagattacaggcgtgagccaccgtgcctggcctgactcaaatatgtctttaagcacataatggaccttgagcatgaaaaatacaatagtggctgacatgaccagggctgtacctttgacatacttggctctaatccagtttgttttatggcacgtaatcaaatgatgtcattacaatttgttttttcatttcattgacatacatttgtttctacattagggctgtgctacactctgagaatataaagatgaatgataatatttttgaatataaagtagtgtttctcaggcccagcacagtgactcaagcctgtagtcctagcactttggtaggccaaggcaggaggatcacatgaggtcctcctcttgaccccatctctaccaaaaaaaaaaaaaaaaattagccagttgtggtggtgtgcacctgtagttccagctgtttgggaggctatggtgggagaatcgcttaagcccaggaattcaaggctgcagtgggccatgaccatatcacagcactgtagcccaggcaatagagcaagactatctttaaaaataaaaataaggctgggtgtggtggcgtgcacctgtaattccagtacttgggaggctgaggcaggagattcggttaaacctgggaggtggaggttgcaagtgagctgagattgtgccactgcgctgcagcctgcctgggtgacagagagagactctgtcttaaaaaaataataaaataaataaataaataaataaatataaataaaataaagtagtatttcccaatgacataatttattattggcattttgagcagaacaactcgtattgtatgattgtccattgcattgcgcgacatttagcattcctggcctctgggttctgaatgccaatagcatccttcagtcattgacatccagcccttcccctcacatcacagaaccaccccctattcggcagtgccatccaccctaccctcatctttcagaawtgctgatctcaagtgagacagagccttacaacataattacagtacagtaagattttgtcaatagaggtcttagctaagtattatcatacttacagatacctaagtggaaactaagaggttattgaccttgttcacagttataaccgtaagtgacagagttggattctaacccaagtcttactccagaactcatgcttattctactgcactttgctgcctcacaataaggagcacccagtaaatatatacgtgaatgaatgactgtgatacaggctttttaccctcaatgaactaaaaatctcaatacagacattgttttccttcagaggcttacagtttcattatagaactcaaacctactgtaatcacaagaaaagaaatgctcaaacaagaagtctcaagtaagtgaactaggtttttcttttttcttttcttttttttcttttttttgagacacggtcttgctctttcacccaggctggagtgcagtgacgtcaacggctcactgcagcctcagcctcccaggctgaagtgatccttccacctcagcctcccaaatagctgggactacagacacatgccactacaacaggctaatttttttttattattattatctgtagagatggggtttcgctatgttgcccaggctggtctcgaactcctgggctcaagcaatccacccgcctcagcctcccaaagtgctgggattacagaggtgaaccaccacactcagccctagatttttcaaatacaaaagatataccataggggaagtacattccagcccaggagtcaaggaaatcttcctagaggaactggaatgtcamggatcaggaggacagcaggaggcagaaaaggcagaaggtcagagagtacatttggggtcatggaagaagggggaaaatagatacacaactttggtttttgtattattttgtttttttctgagacagggtctcactttgtcacctaggctggagtgcaatggcgtgatcttggctcactgcaacctccacctcctaggctcaagcaatcctcccacctcagcctcctgaatagcagggactacaggcaccaaccgggctaatttttgtatttttagtagagacaggatttcaccatgttggccaggctggtcttgaactcctggcatcaagtgatctgcccacctcggccctcaaagtgctgggattacaggcacctggccacaactttgatagtcaagggaccctttgatgtcaattagaaccatctgttgtttttataattggaaaaatggggctcagggaagtccagactttggtcacagtaagtttcttcattcattctaaaaatattagttgagctttactatgtgctgggctctgtgctgggtgttcataatattatggtgagcaaaatagatacagttcttgcctttgtggtgcttatagtctagaagggaagtcagacattaatcagtaatcacatatataattactaaccgtgatgagtgttctgaaagaaaactacgagatttagtgagatcctattaaaagatatcagatcagggctggsyttggtggcttacgcctgcagtcccagcactttgggaggccgaggcaggtggatcacctgaggttgggagttcgagaccagcttgaccaacatggagaaaccctgtctctactaaaaatacaaaattagctgggcatggtggcacacacctgtaatcccagctacttgggaggctgaggcaggagaatcgcttgaacccaggaggtggaggttgcagtgagccgagattgcaccattgcactccagcctgggcaaaaagagcgaaactccgtctcaaaaaaaaaawawatatatatatcagatcagatccagttggagccgtagaacacttaaggaagtaacactcgatacagtgctcaggctggagagaaagggatgatgggagagaatttcaagcagggaacagcatgaacaaaaactctgaggcaaataaaaggattagcacattcaaggaactagaagaaagccagtgacatacagaataagagagaataacagattactctggccgttaggagactgagagggtcttccacttaggaagcttttgcagttgttcgaccrtaagatgatggaggctttgacaagtgtggtggtgaagataataatgggtagacaaatgtaagaactattgaagagattgacagacttactaatgtaatagatatgggaggacaggaagagaaaagtctgtatttttatgggtgatttatgggcttctggcttgggcaaaagaagggctggtattgtgtgaagattgtaaatttggaatttgtttttttcttgtctttattgagtatatataaaaacatatttataaaatatgagtatgatagaaagtataataaggcaatgagccctctgagctatccctcaggttaagaaaaagaacaatgtgtttatctttgaggttccctctgtgcccttcactattccatcccattcctttttcctttggaagtaagtactatttggagattgcttcattgtctactttgctttctaatgttgtcagttttatccctaaactatcttctttagtttcccatgcttgttaatgttatataaatcattctgtaggtatttttctaaacttactttttgtgctcaacattgcactcctgaaaaacattcatatgatacctggagctataatttattttttctcaattatatagtaatatagtagggacataccaaaattttaatttttgtcgatggtgggttttttttttgttttcgtttttttttttttttttttttktktgkgkgtcagggtctcactctgtcacccaggctggagtgcaatggtgcaatcatggctcactgcagcctcaaattcctgggtgtaagtgatcctcctacttcagcctcccatatatctgggactacaggcttacactaccacacctggctaattaaaaaaaaatttttttatagttaaggtctcactatgttgcccaggctagttttgaattccaggacacaagcaatcctcctgcctcagcctcccaaagtcctgggattacaggcatgagccactttgcctggcttgtgaagatttttaattactgaatagatttccttaatggtaattctaagtttatgtatttcttcctaagttttgttaatttatatttttctacataattgttcatttgctataagtttaatgttttggcattgtatttcttatattctttttttagttgctcccctatcttcattcatagtagtatttatgcattttctatttttttctagtttattcttaccagatgtctgtcagtttggaaacaaaattttactttaattcttttcattttgtttttatttaacccacagtgttcagaattacacattttttactctactggatagcagttcctcaactgtagccattatctttcaacttcccaatttatgttcttcctaacctgtattgtacttaacacaatattttcatggaattcaccttacttttttttttttacttaaataagtatatttatgtatttatttatttatttatttatttatttatttagagatacagtcttgctctgttgcccaggctggagtgcagtggtgtgatcttggctcactgcagcctccacctcccaggttcaagtgattctcctgcctcagcatcccgagtagctgggactataggcacatgccaccatgcccagctaatttttgtatttttagaagagacagggtttcaccatattggtcaggctggtcttgaactcctgacctcttgatctgcctgcctcggactcccaaagtgctaggattacacacgtgagccaccacgccctgccatttattttattttatctatctatttatttatttttgagacagagttttgctcttgatgcccaggctggagtgcagtggcgcgatgttggctcactgcaacctcaaccttttttgttttcaatttttttacttttgtagagaaaagatctccctgtgttacctgggctggttttgatctcctrgctttaagcaagcctcctgcctcggcctctcacagtgctgggattacaaacataagccactggtctcagcaccataaatacatttataatgaaggaaaaaaaggcatgttgggagaaccaaaaggatagacaagtggttaacgcttagaaaggaagtggaaacggtgctagatgaggctgggaaggtatgcagggccagttgtatagactaaatagtgaacatgaaatttcataaataatcattagtgaatatttaacaagaatagctgagcatttaccctgagctcagtattcaagagctttacagatagggactcatygagtcctcacaactaccctttggttagacagtgttttcctattttacaggtgatagtaatgggcatctgacatcaaaggctaaatgatttgtcaagaccgtacagctggagtcaatgacagagccaggattcagactcatgtctgtctgaatcaagtgaccaccacccagaattgatgcagtccatattctgggactataactgtgagacccagactcgggagggagtaggtgaagagggtgatcattasgaaaggggcaggtttgatgtcagggagtatggcttggtaactgttcccgtagtccacatgaggtgtagagggcctgaagtaaatcagccagcctggagaaggagatcgcatatcartatgttgcacaagaggcataagtggaacttggccactgattctttttctgtccctaactttgcctaacacagtgacctgtgtaagatgtgttgttttggttttaactggaatgggtcatctatacctcttgaattcagattgatgtgtaggggaacaaatgcagactttggatccagaagacctggatttaaattcttcatctatcgctaataggtatatgcctttgggctagtccctaagcttcagtttccttgtaaatggatgtgataaagagcatttgtaaggactagacataataggaagtgcttgcagcgttcccttgaccctatatgtctgtctttacgctattaccacactgtcttggtcattgtcactttagagttgaaatcaggtaatgttctccaactcttacatcaacagttactctttttctttcctttttttttttctttgagacggagtgtcgctcctcgctcaggctggagtgcagtggcgcgatcttggctcactgcaagctccgcctcccaggttcacgccgttctcccgcctcagcctcctgagtagctgggactacaggcgcctgccaccacgtccggctaattttgtttttgtatttttagtagagatggggtttcaccgtgttagccaggatggtctcgatctcctgacctcgtgatctgcccacctcagcttcccaaagtgctgggattacargcgtgagccaccacgcccagcctacagttattctttttcaagattgctgcagcaatcttgttatagctgcttctgctatattacagttataactattgctagtattaacattagtaataagagacccataaagatgggtcaacatggccaaaactggctttttttttcctatcacactcactcactttcctgtgttatccaccttgcataatgttaccatttgcccaggtgtctgagccacagacctgagagttgtgttcagctgttctttcctcctcacccagcctctagccttgcaggacttgtctgttacctctttgtatgtgctgccctttatgcagaatgattgttcctcttccaccctctttcacctggacttgcccattcaggaggcctgatctgattctcccagttaatccctcttgcatctcatatctcatagcacggtgtgtgtccctctgttgaagcacagttgttttgtaattagktgtgtgtctgtctccaccaccagcctccatgctggaattaatgttgattgtatcctcagaaaacaacagatagagttcaggcttgatgaaagtttattgaattgtggggtcataaatctagtcttcagacttcccctccactatctctgttgtccacctgtgagaattcagaatggcaaatacttcttcccaaaaccatacaccctggttgctgcatcttatcctgaggagagatcggccaagttacaactgaacatgaaagtttatggcttgaaatggagcaacggaagtgtaagataagggaatttgagggaacagagtacatgtaaagaggtacaagtcttcacagtgagattttgttgccctacaaccttttctggggaagaatgggcatcctcagtggggatgtaagaactcatgtattcaaagcttcctggatcctctgctttgacattgagcagtgatatggttaggctccgtgtctcatctcaaattgtaatgcccacatgtcaagggagggacctggtgggaggtgatcggatcatggaggcagatttctcctttgctgttcttgtgatagtgagtgagttctcatgagagctgatggttttacagtatggcacttcccccctcgctcgcttgctctatcctgccaccgtgtaagatgtaccttgcttccccttctccttctgccatgcttgtaagtttcctgaggcctcccagccatgtggaactgtgagtcaattaaatctctttcctttataaattactcagtctcaggtattctttatagcagtgtgagaatggactaatacaagcagcagttgaagattagtagcagtaaaaggaaccaagttagtcccaacctgttgctaccaccactaccatcatagctaaagagatagactggccaggcacagtggcttacgcctgtaatcctagcactttgggaggccgaggctagtggatcatgaggacaggagattgagaccatcctggccaatatggtgaaaccccgtctctactaaaaatacaaaaaattagccgggtgtggtggtgggcgcctgtagtcccagctactcrggaggctgaggcaggagaatggcgtaaacccaggaggtggatgttgcagtgagccgagatcgcgccactgtactccagccaaggcaacagagcgacactccgtctcaaaaaaccaaaaataatagattgaaataaaacgggcagctgttggtctaaagccaaggtatgagaagcatggcagctctgctgtggtccctgtcctgtgagccaggtgaatctcatcatttcagaagttctctctttagccttaaagccactacatcagcactgttactgctttatccagcccctcagctttcaggagcattgttccataggtcattgcaggctgagtgcttcttggtgggattagttctgctgcctctaccacgtaggtaatgcctttgttccagactgtcagttgtttaattgggaagagtgtttgcttcttgctgcactaggtctgagctggatccctgagttttgccaggttctaatcttgcattttctgtatcccattttcaggaagatctcttagctgtttgttcttctaggatacagttgaggacagagttgcaggaaaatgtgatggcccaaaagaaagcaggaaggaaggaagagagggcttctagtatagagtgatctctgctttcacctgcaggtcactgctgaaactcaagagaaagaagacgttatcacacatttgcaagagaaggttgcatccttggagaagagactagaacagaacttatcaggagaagaacacktgcaagaactcctgaaagaggtaacttctgttctctttgggctggctggtrttggaaaggcagggttgattctggtgacttcacaattcctagagtttcagagctgtagggccagcaaacagcatggtaacaaaagaagtgtctccaactttggcttgtyctgcttacatcagaaagagccttatgtcccctgtgggtgacatgcttttctcagggaaagggagagctgtattcagagatacatacaaacrgatagcatctcatcaccaataaaccacacctagtgatttccgccacttgggctgccttgtctttctgcactgccctcttccccaccattttgtactctgcagtggccaaggtaaatagctacatctgccccttggcaaaagcaagaattaccttgggcagcattctctccttcccaagggaggctgttgtgcagactggcctcttccccagtggtgcaagggaactttctcatcaggctgagctcattgtctgcacacattctgctcttccctctctttctgttccagtgattggccacactgtgacaaaggtgacaaagcccaggtcatgaggctcctagattagaccctccctttctttcttcagtcagtttcaactaaatacctccatctccagtgccactggttgtacttcagggtttccagcaaatctagcctagtctatgttagaagtctccagattggcctacccagcatcagtctctcttccttcactctctgacacagtctcccacgctcactgccaaactgatcctcctaatcagcactggtgaccatatcackctcttaaacatcttctacaattcccttcaacagtctacaggaagtgtaatgtgggttctagggaataaattgatttctagaatcagaatgtccatgcttgcattttgcctcttctgcttaccagctttgacttggagcagcagttcccaaccsttttggcaccagggactggtttcgtggaagacagtttttccacagatggggtcaggttgggtcgggtgagggggtggtttcagaataaaactgttccacctcagatcatcatcgtccctagattctcataaggagtgtgcaacctggatccctcacttgcacagttcacaatagggttcatgctcctatgaaaatctaacaccaccactgatgtgactggaggcagatcttaggtggtagtgcttactcaccactcacctcctgctgtgcggcctggttcctaacagactgcaaggtctgtggcccaagggttggggacccctgacttagagcaagtaatttaatctctttgtgtttgcttcctccccaataaaattggttttattatactattaaactcagaattgttgttagggttaaataagttacaatatgtgaagtgcttagaatgataaccggaacagagtagggtctcaatgtatgtcagctgtaaacatgatcaatattattattgtgccatcatcattattataatgtttaatgtgcatagaaattacttgggaagtttgtttaaagtatatatctctaggccaggcgtggtggctcacgcctgtaatcccagcactttgggtakccgaggcgggcagatcacctgaggtcaggagttcaagaccagcctggccaacatggcaaaaccccgcctctattaaaaatacaaaaattaggccaggcgcggtggctcacacctataatcccagcactttgggaggccgaggcgggcggatcacaagatcaggagatcgagaccatcctggccaacatggtgaaagcccgtctctactaaaaatacaaaaattagctgggcgtggtggcacatgcctgtagtcccaagctactccggaggctgagggaggagaattgcttgaacctgggaggttgcagtgagctgagatcatgccactgcactcctgcctggtgacagagcgagactctgtctcaaaaaaataaataaataaataaattagctgggcatggtggcgggtgcctgtaattcyagctactcaggaggctgaagcaagagartcacttgaacccaggaggcggaggttgcagtgagccaagatcgcaccactactttccagcctgagcgacaagagtgaaattccatctcaaaaataataaataagtaaataaagtatatatctctggccctaccctcagaaattctgatttccttaggcttggagcaaggcctcaaatctgtgcaactagctgagattaacaactatctcagtaacagctatctcagctaagtctacatttctttttttttttttttttttgagacggagtctcactctgttgcccaggctagagtgcagtggcgtgatctcggctcactgcaacctctgcttcccggggttcaagtgattttcctgcctcagcatcccgagtagctgggactacaggtgcacaccaccacatccagctaatttttttgtatttttagtagagacagggcttcaccatgttggtcaggctggtctcgaacttctgacctcgtgatctgtccacgtcggcttcccaaagtgctgggattacaggcgtgaaccaccgctcccagccccatttttttttttaagacagagtctcactctgtcacccaggctggagttcagtggtacaatctctgctcactgcaactccgcttcctgggttcaagtaattctcctgcctcaacctcccaagtagctgggattacaggtacccaccaccacatccagctaatttttaaaatatttttagtagagatgggatttcaccacgttagccaggctggtctcgaactcctgacctaaagtgatctgcctgcctcagcctcccaaagtkctgggattacaggtgtgagccaccacacccggcctagaatttctactttgaaaaatgttgcttacagaatcaagttctaactcctttttgcaacattcaaaagcttctcatgagctggcccttttgcctatctttctagtcttgttttttgacctaaacccatcatcattttggcttctgaggagtagtagttccctcaaygtagcaggctgttcacatagccgttggtcatccccctgcctgggaggctccctgaaccctaacgactttgtgagttctaaagctgcctacctgccctgtggcagggagtatctcccaycctgtgcttcttcctctttgtggacacttactgtactctattgtgtaattttttattagtcttttgttccagcctcaaggtcaagggactatttcaaatttatctgtgtgtactttatgatatgtgaattatttctcaattagctgaattattaaaaatgtattcatgtctcttgtgcctagcacaagtcacaatatgttgtagataatctgtaaatatttattcaactgaggaatgatagtcttcttttactcttctttcaacttacagaaaacayttgctgagcagaatttggaggataccagacaacagctcttggcagccagaagcagccaggctaaggccattaacaccctggagactcgggtactgaccttactcctggtgtttcctaagtttgggtggtaacctggctgaatggcaacatggtgtgactgagaatcttcttggtcagagttttttcactagaagggattatttttggatcttacctatacagggatgagttagtcattttcttcatccttgtcacattactatgattgagttatatgtttatttatacccttttatccccattggcctccctcccataggataccattccgttgtggttcatatagatgctctttttgttgggttgyyttaaaatatgtagcactgggtttttaatttctgtaaatgatgcagctatgggtatgttttctctattacttttagctgcctcaacttctgtctgtacccacttcattgtactttgtagttatctatgtggtagacatccagattgcttccttcttcctgccacctcagatcatgcataaaacctaaagagactaagtactataggagaagattgttcccagcaagcctgcacctggctctcctcctccagcatgcatgagcgttcctatatatgcmtttctgacttttccagcattggcatttccaagcctttacaatttttgccagtttactgagtgtsgagtggtatttcattgctttaatttgcattgctatggtgattaatgagtttggccttgtcttcatgtgcctgttaattcctgggggtttctgcttttggaattgcccattcatatcctttccttattttctttgggggtttcagtcttttcttatttggtttgtaggatttcattgtatattcttgttcctaatgctttatcagtttcagtcctgagtcattctgttaactttgtccatgtatcctttgttgaatagactttcttaagttcagtgttaccagattcatcacatttttgctgtggagtttgaagttccatttagaaaatctattcctgttcctaagtcacagagatctactgttttttccctattaactttataatttttccttcacataataaatctctaattcacttacaaactgtctttctgtatggtcttaggtagggatctaaatatggagaaattctgcatatttctcaaaatcatttactaaacagyctgtcctttctgaattgattcctcttgctaactttatcacgtattgtttcygtctgcacatgggtttgtctctgcattctctgtccattggtctgattgtctgctcttgtgtaaacactacaatgtttttattactatagtgatatctgtactatatctcaacacccaataagacaaattctctttttttttcaaaggttgactttaactatttatgggcctttaaaatttttaagtttttgagttactaaaaaattcaacttgaatttttattgggattgcattaaatgtataggctaattgggaaaaattgtccattttataatattaattattccttctaacaatgtaaatatattccatttattcagattattttctgtgtgttttattaaaattttacatttttctcaatagatgtcttattttcttgcctaagttgctaattcctagaaactttagagtttgtgttgatactgtgatggtatcttttttttcttttgagacagagttttgctcttgtcacccaggctggagtgcaatggcacaatctcggctcactgcaacctccacctctcgggttcaagcgattctcctgcttcagcctgccgagtagctgggattacaggtgtccagcatcacrcccagctaatttttttatatttttagtagagacagggtttcatcatgttggccaggctggtctcaaactcctgacctcagatgatccgcctgccttggcctcccaaagtgctgggtttataggcgtgagccaccgcgcccggcctgtgatggtatcttatttttaatctttctttttttttgagatrgagtctcactctgtcgcccaggctggagtgcagtggcactatcttggctcactgcagcctctgcctcctgggttccagcgattctcctgcctcagcctcccaagtagctgggattacaggcacgtgccaccacgctaagctaatttttatgtatttagtagagacagggtttcaccatgttgaggctggtctcaaactcctgaccttaggtgatccgcctgccttggcctcccaaagtgctaggattataggcatgacccactgcgccaggcccttatttatttatttatttatttatttatttatttatttatttattttttggagacacagtctcactctatcccccaggctagagtgcaatagtgccatctcggctccctgmaacctccgcctcccaggttgaagcaattcttctgcgtcagccttctgagtagctggaattacaggcacgtgccaccacgcccgactaatttttgtatttttagcagagacggggttttgtcatgttggccaggctggtctcgaactcctgacctcagcctcggcctcccaaagtgctggaattacaggcacgagccaccacacccgaactttatttttaatcatatttataattggttatttctggttattctagagaactgccattttttaaagttgatcttggatatcacacccctgctgaactttcttactctactactgtgtgatttttttgttgtttttcttaggtagataatcatattatctatgaaaaaatgacaactttatcttactccttccaatcttcccacctcttattccattttctgttcatatagcattaaagacctccagactgagtgaagcaataaaagggttagtgggaatctttgttttgttcccagtcttaaaggaaatatgcctaaagtttcattatttggtgtaacatttgcaggtttttggtatgtatgtatttatttatttatttatttgaggcagagtctcactctcatccaggctggagtgcagtggcatgatctcggctcactgcaacctccgcttcccaggttcaaacaattctcctgcctcacccacccaagtagctgggttaaaagatgcctgcctccacgcctggctaatttttatatttttagtagagacggggtttcactatgttggccaggctggtctcaaactcctgacctcaagtgatccacccatctcagcctcccaaagtactgggaatacagcaccatatatttatttatttatttatttttattttattttattattawttttttgagatggactcccgctgtatcacccaagctgtagtgtagtgtcctgatctcagcctaccacaacctccgcctcccaggcacaagcgattctcctgcctcaacctcccaaagagctggaattatgggtgtgtaccaccacacccggctcatttttttttttgtatttttttaatttattttattttatttatttttttttttttgagacagagtctggctstgtagcctgggttggcgtccagtggtgcaatcttggctcactgctctctctgcctcctgtgtcctggttcaagcagttctcctgcctcagcctcccaagtagctgggattacaggcatgtgaccatgcccagctaatttttgtatttttggtagagacaaggtttcaccatgttggccaggctggtcttgaactcctgacctcgtgatccacctgcctcagcatcccaaagtggtaggattacaggcgtgagccactgcgcccagcctttttgtatttttagtggagacggggtttcaccatgttggccaggctggtctcaaactcctgacctcaagtgatctgcccacctcagcttcccaaagtgctgggattacagatgtgagtaactgtgctggccaatttgtttaatttcttgaattgaatatttatctcatttttaaaatctttcttatttcctgataaatacattttaaactatatttttctgaaaagactgttttattataatttcaattctgtttctgaatatcctttttgatcagtgtacattgtcgtacaaccatcaccaccatccatctccaaaactttttcatcttcccaaacagaaactctatacttattaaacagtaactccccaattcctcctaccccagtctgggaaccaccattctattttctgtctctttgagtttggacactctagatacctcctgttggtggaatcatacaatgtttgtccttttgtgtctggcttatttgacttagtatatrcatcttcagtgttcatctatgttgtagcatatgtcagactttcattccttttttttttttaacagaattttttttttttttagaatttttttgagatggagtcttgctccgtcatcaggytggagtgcagtggcacgatctcggctcactgcaacctccgcttcctaggttcaagcaattcccctacctcagcctcccgagtagctgggactacaggcgcgcgcctacaggcacgctccaccacgcctggctaattttttgcattttagtagagatggggtttcaccatgttgaccaagatggtctcaatctcctgaccttgtgacccgcccacctcggcctcccaaagtgctgggattacaggtatgagccactgtgcctggcctattcctttttaagactgaataatattccattatatgtatagaccacattttgtttctccattcattcattgatgaacacttgaattccatttgtcttttttttttttttttttttttgkkctttttctcccctttttgtggagaacagggtctccctatgttgcccaggcaggtctccaattcctgggctcaagctatacctttgtttccctaagtgcttggcttgcargcacgagcccccgttctgtaagcccagtacttagggaggcaaaggcatagcttttttttttttagacaaaatctcgctctgttgcccaggctggagtgcagtggtgcgatcttggctcactgcaacccccaccccgcaggtttaagcagtttttgtgcctaagccttctgagtagctgggactacacatatagaccaccacgccttgtatttttagcagagatagggttttgccatgttggccaggctggtctcgaactcctggcctcaagtgatccacccgtcttggccttccaaaatgctgggattacaggcataagccaccgcacccaacccacacccagcttttgatggacatttgcgttgtttctatcttttggctgttgtgaataatgctaccatgaacgttcctgtacaaggtttttgtgtggacttagtgttttcatttctcttcagtgtatacctaggaataaaattgcagggtgatatggtaactttttctttaatctcttgaagatctgaatctatcttgaacttggcttctaaattgagacttaggtattttctgatctcaggagtgtaaaacaacgtcttagttttggcgctaccaccaataaaatttgcagtcatgagctagtaacaatcctgttcttctccgtggactagtagcccctttctcatgggattgtttcggttaaatctaagatgtgaatgtatgtgaggagcctaggccttaaaaacgtcctctccttggctggacacggtggctcatgcctgtaatcccagcactttgggaggctgaggcgggcggatcacaaggtcaggagatcgagaccatcctggctaacacggtgaaaccctgtctctactaaaaatacaaaaaattagctgggcatggtggcaggcrcctgtagtcccagctactcaggaggctgaggcaggaaaatggcgtgaacccaggaggcggcggagctttcagtgagccgagatcgcgccactgcactcaagcctgggcgacagagcaagactgtctcaaaaagaaaaaaaatcctctccttgtgtgtctacctctccttcaccaagctgcatacagccttccttgtgcttatgtttaataataaagctccccagctgggcgcggtgaatcacacctgtaatcccagcactttgggaggccaaggcaggcggatcatgaggtcaggagatcgagaccatcctggctaacacagtgaaaccccgtctctactaaaaaatagaaaaaattagctgggtatggtggcagttgcctgtagtcccagctactcaggaggctgaggcaggagaatggcgtgaacccgggaggtggagcttgcagtgagccgagatcatgccactgcactccagcctgggcgacagagcgagactccrtctcaaaaataataataataataataaagctccccaaggccagaccttattcagtaaataagaaggctttctaagagaaattcatagatgtagcttgaatctggtaaaactgccatcttggagagccaagtgcaactcagtactagacagtgagtccctgagggccagtctacatctgtcccactcacggcactggcctcgtgcccaggtgcagttcctggtatggagtcagtcttgctcagtatttgtggaatgagtaaatcctgaatttgtattgtgaacagtaattccacttcaaggaatctgtcctaaggaagtgattcaaaccagttaaaaaaatactgtgtgtcctggccaacatggtgaaaccccgtctctattaaaaatacaaaaattagcaaccaggtgcggtggctcatgcctgtaattgcagcactttgggaggcsgaggtgggcggatcacgaggtcagcagatcgagaccatcctggctaacatggtgaaaccctgtctgtactaaaaatacaaaacattagctgggtgtggtggcatgtgcctgtagtcccagctactcaggaggctgaggtaggagaatcacttgaacccaggaggtggaggttacagtgagccaagattgcactactgcacgccagcctgggcaacagagtgagactccatctcaaaaaaaaaaaaaaaatagctgggcgtggtggcrtgcgcttgtagtcctagctacccaggaggctgaggcaggagaatcgcttgaacccagcaggcggaggttgcagtgagctgagatcacgccactgcactccagcctgatgacagagtgacactccatctcaaaaaaaaaaaaaaaaataggccgggcatggtggctcacgcctgtagccccagcactttgggaggctaaggcaggtggatcacgaggtcaggagatcaagaccatcctggctagcacagtgaaaccctgtctgtactaaaaatacaaaaaattagctgggcatggtagcgggcacctgtagtcccagctactcagaaggctgagggaggagaatkacgtgaacccaggaggcggagcttgcagtgagtggagrtcatgccactgcactccagcctgggcgacagagcaagactccrtctcaaaaaaaaaaaaaaaaaaatactgtgtgaagatgttaattgctgcattcttttagatgggaaaaacagaaagcctaagtaggcagcacagtaggcaaatgggtcagtaaattacaaaacactctagaggaaataataatctgaggtctaaagattacatggagacagaaggacatttaagagtagggaaaagatacaaagttttacattgtcctattaaaactttatataaagctataaacaaaagtcattaaaagagagtttaagaaaatacgttagaatgctagtgttttataatggtagacttatgcagtatcttttttctcaggttacatttttctataatgtacctgttttatttaaatcgctttgcattttaaagccatttgttaccactcttcagcttcttgtgaacagaaagaatgcttctgcttccctctcaggtgagagaactggagcagaccttgcaggcctctgaggagcagctccaacagagcaagggcattgtggctgcccaggaaactcagatacaggagctsgtaagtgcttattggagctgctgcattccaggcccttaatgctttctctccaggcctttgcagatgctccaaactcattccgaacttcggcaacggtacctggacctgcccatagatacagttcttgtgctggatgtgagcaggccrgcagcagggggtggagggagtcaggacctaatggtsggcctgagttacctgggaggtgcaccagcagctcctttccaccttacatcccaccttctggtccagcctggtcctggggctgtcagaggtggcagctccgctaggagtcaagcctcaacttgmaatcaggggcggggagaacaagtccagactctggggaggatggcctgtgatgacaggccaagcgtggtgtggagttagaagatagggaaatcaaaccagccagcgtgtatttcatattcgccatgtcccaggcactgtgctcagtgctatgcacgtgttttcgtttagtccttgcaggagacctgagaattatgcactgtcatcctcatcctgtagacgaggcaagctcagaaagattggctcagtagcccacaggctcgcagccagtaaatggcagaatccacatctttctcctstcaaagccctgttcttcattgctgtattatactgcctccccagtataatttctccccagggaaagccgcagccactgaggcaacactgagtagtgtgaaggaggcctgtgtctaagggctggctggtgcccagagctgtccccacacaccttgaggatggagtgatgacatcaagactccatcttctggacaggccagggtccaggagcaacaggcagagcctgcaggggggacctcagcaacgccaggggggatggggtcaggagagagttgtttctgttggatactcatcttctcacctagggccagactaagatcccccactggaaaccattgtcaccctgactgaccgtcctttggtctccccgcaggctgccgccaaccaggagagcagccatgtgcagcagcaggcccttgctctggagcagcagttcttggagcgcacccaggcgctagaagcccagatagtggccctggagagaaygcgggcagctgaccagaccaccgcagagcaagggatggtgagtgaagagctaagagagggtgggcccaggagcaccagggtcccccacagcgaagtcagcctcgtgcttgacagtgtgkcaccrcctctgcactaggaaaccactttagaaggcagctttttttttgtttgagacagggtctcactctgtcacccaggctggagcacagtggcatgattacaactgactgcagcctcgacctctcagactcaagtgatcctgccacctcagcctcccaagtagctgggactacaggcgtgcaccaccacagccagctaatttttaaattttttggagagacaaggtctcactgtgttgcccaggctggtcttgaacgcctaggctcaagggatctgcccacctcagcctcccaaagtgctggaattataggcatgagccaccgcacccagccgagagcagttcttatctttccagagacacctgctcatgagactggatgtataaaggctgctttttataaaacaaaacagatgggttttctttttccttggagtttccacagagacttcctactttctgaccagtcccctctgcttcttcccattggcttttaaaatgtatattgttcctccctatgccttcttcctggtccatgctccctgtgcccagggaaatatggtagtgaagacttcttttatatgtgttcttctgaattggcagagacaactggagcaagaaaatgcagcccttaaagaatgcaggaatgaatatgaacgttctttacaaaatcaccaatttgaactaaagaagctgaaggtatttatctaattgaatcaaagtttcataaaagtgttcatgttttctacatgtgtatttacagtgccccacttctcatacttacagtacaggaggaggagaattagcatttgttcaatagttctgttaggcatcggccagaaattgccacttcattaagttctctcagggatccaggacagtaggaagaattacattcatttggcagttaatgtcattgaggttccgagggtaaaccgtttgtgcaagttgcatagttggttagaggtgatgctggtctgacttcaccctaccacagaggccagcccttcctctgtggaatcaacagctgcttgaaagtcatgctgtcaaaacactgctcttgctgatatttccagggagaccttaaagcaaggccttaaaagatgataaggacctttsttttgcttgtttatatcagggaccatgtacagaaatgaagaaacaatctgctggattgttaaactttctcttctgcaaacttggagctttaatcagaggatgcctctttcattccctaaacataactggataaaaaggaggaamgattctgtcactttcttatatgcccccagactcccgtggcccctttcaaagcamcttggataatgggacattgtagtacttgcccagcttggtcatgactcaaagatcttattgatcccttggcagcagtcttctctgagagtgtccatagatgaatgcctgcacctagtaagcttccagtaatcagatctgatgagtgacataggtactaatgtagtagcattgcatcatgagaagcatggactttggagtcagatttttttttcatgcattccttcaataaacatttgagtcctgtaagtgccaggcatcactgtaagtgctaggatgtattaaatagcaatgagccagtgcggtggctcacgcctctaatcctagcactttgagaggccagggtgggtggatcacctgaggtcagaagttcgagaccagcctggccaacatggtaaaaccccatctctactaaaaattcaacaattagcctggtgtggtggtgtgcgcctataatcccaactgggaggctgaggcaggagatttacttgaacccgggaggtggaggctgcagtgagccaagatcatgccactgcactccagcctgggtgacagagtgagactccgtcccaaaaagtaaataaataaaataaaataaatagcagtggaaaaaataggtaaagttcctttcttgtggagtttgtaactagagatggtaaccaagttacaaattaacaataaatgctatgaagaaaatagagcagggcaaggacagccaatggggaggtgggagaggagaggtctcttttccatatggagttagggaaggctttgatgctggcagaagggcctacaatgtgaatatttgaggagraatattctagactgaagaaataacaaatacaaaggctctgaggcaggaaaaarcctagtctgttcaaagaatagcacagaggccagtgtggctgcagctagtggccaggggagagcatggctggtggtgaggcgggacacaggcattaaaaagaatcatgggaagccctggcaggtctttttttttttgagacagggtcttgctctgttgcccaggctggagtgcagtggtgtgatcacagctcactgcagcctcaacttcccaggctcaagcaatcctcccacctcagcctcatgaataactaggactacaggtgtgcaaaatttattaatttttcttttgtagagacagggtcttgctatgttaactaggctgattttaaactcctgtgctcaagcgatccactggccttggcctcccaaagtgctgggattacaggaatgagccactgctcctaaccagctatggcaggtcttaagcagataagtgatgtgagaagttttgttttaaaaggatttctctggctgcctgtgaagaatgtttggtaagggaggcatgagcagaagcaagaagactgtttaggagactttttaggaatctaggccagaagtgactagcacattagtggtggacttgggaagaagtattcagatcaggatttattttagagatagagctgttttgtttgctttttgttttttgtatgtgagacggagtctcactttgtcgcccaggctggtgtgtagtggaacgatcttggcctactgttacctcaacctcctgggttcaagcagttctcatgccccacctcccaagtagctgggactacaggcacrtgccaccatgcctggctaatttttgtatttttggtagagacagggtttcaccatactggccaggctggtctcgaactcctgacctcaagtgayccacctgcgttggcctcccaaagtgctgggattacaggcgtgagccaccatgccctgcctgagatggagcttttaggacttaggaatgagaaaaaaataggaattgtagatgacacctaggtttggtttgtataactcagagtttctccacctcagcgctattgacgtttgaggccggatggttctctgttgtagaggttctctgttgtggatggttctctgttgtggatggttctctgttayagagggtctctgttgtggagggtctctgttgtggatggttctctgttgtgggtgggtctctgttgtgggtgggtctctgttgtggagggttctctgttgtggagggttctctgttgtggagggttctctgttgtggagggtctctgttggggatggttctctgttgtggaggctctctgttgtggaggttctctgttgtggaggatctctgttgtggatggttctgtgttgtggagggttctgtgttgtggagggttctctgttgtggagggtctctgttgtggatggttctctgtcgtggaggctctctgtcgtggaggctccctgtcgtggaggctctctgtcgtggagggtctctgtcgtgggtggttctttgttgtggagggtctctgttgtggatggttctctgttgtggagggtctctgttgtggagggtctctgttgtggagggttctctgttgtggagggtctctgttgtggagggttctctgttgtggagggttgtctgttgtggagggttctctgttgtggagcgtctctgttgtggagagtctctgttgtggagggttctctgttgtggagagtctgttgtggagggttctctgttgtggagagtctctgttgtggatggttctctgttgtggagggttctctgttgtggagggttctctgttgtggatggttctctgttatggagggttctctgttgtggagggttctctcttgtggatggttctctgttgtggatggttctctgttatggagggtctctgttgtggagggtctctgttgtggagagtctgttgtggatggttctctgttgtggagagtctctgttgtggagggtctctgttgtgggtggttctttgttgtgggtggttctctgttgtggatggttctttgttgtgggtggttctctgttgtgaatggttctttgttgtggatgggtctctgttgtggakggttctctgttgtggatgggtctctgttgtggatgggtctctgttgtggagggtctctgttgtggatggttctctgttttggatgggtctctgttgtggaggttctctgttgtggaagttctttgttgtatttgctgcaaatatgcatgataagatgcttaggagcatctacccactagatgtcagtagcagccccacttaggacaaccacagtgtctccagacattgccaaatgtctygtgggggcaaaagcactgctggcagagaaccactggggtaactgaatgaatagggtacgtaccattcactgagatgggggtcctgggaggtatgtcaagagtggattccattttgggcatgttgagcttcagaggcctacccaacaggcatatctagtagtctgtaggctgacaagtctggaaaattggagcagattctgagtagacatataaattaggaagcctgtgtgcctatagttccagctgcttgggagcccaggaggcggagcttgcagtgtgcaagatcgtaccactgcactccagcctggatgacagagcaagaacctatttcaaacacacacacacacacacacacacacacacamaaaactttaaattaggaaaccatcaatcagcatagctcataggcaaaattacagccaaatggctatcaatgagtgcagatagaaaagaggccaaaatgaaggccagggccacacccacaagcacaggctcagaacaaaaggaggggccgacagagaagacgccaaaggagccgcaggtagggtagcagtaaaagcaggtgcatgtggggctctggaagtacagggcagaaagcgctacaagaaggattgagtagtgaactctgtgatatgctgccaactggtcaagaaaggagacaaagagctgaccattagatttgacgagactgagtttgttggcaacgctgggaagaatagtcaccgtagagtcgtagggaatatggttgacgagagcaggttaaaatgagactagagagatgcttccacttgcagtaaaggcaaactaggtaattcagaccagctcacctgaggactcccagaaaaactggccaaaataagagaacatctgcttgtaggagcctacaggactgaggaatggcccatcctgcccagggacgggagtccagcatgcaaagcagcttttgccgtggtggtatctgctgatcctgaagaggctggaagtttatctaagtttttcatagtttctcagagttaggggaataaaatttggagtttaaattttattaaagcttggatccagcctgggagatcctgaaagctttggttaggcacaccacaggactacacgctaggagtaagcttgaacgggaagtaaccagcaccccatctgcaccccgcccccagctttgattgcactaactgaaggacacggggtggcccaggaaaagcccattagctaattttggattaaaatgatcccaggttattagtgctcctgggtgactagaaaaaacaaaatcaaagataggtaaacaaaaatacaaaacaacacaaaagaaacagactcacaagggctcagatatcatatgcttactatgtttaaggagataaaagacaaaatttaaaatttcagcaagatgtggaatagttctattattatagttatgataaaagacagcagttttaaaaaaggaatcaaatagaactttagacctgaaaaatagaataactgaaattaatacaataaattacaaaaggacaggaggaagctttctgggggatgggtatttttactatttttattagggtgatggtttcatcacagttcatcaaggcatacacctgtagtcccagctactcaggagactggggcaggacgctctcttgagcctagaaggtcgaggctgcagtgagctatcatcacaaactggactgcagcctgggtgatagagcaagaacccatttccaaaaacataaaaatttaaatgtaaacatatagaaaactcttatatgtttacatttaagaaatacactttcttttttttttttttttgagatggaatttctctcctgttgcccaggctggagtgcaatggcgtgatctcggctcactgcaacctccgcctcctgggttcaagcgattctcctgccttagcctcctgagtagctgggatcacaggcatgcaccaccacactaggctaattttgtgttttcagtagagatggggtttctccatgttggtcaggctggtctcgaactctcaacctcaggtgatccgtccacttttgcctcccaaagtgctgggattacaggcgtgagccaccatgcccagcctgaaatacactttcaaataacccataggtcaaagaaaaaaatcacaatggaaattttaaaatattttgaaataaagttgggcacagtggctcacacagtgagctgagattgtgccattgcactccagcctgggtgacaagagcaaaactctgtctcaaaaaaataattataatattttgaaataaatgattttgtaaatactgtggatcaaaattggtcaagtataactaaagcagtgcatggaaggaaatttcagtctcagtggcatctcttaggaagaaagcctgaaaattgagccatgtatgcatctcaraaagtcagaagaaggcacaaatcaaactcaaggaagaaataacaaatataagcacagaaattaatgaaatagaaaataaaatgggcccggcgtggtggctcacccctgtaatcccagcactttgggaggccaaagcggatggatcacatgaggtcaggaattcaagaccagcctgaccaacatggtgaaagtccatctctactaaaaatacaaaaattagctgggcatagtggcacatgcctgtaatcccagctacctgggaggctgaggcaggagaattgtttgaacccgggagtcagagattgcagtgagctgagatcgtgccattgcactccagcctgggcaacaaaaatgaaactctgtctcaggaatgaagtgaagaagggagggagggaggctgggcgcagtggctcaaaccagtaatcccagcattttgggaggccaaggcaggtagatcacctaaggtcaggagtttgagaccagcctggccaacatggcgaaacccggtctctactaaaaatacaaaaattagctgggtgtggtggcacatgcctgtagtcccagctactcgggagsgggaggcaggagaatcgtctgaacccaggaggcagaggttgcagtgagctgagattgcgccattgcactccagcctgggaaacaagagagaagctccatctcaaaaaagaaaaaaaaaaacaaaagaatgggaccctctcatagtagcgaggactgctgaagcctgaggtggattatttgaaggtgaataaaatcgctaagctctgggtgagacagatcaaggccatatttagtttaacagtctacttgttccatcagctactaagaagggtgtgctcagtcttccactacgatggtagatttgtctctttcttcctttagttctgtctgtctttgcttcatgtattttgaagtgctgctattaggtgcacatacatttagaattgtttttctccatccacgctcttcaaagcagctgttccctaagcccatcctggagaatcatcgcagaggcagccgtgcatgggtggcctggtggcttctgcaagctgcaggccctgctttgtgccacagtgaacctgagcaggcactgtcaaccccasctcccacagtgctggatcttasgtggctctgaggcgctagggcagactttggagccacagagactcagttctgtcttgtcagcctagcccctcactagctgatgcttgaaggaatccattttcctgcagccttgacctcccggacacaagcaatcctctcgcctcggcctcctgagtagctggcactacaggcatgtgacaccatgctcggctaatttttcttattgtttatagagacagatcctcactgtgttacccaggatggccttgaactcctgggttcaagcgatcctcccacctcagcctcctgaagtgctgggattattggtgtgagccaccgtccctggtcattacttcttcttctttccataaccaattgttccagtcccccactccattcaygtggcctgcgagtctgacttcttgttcttggctactgtccttagaccagctcttcaggataggcccctagccttggtgtgggtcctggcggggrtgctcgtggggcaatcgatcctcagtggtgtgccatttccagagaagtcggtgggttgcctgccaggatagctctgagagggatactgagggcatggcagggaggggccaggctgggagcctgggaagtggggagcatgttggtctggctctgcaaagccatgccctgtctgctgggcttcttgcgtggcatayagctaaaaaactgtgaactaagttttggggctcagtggttttctgcattgtaggaagaatggagccaaagagaarttgtgagcgtggccatggctcaagccctggaggaggtgcggaagcaaagggaagagttccagcaacaggtgggccctgtttcacgctgaggggcgatgtccccctgcagtcccayaggcagcaggcccatcctgccgtgagactgttggagagggcctgtctctccagggtagggtagtagactcaggactcagggaatgcagtcagctgcgtgggcccctgtgctctctaggaagctgggagacaaatgttataaagaaactcttaccccatagkatgcccttttctgatttttcaactataattacctggaaagtggtccatgtccacgggcctagtgggctctaattctgtgaggtgacctatcattgcccacctgccccagaggccacgtaaggttgggttgagtttttgcaggaagtatgggaaagcctcccttgaaggtagactttgcatstgaccccagagcttctagttaagtggctttaggcctttggtaagtccttaacaaatctgagtctcctctgatgaggactctagccttctacttacacctctgggaaactattctgtaatgaggcaacatatatcaaatgcgtgtctagtgctggggatgttgcaggcactcaggaaatggaagttatgacagcttgttgggctgggcagaatggccacgtctctggttgacccactgttggccagggggcagtgggaggcgactgcccctgtgcagggcccctaccaaggagaatagatttgtgcatgttcataggagcagagcttagctgggggtttgctctgggtmgtggacttcagggagggattcgtggtgtaccctggagagcggggaagtggagatttctgtgggaagatggagtcactgctcacaaccttccctcttgttgatttttctctccaaggcagctaacctgacagccataatagacgagaaggaacagaatctgcgggaaaaaaccgaagtgcttctccagaaagagcaggagattctccagctggagcgaggtgaggagtcggtccctggctgagccttctctccttttcaggcccagcatcctgccttgtgacggccttgccaccaagcagcatggagtcactgggctcacagtgccccctcccctcctccccgacctaggtcacaactctgccctgctgcagatacaccagctgcaggccgagctggaggccctgaggaccctcaaggcggaggaggctgcagtggtcgcggagcaggaggacctgctgaggctgcggggcccattgcaggcygaagcactctcagtcaatgagtcgcacgtaagtcccagctgcacctgcatgggtgctacagcaagatgcagggcaggtgccgagagtgcccctaaggaggcagcagtrgggacacatggtggacacgacgctcccctgcatgtagggtcctttctttgaagtagggcacttggccaggcgcagtggctcacgcctgtawtcccagcactttgggaggccgaggcgggtggatcacgagttcaggagatcgagaccatcctggctaacacggtgaaacccagtctctactaaaaatacaaaaaattagctaggcgtggtggcgagtgcctgtagtcccagctactcgggaggctgaggcaggagaatgatgtgaacccgggaggcggagcttggtggagccgagattgcgccactgcactccagcctgggtgacagagcaagactccgtctcaataaataaataratagataaataaataaagtagggcactcatatggctaggaggccatgagtcctgaagagcccatcacagatggcasccctgtcggtaggcaggggagagcaagccccttcatcccagcaaagactagtcgtgtgattagttgtgggcattgggcattggatcttctccaggaattgcttcctggccagttgcctgttggagcacaacgcccatacctaagggacgagtctagctccccttccctgtgtacctgtggctcagcttcacctgacctgtcctggctctcaatttgctgctgccaccttgtaggtgacctcgagggccatgcaggaccctgtgttccagcttccaackgcaggaagaacaccaaatggtgaggttggggccatggatctcacacagctacagaaggagaaacaggacttggagcagcaacttctggagaaaaataaggtgaggatgccttttgcatggctgtttctgtctccaccaggtcctcaccctcaggcctaaaatgacccagtccatccttggaggtttttgtggtttcccccgcacctcctggcaaccatgacccctctcacccaaaggccttcctcctgatcttccgttcctcctgcactgtcctcctccacaccctccccagccctcttctccccacccsctggagaactggacaagtgtcaggcttgggcagctgcaagcctgcatgttccctgccagctctgctgtccccagccaggccatagcgacagtcctctttcgtctatacttcctttctacagctgtggaagtaaagcactgatagctgcctttaagggtttgtttgggtgggaggagggggttatgaaatgaargtatttgtgaaccgtcctataaactttataaactctctggtatttggtagaggctcaataaatgtcatggtccccacccttcaccctccagcctttccacctatataaatgcaggatctcatttaatcctggttcttaaagtgtcctgtgaagcttagtgtgccagccggctattgctctggcctgacattctgcccccaaattgtgtgtgtgtttgtgtgtgtgagtgcacgtgtgtgtgtgtgtttagatcttttacaagggggaaagtgttcattatgtctaatataaaatacagaagctttgcagcagtggcagtatcgtagccaatgaggtctatccgaggcgcgattattgctaattgaaaaaaaaaatacacacaggaaagtgtacaaaacaaatgtgtgtctcagtgaattaacagaaagcagacccatgtaaccaccccgatgcgaatcaggatattgccagcatcccagaagcccagccccctgagcccctcccagccctgtcagtcactccgatcccagcccttctggcaatgactgccttgcttttttccctagtgtcacctcagctcgcattgctcaaccccacagtttcgttttgcctgtttgcaaatttcccgtttgtcccctaggacctccgtcccttgagcctctggccttaccagctgtgctgccttcctgcctccttgttcagcgtcgggtctgtgtctgtcacgggatcactgccttcccgacacctgcggtcctctggcctctctccctttcctcagactgtcctagccaagctctggttaaacttgggctaaacccaactcttccctgctccctgcctgcagccatggaggcagacctggctggagagtgccatcacctgggcattcaggtcccctcgaagctcaggaccatggtcctgcgggcagcccagtgttccccgcaaccccacctcatccgtgggccttcacgcccctctgcccctaaccccaacttcatgtctaccttctctcctctcttcacctcaaccctgcctcacccaccctggtgctcccacctcctgcttctctgagaagggacgtgccacagcctctcctcatatcctgttcccccacctccccaagcactacgccagccgcctcccccttcttgcctaggtcgttttttcttggaatcgtcccatctactgagaggygcgccrttgtgcaggcaccttatgaaagccctcggcttgcacccctttgccctgctgctgcgtctctgctcacctgccgtgctgacatgttaaaacttcctatatctgccatctccattcccactcctcttctctctcaacctttcctccaccactccacagaaaaacactcttgtcaagctcatcagtaacatctgcactgctaaatccagaaggcagttcctaattttccctctgattggcctgttggcagccttggacaggcgtctcttcctcctcctgaagctcccatccatggcctgctccttctccgtctcctctgacaggccagtctccttcccactgccacccgccgtgcacaagggcagccctcacagctcttctctgcactgtgcgccctcctctgcgatctcagccatgccctgcgcagctgactcccctccctacctcccgcccagacagctccayggacactagcctcacaaacctgtctccacatgagctctaaggtgtctgaaactcaaaacatcggaaaacacacttcggcttcactgtgttccctggctgccatgccaccttycccatctcagtagacggcaaaagccttggagttgtcctatctgccttggttctttctctaccagcatccaggctgttagcagattccttcagcacccccttcacacatttcccagaatccaccacttcacatcgctgccacctgcttcaggttaccattgtctcttctctgraagatggtatcagacttctaactggtttccctggcactcttgtcttagccctctgatgaaagcctgtctctgttgatctcttatgaaagcctgagtccttgcagaggcccgcaaagccctgtgtggtgtggcccctcattacccctgccagctgagcccctcctgtcctcgtcactccctctcagccacaggggcctcactcccatcaagtaccctccaacctcagggccttggcacttgctgagccttccgtttggaagtgcctttccctggtcatcctcactttctttatgccaccctgaccagcctcaccaccagaaccccaccctccctcaccatgctgcctcttctccatgcctcttcataccctctgatacactgyggatttgattattgatttcttttttttttttttttgagacagagtctccccctgtcacccagactggagtgcaatggcgtgatcttggctcactgcgacctctgcctcctcggtgcaagcgattctgttgcctcaacctcccgagtagctgtgattacaggtgcccacgatcacgcctggctaatttttttttttttgagatggagtctctgtcgccaggctggagtgcagtggcgcgatctcagctcactgcaacctccgcctcccgggttcaaacaattctcctcctgcctcagcctcccaagtagctgggactacaggcgcgctaccacgcccagctaatttttgtatttttagtagagatggggtttcaccatgttggccaggatggtctcgatctcttgacctcgtgatctgcccgcctcggcctcccaaagtgctgggattacaggcgtgagccactgtgcctggctttttttgtatttttagtagagacggggttttgccatgttggccaggctggtctggaacacctgaccttgtgatccgcctgccttggctcccaaagtgctgggattacaggtgtgagccaccacacctggcctgtttattgattcttttcccctcgagggtgaacttttgacttttttgttgccgtttctccagcccctagaacagtgcagggactcagtaactattagatgaattactgagtgaggaaaatccaggaaaccaaaataacgtaagataaagtagccaatgtacttttggggcagtgtccagcctcatggtcagccaagagaatagaaatcaaagccacaaggtgccattttacaaaattgggtgtgttggaggtcacttaagatgcctcacagtggagaagttagaaactgtggtcttctgactcagtcattctatccccaagagaaacaatggggattcctcgcttggggaaacaaagcttatcccagctttgtttaaagtggaagcccagccacgcagtaagacaagggcatccccgggagttcctgtcacattagacattacaattaggaaagctggaggaggcagtgatgactctgatacatgaaaaatgtatttacaattccagccacgctgtgcaagaatggggatgtggactgggggtacatggaagaatgcattttgatatattaccattcagagactttgaataaatttttatttaaaaccgggcgtggtggctcatgcctgtaatttcatcactttgggaggccaaggcgggcagatcacctgaggccaggagttcgagaccagcctggccaacatggtgaaatcctgtctctactaaaatgacaaaaattagctgggcgtggtggcacacacctgtaatcccagctactcaggagactgaggtgggagaattgcttgaacccaggaggcagaggttgcagagagccgagatcgtgccactgcactccagcctcagggacagggtaagactccgtctcaaaaaaaaaaaaattttttttccctatattatgaagtttttagttgagaaaatgtctcagcctgtctagtgaataatggaatgtgtatggaatgtgtaataaatgtaaggctcataatactatttaaacatcaaagaaaattagccaggcgtggtggcgcacagctgtagtcccagctactcgggaggttgaagtgggagaattgcttgagcccaggagttcaaagactgaatccagcctgggcaacatagtgagatgctgtctcttaaagaaaacaaaaaaggccgggtgcggtggctcatgcctgtaatcccagcactttgggaggccaaggtgggtggaccacctgaggtcaggagttcgagaccagcctggccaacatggtgaaaccctgtctctactaaaaatacaaaaattagccgggcgtggtggtgggaaccagtaatcccagctactcaggaggctgaggcaggagaatcacttgaacccagaaggcagaggttacagtgagctgagattatgtcacctgcaatccagcctaggcaacagagcaagactctgtctgaaaaaaataaaattagctgggtgtggtggcacacaactgtaatcccagctacttgggaggctgagacaggagaatcgtttgaacccaggaggcggaggttgcagtgagccgagattgcaccattgcactccaacctgggcaacaagagtgaaactccatcttaaaaaaaaaagaaggagaagaagaagaaaaagacaaaaatgagtsgggcatggtggtgtgtgcctgtaatagctcccctagagcctgaggcaggagaatcacttgaacccaggaggcggaggttgcagtgagctgagatcgtgtcattgcactccagcctgggcaacagagtgagactccatctcaaaaaaaaaaaaattattttccaaattatttatctaaaactggatgttgatgagttgtgcagaaaaaccatgatctttttagggtgttcaaaataagcattgcagattattmatgtatttcaagagagcagtagtgatgagaaccgtaagtcctcgcctaagtatcctacttggggatcacagcataaaaatygaattttgagggcaaaatctatggtccagagccttttccagctgggctgtgtgtggtggaccaagcccccgggaagggataggcagcgctggggcactcatgtcaacacagagggactgtggcccctgtgggacgtggagactcaagcgtgtgaaagcagtggcccaagagggatgacagcccaacagtcgtaggcacaagcatgcgacagctgagcaccagcctctcaggatgacttctcagggcagaggctcctcacaggtgtacaggggatcccgtgggatcttcgggtctgtttcctttggtgaaacatgcatctaaygattggctttctgtggggtggggcttgtcgcagaccataaagcagatgcagcagcggatgctggagctccggaagactctgcagaaggagctggtgagtactcgcatgggagctggccccacttcccagcactccccctgctgcctgtgcccggtcctcctgaggtccctcgccgcctgactatgctccctccacccmctaattaattgcaagggatcgctgggcaatccaacgttagctggtgggacagcctgccagcctgcatgcacctctgaagcagctccrtggctacagccctgttcctgccttctctgagcctgcatcctcatctggaagtggggttgcctgccacgccagcgcagtgatgctctaacagtgtgtgtgtgtggcagagtgcttggcctgatgcgggatgcgagcagcttcaggccccagggacrtgtgttcttgccatggaaaacggaatgtctgaatttacccaaacgatgtcactccctcctcaagcctmcctggaggtgcttccttcccaggtggggccctttttgccctacgatagtgatcatagtttggaccaggtgaacctccygtgtgattttttccacctgtctcagagggttcggtgtagcatctttcccactggtttttcagaaaatcagacccgataatgagctcttcgaagtccgggagaaacctggacctgagatggcaaacatggcgccttccgtcacgaataacactgacctgacagatgcccgcgagatcaactttgagtaccttaaacatgtggttttaaaattcatgtcttgtcgcgaatccgaggtaaagggcttttgaggtgtcttttgggtattgaggccccgccctacagtctgtcctgcagggacccctgcccagcccctttctctcttttcctcgtacatcctggtttgacgcccytgtggtcacccagtcatttctcctgctggcgttggcctgcggagtgagcggctggcgggagaggccgtgcaggaactggctcctggtgggagacataggctccacttctaaatcctggcctgggtgctgaggccagaggccggaagccgggaacggaatccacccatcgctcctgggtcctgccawagggtagggtagctgctggggcagttcccttaagcctgccaggcccccgaggatgcaggggaagaaagaacctatcattgctgccaaacttcagagtgccagagcgtcacccaccacctggtcctgctaaccaaagcaagcaggaaatgccacgtagctcccccgaccccaccccgcctcaccttcaccaaggcctatggcagcaaaacttactgtgtttcaggcttttcatcttataaaagctgtgtcagtgttgctgaacttttcccaagaggaggagaacatgctcaaggaaactctggartataaggtagggttctctggtctactgttccagcttccaagatacgttgtcagttatcccagcagtagcagtgtaagaccccttagacccacacccgagtgtaggcaccagcacagctgcatgatcagcttggctgcttttggatgaacttgatccaagcactttttagcgatgacatcctttgtgcccaaatgtctgtgctgtacttgaccaacaggccacgtatttttcaaagcattttcattgatagcgctttatcgagagccccaggtctggctcrgcactcarattccaaaagcgtctgcataaatgctctaataggaaaaaatacctgcagttccactaccttgttcctgtcaactcagtgtttttctstcatttccctcctgtactgagcacgggcctgcagactggttactggcaccatcttcttgctctgctcagagccagaggcaggatgtgtggggggcaggagtgacaggctcacgggaggggaggggcggttcagtttccctggcaccaagtccygatttgcatctcagaagccttttctgtttcaaatgcagatgtcatggtttgggtccaaaccagctcccaagggcagcatccggccgtctatctcaaaccctcggataccatggtcctagaggggactacccaaggatggagctccgtgggttgacactttttctgtgaaaagaacactgacacaccagtctgggtgggtttttaatcactgtaactgcagtattttgtacaagtgtctaaacattgtttacaagactaaggcccacttccctgcaggctgacctgaacctcagggggtagctgatcctgtcattctggtcaccaaacaggagggtcctggcactacccagatttccacagtgctgctaatatcccagctccagccagcaccccatctgcacctgaatcctctaacttcacggtagcacttacagctgaagccatcagcatctggcaggcacacctgagtcaccatgtagcgctgctactggaggtagagacggccctttgagatggtgcccagcaggccaaacccacctgcctctgccaggaacagccaactccatgggaactctatgggagtggcttttaaaaattcagatgagttagaagctttttatcccttcctctcaagaaaatattctttcaccctgtctctcaaaccacctagaactttagaggatccatctttaagggycggtgtggatgaatgagaaaatgcacctttctgacagtatctccactttacttaagaaaactagcaaatatatgaaaagacccttagtaccaaawacactcaattgcctttttaatgaatgtacttgtcttggataggttgctggtaaaccattttaaactattttttatagctgaagttcttcactactataaacatgtcttctgtactataaawtccatttaactggtgttcttaaaatcagagcgtccagaggaaattcttcctaaaactaggattcctgttcctttgtcttctcactcgcactctggcactgctccctctgaagtgcagtgggatctcgtgtgctttgtcttgattctgtgctgcgctgccgctgggcgatgcagaccacctgtcttctactgaaggacagtccgctgtctccagtgggggcagcagctgtcccccagcctcgatggagacaytggggcagtctgccttgtctgtggagctgctctctctccctcatcccaccccaaatacttaaaatgacactacacccagacggcgcccagctggctgcagcacttgtagcatgcacatgactctggtagtaaccaacaaaaacttgttttatggattcctcgtttactgaggaaagggaacatgctggttctggaaaagccacaatattgaatctaaaaggaaaccgtttattgtttgatgaaagtttcactggttaaataaaaaactaaattaataactggagcctctaaatttattatccattatccagtgatggaaagttgtatttctcaatcatgcttagggccaaaataggtatataaaatgtgtcacagaaaaacacgcatttgcaacgttaacctaacgaaatttccatgaagaaccaagtcagggcagcatctccttagtcccagctcaggctctctgccttccagaggccgcttctccagtgactaacctcctcctctggctcctccttgcagacagttatcccttgtttagaacacgaatttccatttacctggtgggaacacgaaacaggagtctcttctgttctgcaagtttgatgggtaagaggtagccttttttcaaagtaggatttcctttttcaactgttccaggaaagaatctctaagactgggtagctcacagccagccaaaggcagctacatttccacagaagcccrtccgctgcctccgtggcttctccagccattgaactggtcccacacgcaccccaggccccactcctcggcagtttcaggtgtagctgtggggcccgttcctaggtctgtactcactttagggaggcttcactgactaggctttcctcctgcatgttgaatttccttcagctttaagaggaagagtggaataaatattctaagtgatttaatgcactttgacttgtataaaactttctgtgttagcgacggtatctatagccctttatacgagygatggatcttgagctctccttccatgttgtaaatagggattgtattcttgaaaactgctgtagcaaattcatctgtggtgcaatacactttttgattaaagctcttcaatccagatgcaactacaatggattttactagtttggtgtgtcagtatttctttgactcattaaatctggtattttgtgtctcatatttaacactccaaggccaacctcaagggctagagaatgtttgtctttctttcagaaagaaccttcccagactggatttgggtgaataaatatacgtaatttaatgaagccaacagccccattctaccccccccaagaattgcagtggttctgaagagggactgaggaggggagagctgtggaggggaggactgtgtcactttggtcaaagtctgtatccaaaggctgtatgacccagaggagcttctggagtgtgaatggggccctaacctttaacagaatgcaagctgcagtcacatgtgctgaaaaggaaagaaaagcatttttgcccttcagagaagctctgttattggttatggggaaccaaattataccatctatttgctgattgattgctccccatttctgacgtttagttctttaaagaaagcttgtccatgcagcagtgattctgcagcacagccaacccagcatcaggagacgtgaccaggcacatctgaggccccaccctcaaaagattccaagtgcaatcccacaaactgaagacttttaaagcctagatcaattattaaatgtttggcactttattaaattaattaaataagctccaaaattaattacatacaaatcaaaggaataagaaacaataaatagtttattcagcaaacacctctctgcagcagccggcagctctgaggccgaggctggcgtcctgtggcagagggcctgtggattgccatgctcgctcccaggggtggctcaacagggacacaggtctactccttccacatcgggtttccggaacaacaactgaactctcattcattaccatcccattcattaccatttttttttacatacacgaaacacaccgcaatrtatagactaataagccaagagctttattgatgcagcaggcactttacaatgagcccaagagtgtccaccttctctgggaagacaggatgtctgtacaaactcttgggtttttttccacttcaaaaacacaagctctcccgtttaccacagcccttggatctgcacctgcccaaaccatccctcccccagtgcacacaggtgcatytgaccaacaccagccgccacgctggtagaccgtcaaaatgtcagttctgcagtactcggagacaaaggcatagactatcagatcctaaacaggatttaggaaacagacgattttcccctccaccttgaaaataaaatacatttcagcagatacatgtcctgaaatagtttacttgggagttcctaggaagatggtccattgtcaatcccttcttcaccagcctgggcatccagaattcttctcaaggtaacatgagtctttttattttttttaaacagtctttcttgctgtaagaactcttataatggagcctagtcctcctactgctaaggcctgtgggggcaggaaaagaaaacgtgtcagatgagacctggctggccaaggggagcctggcttgccagagacaggggggacattccctgacctagatcccgtcacagatcctcgaaagaggattcctgagatagagcacattctagggaaggagccctgtcctggagccgtggggtcccgagagctgttggctcttgggcagaactggcttgagaacactgtcaccagcacacaaagcagagccctcgagcttcccttttgagatggggtctcactctgttgcccagatcacagctcactgcacagccttgatgtcctgggttsaagccatcctcctgagtagctgggaccacaggtgtgcaccaccaggcccggctaatttattttttttgagacggagtttcgctcttgtcacccaggctggagtgcaatggcacgatctcggctcactgcaaccctgcctccccagttcaagcgcttctcctgcctcagcctcccgagcagctgggattacaggcgcccgccaccacccccggctaatttttgtatttttagtagagacggggtttcaccatgttgcccaggctggtcttgagctcctgacctcaggtcatccgcctgcctccgtctcccaaaatgctgggattacaggcgtgagcccaccgcacccagcctagtttatttttttgtagagatgggttctcactacattgcctgggctgttcttgaactcctgggctccagcaatcctcctgcctcagcctcccaaagtgctgagtttacagatgcacacaagcccactgactgccgcccgctgaggtgactggcaggcaccaagctgccttaaagggacgagaggtcctggcctccccatcatacagaggacttgtttacttccttgagcccaggagaggggaggccaaggaggtgcagcacacccgccagcagacctaaggccacaaccacagcccagcacccacaccaccttaaggactggcccactgtaaaacccctctcttccaactcaacactgagcctctgaggaaggcaggcaggttagtaactcctggtctgctttaatggtgggcgtgcttactgcggcactaggggtgtgcaggggagggtgtgggaggcagccccagtggtacaggcacgacacaggcttgccaaaggccttgctctcacacggacccaagcgaagggcagacacagctctttctgcttcacctggacgaaggccatattaagtgaggtcaaggtttctgcccactgctcactctggcctgctaaggctgaggccagggcaggaagcccttagagctggctggaggactctatttctaagaacccccaacagctgcctccaccactgcaagtatcatgaagccccaaccaaccagcaggcccccttcctacctagactccctgaccaccttactatgccatgttatctgcccacatgtcctgtaccaagggcaccctgtcttgcctgacataaatcggcagctaaaaagcaaaaaagtaactgcaattaccacagacagcaggtccctaccaggagcttccttgggagagggaagtgatgacatgtcccaggttggggctcgtcctctgaccccacacgcctatcagaccgtcctacgtttgttctggaaaatctggcctgctgatcgaaccccaaggcaagccaggtggctcactggggcgcgtggcagcgttcacataccttttcgtgccactgsagtaacactgcgctgctattttctgtgggcttctcaaagcctttataaatgtacttcattaacaagtcaacgccgtttctgtccagtgactgcacagcctgctcaatctcactgctcttgaagtttgtgagcactttcagcaccacgccctgggctcgctcctgcagacgaaaaagagcaagtgagtcccagagctgcgmaggcaccgccatgccatgccccacaccaaagcaaggacacagatcaccagaaacactgcccagtttctaattcgtccaggatggttaaaataagtgggttagaacgtcttttgtggatttaaatttcaaagtatcttttatttatgccaacaagttaccctacttattttgggggagtaagtagtttactaggacaagtatcaactctgagagagagagagagagagagagaagagaaaagagggagagagggagggaggggcagggtctcgctctgttgcctgagctagagtgcagtggtgcaatctcagctcactgcagcctctcccaggctcaagcaatcctcccacctcagttagggctacaggcacatgccaccatgcccagctaattattttttttattttttaatacagacaaagtctcgctatgttgcccaggctggtctcaaactcctgagctcaagcgatcctcctgcctcccaaagtgctgggattacaggcataaaccatggcacccagcccatcactattttagatgacaccaataaggccttattatactccacaatggtggtggactattaaaaaataaaaataaaaccaggttgactcggctgcagcgtccctcttgtgttcacacccagaagggtggggccattccccagaactctgtgaaggtgcagccactggtgacatcaagatgctgtcacagctgccagaatcccagctgcagggagacccctttctctgaaccaaattttagacttggtgatgcagtaagcacaatttagtttttagaaggtaggaaagcgtacgggtacttaaaatcctcaggcagacaaagcctatttaacagtctgtgggagcataagcaccacaggtgagcgaattcatccattttcctcatcagccagggccaggctgacttctcagcctacgaggccgtgagcaggagtgaaggcttctgtggggaggttctcgtatataaacgctgacagcgttgatgtcagagaagcctcaccacctagggagcgccaggaggcttccctggaagccccgcccagtgccaactcactcccwctgatgtggatgaaagctcacactcgcactgggcagacacccacagccctggtcccaacagcacccagcagagccgcagcgccacccctttaccttcacagcttgattcttggtgttgacgggagagttccgcaaggctgcatggaatgcscgaagcatgtcccctgtgcatcaccaccagttaaggatagctaggctcaagcacatccatgccgtcatgaacaagctcacttcagaaacarctcaggaacagagtcagatgrgatctcatccataccacccaccttccacggcttccaggggggcagagacggtttacagcctgcacagggaggctgcagggcacctctgccaaccatgcaaaccctcctttcaactccctctctaccttccacgtcaaagcaactgtcctggaggggtaacytgatgtaaaattggattgtgctcacttgcacctgcttggtgctgagcactgtatctcccctactggatcctcacagcacccgtacatgtgaactggaggtcgttctcatcttctcattctaaaaaagcrgaaaatgtaggtacaaagggagacctcctaactcttcatcaatgctcttcatcaattaaactattaaggaaattaagatgtgctagaacttctaagatctatcgggatcaatgaggtcccaactgttacctggaaagagtttatcaatctaacagaagcttttgccaacaatgagccrgtctccacccttaccccccaacctcagttgcaatcctgacaacacattctttgctgagttctgaatacccagcatgcaaaagaaaattacaatctgggttaggtccccaaaggtgacacctattttaaactgaattacatcagccaactttcatttcctcgtatgaaacactggcttcagccaaaaagcttcaaaaatagaacaaggaatggcttctgcccaatcgggtctctactcctcttcatgcagtgatacccacgtgcagacaggaagggccttcggagcagagctgaatctcctggcttccccagtatgagatccatcttgagtgagctgggtctgcgccaccaggcaagccactcccagcgctggttccccagctccctgcttggctctgatccaccttccacactcaagaggcagtccagtccctctgtctttcagttctggagttccttttccccatccaaacaaggccagcctgatatcagccactgataacctctactttgtaactcctttttttttttgagacggagtctcgctctgtcgcccaggctggagtgcagtggcgcaatattgcctcactgcaagctccgcctcccaggttcatgccattctcctgcctcagcctcctgagtagctgggacgacaggcgcccgccagcacgcccagctaattttttttgtatttttagtagaggcggggtttcactgtgttagccaggatggtctcgatctcctgacctcgtgat

SEQ ID NO: 9999 - DNA, 82641 bp, Homo sapiens
  misc_feature (363)..(414): n is a, c, g, or t
  misc_feature (14146)..(14226): n is a, c, g, or t
  misc_feature (44599)..(44618): n is a, c, g, or t
  misc_feature (46425)..(46541): n is a, c, g, or t
  misc_feature (61385)..(61532): n is a, c, g, or t
  misc_feature (71968)..(72067): n is a, c, g, or t
ttgtatttataaaaatagctattctaatatatatggagtagtatctcattatgtacaatcagttatagcagtcgctgagactagcatgagcggctgtgaaggcaaagtggaacgactgacaaggtaaggtcaagaacagataaaaatgatagagctgtctcgtcagagtcgagagacacaactaagtgggctcgagtagctagcagttaaatgtaagtcggagcagagtatgggacgcagagacggagaaggtgccggaggaagcgacaatgggtgcgcacatctgagagacgagacacgcgcacggcacacacgatagacgatgcacgtagtgcttgaaatgggagaggagcagtacagcannnnnnnnnnnnnnnnnnnnnnnnnnnnnnnnnnnnnnnnnnnnnnnnnnnnaggcaggggaatagcttgaacccgggagatggaagttgcagtgagccaagattgcaccattgcactccagccggggcaacaagagcgaaactccatctcaaaaaaaaaaaaaaaaaaaaggaaaatctgcagattcctggaccccattccttgaacttctgatgaagtcagtccagggccacactttaagaaacattgatgagctaattccttgctacagttacattttagttccatgccctctgtcacatgactttgcagtttctttcactagaggcagggcatgttgtcctgcctctttgatgttaggcctagtcatatgccttgctttagtccatcctgctccaataataagtgctccagttctgatactagttttaagaggccatgtaagtttccacccatcttaattgtgtttcttccattgccataagaaaatcgtgctctagctagatcaggcaactccaggtgaagggtgtcagagtatacatttttgctgtttaaagccactgaattttgggatggttgcttacacagcattgctatgccaatagctaactggtacaacacaacaaatttcactgtgtggcaaactcttcaagagtgcctacccataaacatttctctctttayaaacacttttaatagacattttacaaaagatgatatataatgtccaacaagcacattaaaagatgttcaaaatcactagtcgtcagggatatgcaaaccaaagctacaatgaaatggcatcacatacctactagaatagttagaattaaaaagacaattaccaaatgttggtgaggatatagaacaacttgaactctcgtgcaccactggtgggggtataaaatggtacatcactttgtgaaaatgcttggcagattcttataaagttaaacatccatctactatatgagcgagttattccacatctaggtatttacccaagagaaataaaaacctacatctacaaaaagacctgtacgtacataaatgttctcatagtagctttatgtgtaatcgccaaaaattgaaaatataccaaatgtactccaacaagtaaatggataaagaaacrtggaacatataaagcagagtactactcagcagtaaaaaggaactaagtattgctacattcaacaacatgaataaatttaaaaacattatatggagtgaaaaaagtaagacacaaaagtacatactgtatgactgcatttattaaagatgctagaatatgcagactaatctattgtgatggaaaacagatcagcggttacctaggggcctcgtgtaggagggattgaccacaaagggacacaaagaatctcttggagtgatgggaatgttctgtatcttgactgtggtatatacatctgtcaaaactcatccaaatgtatatttccaataggttcagtttattgtacatgtattatacttcaagaaaactgattacacattcttcctttcatcctcactagcagaatcctcattttgcttagcagcagcatggtctggcctgggaaatgtcagtgaaaattccttggtggtgcttcctggagagctctttgataggggcaaattcaggtggttacatgccttttgtcattcctctttgtcctacctataataaagaaatgatactggagttgccatcccaaaacagtgagacgacaggcaaaaggaacaaagtcacccatgaagcatggagaaacagaaggagcataagtttaaataaaacatcactgtagagctgtggtgtcagtaaaaaaaaaaaacccacttcttgcttcacccactatatggcaasgtttttgttattcacaatcaaatatcatttcaacagatgcagtctctctctgttaagggattgaactcactgtttctaaatctcagacctattttgctgattttttgggccacactcagttgtagaatcttggktgttttgggcaaccctggctcagggtacctgagcaccagcttcttttcctggcccagcctcacgggccagctctcatgcccggtccccactttcttacatttccctgaggcacccaggttccagagttcccacaaagtcactgtgaagctccatgctgtcctaaagcaggtagactctcttttctctccttaatttattttcccagtcagcacacttcgactcaggctttttttccaaaatggaaaatttgtgttttgttcccaagtataaagcttgactctccttactggcattttccaccactgtgctcttctgcccgcgcctttttcatcayagcacttatctcagttttaataatatatgtgtgattgttaatgtctgtctccctaactagataggtgttaaccttcagaagggcgggaaccacatctattttgttcatatctttattctcattatttgcaggtggtcatgtggaatccctgaatgttaaatgaataaataaaacttccacagtatttacaggtggcaagtagactcctaattcattagttcagattaatagccttgttcatgccatgatcattttttgaaaaaattacaaaaccatgaagmccaggcccactaaaatatatacactaatttcaaacaggtagttaacaatcatttttcatcttatgttaattttctgacaccttcctcataccaactagtataatcccttttaggtgggcaattttatctcctattttgttgagtagataatggtcaattggtttgagttcgctcatctattttctctacttttcaaaataacttactctctaggaatacctcctacgctctactttcaacatggamggcagagctgccccttttcctccagatactctggaatcttgctctcgtaatcaaccccctctgtctacagcaactgcagtctcttcctttccagttgtctctttccttctgtcctcaggtattcattcattcattcattcattcaacaaacatttattaaatgcttgctaaacactttgcactgttttatgtcttcgaatacatcaatgagcaaatcttcacagaatttacatgcaagtggaaggaaacacagcagacaataaacaaaacaaatatgtaaattacagtatttacatatttgtaatgtatgtatcggctaagcagaaataaagcaggagagaaataaaggaaggaaggtggtggaggttttaattttaaataaggtagtgaggagggacttcactgggattagcaaagcctcaaataaagtgagggaacatatcttgtgggtacctgggtattatgtgctaaattgtgtccctccaaaatttacatgttgaagtcccaacctttagtgcttcagaatataactatactgtatttggagataagatctttaaagcagtgattaagttaaaatgaggctgttaaaggtagccccacactccaatctgactggtgttagaagaataggaagagacatcagagggaagaggaagtaagagggctgycatcggcaagccaaggagagaggcctcagaatcccaccttgatcttggacttctagcctccagaacttcragaaaataaactagttttgttcaggccacctggtctgtggtatttgttagggcaactctagcaaactcatatacctgggaagtttcctaggcaggcaaaacaacaaaggaaaacccccmaggtgggtcttgattggcccagtggagtgagcaaagacagtatgaaatgagatcagaaaagccataggaaccagatgctgtagcaccctgtagtctattttaaggacttgacttttatcctgagtgaactgggggaccttttgagggttacgaccagcactatggagaagcaagaagaccggtgaaaggtgttctagacaggaaaaacttgagttgctggatcaaatacagctgataaaacaaagattatcctttgaatacagcactggtggcctcagcgagagcagttttggtggtgtgaatgcctgactgtagtgtacttgggaatgggagaagaggaattgaagataaggaattttgaacacttgagttttgccatacagaggagcaaagacacgtggtaggagctggaaggggaagagaggtttcttgtttgttttgggctggggagagattagagcatgtttttagcagatgaaggataatctaggtatacccatattgccaacaccttaacaaatcttcaccggttttggaccaggtgcggtggctaatgcccgtaaattgcagcactttgggaggctgaggcgggaggatggcttgaggccaggaatttgagaccaacctgggcaacacagaaaccccatctttacaaaacaaaattaaaaattggcctggcatggtggcacgcatctgtagtcccagctactccggaagctgaggaaggaagatcgcttgaacgcaggaattcaaggttatagagaactatggtcaagccactgcactccagcctgggcaaaagagcaagaccctctctctaaaaaaaaaattttttttaatgttcactggttttgatgcgggtaatagcctcccggccagtctcctcctcgttgatgctgtcactgctgaagatgcattttcttatcacttcactcatctgctcaaaaatcttcaggaagtcttgacttgcagcattaaaagttcaaatgccttggctgaacattccagtcttctccactctgcccttttgcaatttcatcactgtctttggtgaggtacaaagcgtgccaggtcagagtcagaagacatgaattaaagtcatgattctgtgaccaaccagctacgtgatcttaggctaactacgtcagtgcactgggccggggctccttcccsttcctaaggaggcgggaggcgtgtcgggcagactggattgtcacaggtcactgccatctctaacaagcggacttctgagccccgttgcggccacaagtaggaccatctcctgcatcctccttacccttctacttctagggaccacacggcttctgtggccacttcttgctgcttcgcttttgccttcctaagtagactaggctttagaagagctacaataccagctcctttaaggtcgacctcctcccggtcacaaggcacttgcctcccactcttcacttgggacagtcctcttcacagtcagaatccgccacgtagtaagtgccgcttccaaccaatcaagaggcagttagcgcagacctttgagggacatccacttccaccaatgatcttcaagtcttctccagcgcctcgctttgtggggcgaggccaaccaccgcgatggccaatctgttgtaggaaaggtattccgggaactgatgagcgcaccaatcaggtaaaaagacgtcggggaagggcatttctcattggtaattgcgtccggaagagggacgggcctcgaacgacgaaattacgatttgattggtaggtgcgatgttgaccaccagggtaaagtccaccttccccaacaaggccagcctgggaacatggagtggcagcggccgcagccaatgagagagcaaacgcgcggaaagtttgctcaatgggcgatgtccgagataggctgtcactcaggtggtagcggcagaggccgggctgagacgtggccaggggaacacggctggctgtccaggccgtcggggcggcagtagggtccctagcacgtccttgccttcttgggagctccaagcggcgggagaggcaggcgtcagtggctgcgcctccatgcctgcgcgcggggcgggacgctgatggagcgcgccatcagcccggggctgctggtacgggcgctgctgctgctgctgctgctggggctcgcggcaaggacggtggccgcggggcgcgcccgtggcctcccagcgccgacggcggaggcggcgttcggcctcggggcggccgctgctcccacctcaacgacgcgagtaccggcggcgggcgccgtggctgcggccgaggtgactgtggaggacgctgaggcgctgccggcagccgcgggagagcaggagcctcggggtccggaaccagacgatgagacakagttgcgaccgcgcggcaggtgaggggctgccgacccgggggaggcaacttgtttacgcgcgcgagccgcggaggatgcggtgtaggggggcggagatccgggacccgggcgggcgtcttccctcggctgcggagggcagctggcgacctggggasgagcgcggggccacgacgccctcccatcccccggccagcgacctgcctgggctcggctcccgagggcctggtgctggccgacgggtcagagcagcatcctcgcaggtgcgggagaatggaattccagggttgcaaagaaacgccacttcccctctttcattgttttcgggcattgattctcttccaaggaacctttccctctttttccttacgcacatcacctcctgtctgtgctggcgtgacagctgttttgagaaaggactttagcaaaagacgtctgcattttctttcaaacacaactctgtagtgcccccggacaaggattgagatcagtgtctaattgagatctgcggaacacctgcatccgaatcacctggggttgctggtgaaatctacagttttctaggccctaccccagttttactgaatgagacattccctgggtaagagcctggcatctgcgtgtttaacaagcacgccggataattcttgcacgctaaagtttaagagctatagtcagattcttgaatattggttcttgaacctaagagccatggttaggttcttgaataaggggtttactgtataaacatttaatatagggttttctttgagtttctcagcattcaaaaaatgttacttcaaggtgattgttttaaagcacttttcaaagtctagacacaatgtaaggcatgttaacagtaaatttgggggacagccaatcttatcacacccgtggagaaagtgatgtcccattttataaatggagtgctaaagggagcattaagtaaattaaactagggaaggctgggctctggattggaacatattttagacttatagtcattactagatcgtaacaagttagatttaattttaaattaatattagaactttgatctatatatctggagactactataaataggataagtactaaaattctctaggcaccatttgaatatataaacatttgtaaatatatatatataaaacaaagttttcttaggtttgctaatgagtcagttttcctggaagagtgtttttgtttatcataaatttctgaagctcctgctcaaaatgaattacatgaagtagagttgagacgttttctttttcttagaattcaaatccacttcaacaggtacttactggttaacaagagcccaaggatgccctgggtggcagaggttaggcaggtagttcctgccttccaggagagtgtgcagtctaacagtacggatgaaacgagaagacctataacaacattacagactagaaacagtgccagtgtcagggatgtcccaaggtttttgtggtgttctactaggtgaggtatgggagtgagggtaggtaagaagataagagaaggttgtggcagaatgagttggttcctgaaaaatgggtaaaattgtaatggaaagtcactggacttgaggaaacagcaagaggcacagaggccggagattatgtttggaaaacattttgtctctrtgtmtgtstgtgtgtgtgtgtgtgtgtgtgtgtgtgtgtgtgtgtgtgtgtacgtaagcgatatagacatgcacatatgtatgctaggcagggagaagtagatgaggatagaaaaaataggttagagccgactgtatatgcatatagtctgatgctaatagcatcattgtcacttgggagtatgttaaaactccggagtggggcaccaccccacactccctgaatgagagtrtctgcattttaacaagatcaccgtgtgattcacatgcacgttaaagtttgagaaatgttgggtagagtatcctgagtgccaggcttgatcaaaattacacctaaggaatgtttctctagcaatagtgtgtactgaaaacttgagttaagaataccaaaaggagagtgttatagcagttcagatgagaggtttagtgtaaagtggtataggacagaggggacagagttgagatatttgatgcaaaatctaggttcctggcaagtgaatgcattcttcctttcttggtacccttgtccagagattgagactgcgtggccagaagttgacaaaagaggtttaagggagcagggaagaaaaggtaaggggtttggtgttggacatgtgactcggaggtgcaggcaggacatccagagggaggtaggcgggtggaaatgagtgactagagccagtgagaaggcagcataaatatgaataggtgaarctgtgggaaagggaaagctcatgagaaaacctcaggaaatgccttttattttagggaggaagatgagccagcaaaggagacagaaatacagctggctaggttggaggtacaggaggaggactgggaagaaagatttggcgatgagcacacttaaagagtttaaatgaagcagcagagacaatactcaaattgcaagaggttaaagattcaggcccttctgccccaatccctcctttcctcactgatgaggtaatttttaggagaaggaacctccgaacttacttatgtactgaaaagagggagcctgtgtagatagaatgaaaatgaaaggggctgggcgcattggctcagcctgttatcccagcactttgggaggccaaggcgggtggatcacctgaggtcaggagtttgagaccggcctggccaacatgatgaaaccccatctctactaaaaatacaaaaaattagccaggcatggtggygggtgcctgtaatccgagctactcgggaggctgaggcaggagaatcacttgaacctgggaggcggaggttgcagtgagctgagatcgtgacactgcactccagcctgggcaacaagagcgaaactccgtctcaaaaaaaaaaagaaaaggaaaatgaaaggaacaggtgatgaggtgaaggtagttagagaagatccacttagcaaacaggaggatcatttctttctcataaattgcagtgaaaacaggaattttggcttgaagagcatacatgatcaccaaacagaattgcctaggaagagatagagcccagttttggggtctgccttgtagtgtggacttaagatagtgtggaatgtttgagaaaccttgaataagttgatagtcaacaggagataaatacgcagtttataaaagttttttctaaatgctcttaaaaaaagataaaaacccagagaatattaattagttcagtaataatagaccggtaattctgtttgtttcaaggagtattaggggaacagatttgaattaaccaagcgtttactatgaacagctgtgaagaactgcagtactggcaaaacttttaaaaaggaggaggtgtggaattatctttatttttgcatgttgtcttttgatactcaagaagcaatccgagattcaccagttcattgatacttttctcttgatggaattttcaagtttcattctaagtgcttactctgcatatcaagcatgtgaatgagtgaataagctatttattttctttaaaagttagctaaaataaacttgtttttctggtaccaatctcgttgtccatgttcttctgctaaacattacattagttgatatttaagtgggatggtcattgcagaaagttgggaagaaagtctcatcacctcactgttagattttacatatgtttatgtaattttgtgaattaccagtcttctgacttcaacacaaatagcaaattgcaaagtgttacttggggttcttgggatgggttgggaagwcattctgacaatctcagaagttctaaagaactagttttatcttaactatcactaatttgcaaagtacatgttcctttttcctctggctctaattcctctctaacaaaagtatttctaaatttgacattaatctctggtgcttcttcaatttgtgcatctgcaaactgatttttttattaaatgagataacatgaaaatatttgcaaatataagatgatataatttctctttttttcctctgtcgttttacaaagtgatctgatgtgaaacaaaggtacagaaatctagtcttcctcagactttcagatttataatcatttttttgtttgtttttttaactactaggacccttgaatagtagcatatcagaataccatgttgaaaggaagctcagtcatatagtcctattcctattcactcacccaactccagacttttaaagttaactaacagtcacctttaaggaagaatttacacagaactttcaaagcaagtaataagccaaaataaatatacttcaggcaagtaatgaactatcctttgtgtctgcaattgtctttagcttaattgatgccaggactgtgcttagactatgtggacagggatgggagattgctttttatctgatctcaggtccctgcattcataggcatcttccagattgcagagaggacctgtctttatcagttgctgtgagctgtagcttcagcgtgtctctttactccctaaacattgcctgataactccatttgcttttctccttttttgtaagaggggaacttcttatacatttttattacaaattgttttaaaatacaaaggagaaaacttgtaagttgcagagctaaatgtgaggggaggagataaatttgtgtgtttaattccattctatttgtaaatgaccattttgattaaaagtctttcatagggccgggcgtggtggctcacgcctgtaatcacagcactttgggaggccaaggcaggcggatcacctgaggtcaggagttcaagaccagcctggccaacattgtgaaaccctgtctctactaaaaatacaaaaattagccaggcatggtggcacacgtctgtagtcccagctactcaggaggctgaggcaggataatcaattgaacccgggatgcagagtttgctgtgaaccaagatcatgccactgcactccagcctgggtgacagagtgagactctgcctcaaaaaaaaaaaaaaaaaaattatagaataaagtagaaaaggtactttcaaaaatgttttaatgtaacaggaaaaggatatctgttacgcttatgttaaacctgtaccactgaaaacttagattgtatgtctttaaggtctagctgatatgccaaagttataaagtatagttggtaatttttgatatatttgttatgatttggggcatggctagtcttgtcatatgtttaagtaaaggaggtttgacttgaagatttacttagtaggtgaggaccaggaagtatagtctaatcagtactactttgtttctaaacaagaacatatgcctcctttagtgagggcacaagtttgggcaaaggattctcagctacgccaaaaaaacaggttcaaccaaatcacatttatagttttgtgaaataacgccctctccccaacccccagaaaggatatttgaaattttaaaataagcagttgttaatgtagaaactatttaatccatacaatgttctcctatcacctgcttgtcttctttcacatcggaaacttccacaggaaataaaagttcctttaaaatgattttatgaagaaatttagcatacacttatcagaatttgataaacttaactgtaaataggcaggtgttctgggtaacttaagtcagcacagtttttctttttttattgcgtattcattgtggcataaagtcatttctcctggattgaggacataatcagagcaattacaggatgaacgacatctatgagatttctgagaggaataaaaagctgcacgttttagtaatatagtagttgccacttatgcaaacttacagttaacagaataatgagttaaaaacctgaatttctgctcctgttcaaaattttgtatttggtgcataaccttaggtaaatcacatcttttcccatcttctcagcctttttggtggtgattgttttgtgtagataatatgtttgtcctaccaaggtttattcattcaacaaacatttatttagttttactggggcccaggtactgctaggccctgagagtagataaatgtcttttccgtaggaagctccaagcctgacagatcattgtgttaaagaattaactatcctcgaatggataataagtgacataaaagtagtgtgagtgaaaagaatggaagtggcaagttattgagtcccggaatgagaaaaatatcaaggacagtgtaggcaacagaatagtgtgagcaagggcacagagcagggagtttgtacagtgagcacagagcagtggttcctaagccagggctccaggacccctacagatctgcaaagataaaaatggggatccatgagactgccagtattttaaaataacctaatggaaattaaatatttaatagaaggtacattaaaaagtgaagttcctttgctttgaactagaattatataaaaccttatatagtaattacagttctttcaagaaatgttgaatattttgattggttcttaagtatttcctctaaagatgggagaatttattatacacagtgttcatttggcaggtggaataatttaagacatggaggaaaatatagacaagagaacttttgaaaagttcaccccatggaaaggggggagtgtggagctgggaaggagaggggagagagggttgggctggtacaagaggcagamaaatgagattaggaaagtacaccgaaaccaaattgtgaaaggcttkatgtgccacaccaagcagtgtgacctttctttttcagtgggcacagggaaccttggaagtttatcagatctctattacagaaacaaaactgtgggaagaagagaggggaaagaaacctgaggcaggaaaatgtgttagaaagcattttaaggtgttctgatgagaaatgagaatcttctagagcaagagctgtggtaatgaagaaggcaaagattttttttttttttttttttgagacggagtctcgctctgtcgtgcaggctggagtgcagtggtgcaatcttagcttactgcaacctccgcctcccaggttcaagtgattctcctgtctcagcctctcccaattagctgggattacaggtgcatgccatcacacccggcttacttttgtatttttagtagagatagggtttcaccatgttggccgggttggtcttgaactcctgatctcaggtgatccatccgccttggcctcccaaagtgctgggtattacaggggtgagtcaccgtgcccagccagaaaagatttaagagaagcttcagaaatagaattaagagtacatggctgttgyttaaatgtaraggatgagggagcacaawgcagttgatgtctgatttaaatgttaggtaataggatggatggctacccttttaagtggcaggaatagattgtgggaaagaagtttcctgagcctgttatggtgataacaagtagatcctgctgaagatgcagaactaggataggggagagatggtgaactataaatcctgtacaggtttgggggctgtcatactatagatggaggtgaagctgtagacattgaccatctaggtagaacatgtagtacaaacaggaaaatgcctgctctatagatagaaaactataaggatgatnnnnnnnnnnnnnnnnnnnnnnnnnnnnnnnnnnnnnnnnnnnnnnnnnnnnnnnnnnnnnnnnnnnnnnnnnnnnnnnnnctataatcccagcactttaggaggctgaagcgggcagatcacctgagtcaggagctcgagaccagcctggccaacatggtgaacccccacctctactaaaaaatacaaaaattagctgggcatggtggtgggcacctgtaatcccagctacttgggaggctgaggcaggagaatcgcttgaacctgggaggcggaggttgccattgagcagagatcgtaccattgggcgacagagcaagactccgtccccccaaaaaaaaaaaaaaagaatgatagatgaggacccaggagggactggtcctgtagaaaccaggaaagaaaaatgtccagaatgaggagctggccacaacggtggcttttgtgaagacaggcctgatgaggggagtgaatctggcagttaggaaaccattgaaaatctttcttgagagtggcttccaaggattggatcatgggtgagagttcagggcttgctgaggaatcatccaaataaatgcttttgtaagctacagcaaaatgtaagtgagagacagaagtctccaaagtatttactgacagagatgttcaatatgccttcttcatccacatcataaatttaatttttctctatggaaatgactaaggtaaaacagtgtttgcacaactggtcttatgagactcacctggggtgcttgttaggctacattctcccagtctccctcttaggatgagacgtgggaacctttaatggtttttaacaagcactccagattatttttatgatcaggtacacttgggttacactgagataggtgaaataaccatattttgcctatgaaaaaataactcgaatgaagccatgaggagaatgagaggagagccttggggatgtacacccaggtctgacttaggctttggttctttccactggaaaagctgtctctgcagttccttcaattcttgaataagttaagagtttttcatcttgatcttggaaccctcaaaatagggcaagtggtcttggggagataaataaccttatattcttcctgttttgggaggtgttcatttttcactttttatctctgtttatgtttcttcttctttctggagacagcatttcactctaacacttaggctggactgcagtggtgcaataacagttcactgcagccacgacctcctgggcacaagcaatcctcccacctcagcctctgagtagctgggactacaggcatctgccaccatacccggctaatttttaaagtatttttgtacatttggagtctcagtatgttgcataggctggtctgaaactcctggccctccaagcagttctcctgcgtcagtctccctgagtgttgggtttacaaaggaaagccactgcacctggctgtgtttgttctaaatgccataccttttttaagttcaacttttatttcagatacaggaagtacatgtgctgatttgttacatagtatattacacccaggtagtgagcatagtacccaatggtagtttttctttttttttttttgagatggagtctcgctgtgttgccaggctggagtgcagtggcgtgatcttggctcactgcaacctctgcctcctgggttcaagcgattcccctgccttagcctcctgagtaggtgggactacaggcatgcaccaccacgcccggctaatttttttttatattttagtagagatggggtttcaccacgttggccaggatggtcttgatctcctgacctcgtgagccaccgcacctggccscaatggtagtttttcaactcacccccggccagtactctgcagtgtctattgctcccatgtttatgtccatgtgtgctcaatatttagcttccacttataagtgagaacatgcagtatttgattttctgttcctgtgttaattcgcttaggattgtggcttccagctccctccatgttgctgcaaaggacatgatttcatctttttatggctgcatagtattctatggtatatatgtaccacattttctttatccagtttactgctgatgggcactagactgattccgtgtctttgctcttgtgaatagtgcactaaatgctgtatctcattgctatcctctggtcatccctgcattcagcctgaggactttgttttttagcattatctgtctacttgatgtttttcttgatctacattatgccaatgagcacctctttcttagactgtgattaggtatagtagcaaatctttattgctccggtggtgcttcttaattccaaccacagcagaaggggtgcctccattccagagacatgcttctggggaggagcccataatgaatactacagctggcttgtaatgcaagagagtcttggtcaacttgcggctttactttgaatttatatacattgtgcatcaagtgatatagaagagataaagttgyatcttgtattcctgaccaggaatataactatacatgcttacagtgtgcatggtctttaaagctgataaatacacataatgaattcatagaacaactgtacaagtcatcctttaaacaactatttaggccgggcaggtgggatcacacctgtaatcccagcactttgggaggctgaggtgggcggatcacctcaggtcaggagttcaagaccagcctggccaacatggtgaaaccccgtctctactaaaaatataaaaattagccgggtgtgatggcgggcacctgtaatcccagctacttgggaggctgaggctggagacttgcttaaacccaggaggcggaggttgcagtgagccgagattgcgccattgcactccagcctgggcgacaagagcgcaactctgtctcaaaaaataaataaataaaaacaaataaataatttatggagagtctgctctgtagctggaggtgtatgttccaggcagaaggaacggtagatgcaaaggccctaagcaaaaattttgcatgatgtatttgaagagttgagggggtctgtctatggatatgcaaactctgaaaagcctgttagacagtctaaatcaggtaggtggttaggtatgtatgtctgcagttcaggggagaggcctgaaaccagatataaatttgggagttgccaggatatagatggtatttaaagctatgagactggatgagatcaccaaaaaaattacatgtaggtagagactattttaagagataggaaagataagaaggaaccagaaaatgaaactgagacagaatagcatagaactgagtccaaaaaaaaaagagcgtggtgacctggaagccatatagagtgtgtttcatggagggcagaaatggctggtcaggtgctgctgggtggtcaagtgaagcaagacctgaccacgggatttatcagtgtgaaggtcattcttgactctgacaagaaccattttagtgaggtggtaggggcgagaacttgattagaaatagttcaacatagaaggagaggaagagattaggagacagtatataacaactctttcaaggagttttgttgcagaggggcaagaagtagattggatgcttgaggaggagaaggattcattttgtttgatctggtttggtttttaagttggggaaaatagtagcaggtttgaatgctgctataacaaaatactgtagactgggtggtttatagacaacagacctttatttctcatagttctagaggctgggaagttcaagatcaaggtactggcagattcagtatctggtgaagactgattcttcacagaagcactcctacatggtggaaggggcaagggcatctctggggctgcttttataaaggcattaatatcataagtgaggaccccaccttcatgaactaatcacctcctaaagccccacctcctggtatgatcaccttggggattaggtttcaacttatgaattttttggtggggacacaaaagttcagtttatagcaaatgctgatgggaatattctagtagggaatgactgatggtgtgggagtgacaggagacatttgcaggagcaagacctcacgaatgcgtaagggggagctctgttgcttaagtggaggtgttggcggtagatgggagtgtggacagttcacttgcactaacaggagggaaggtggaacccatggtccaggtactgttgcatagatagaggtggtagggggaaacaagctgatttctcctgtttttccctatgaaataggaagcacagtcaccaagatgtgtgagcttgaaagagctggcatcagaagtttgaggaacagggagacatgaatggttaacatggttcagtggcataatggatagactagggaagggtgttatgattgttgagcattgttagtagcctttttgaggttggtggtcgttaattaaagtgaggatagtcaacatggtatgtttctcttcagatacgttcaactgcacagatgtaggagtgagaaaggggagaagattgactttaaccagttcttccagagtgtgacatgtgagaggcagggtagggagttgaggtgtgtgcaaagtagtgcttaagatgaaggactgtgggattttaactggttaagaaagaagtgagggcatggtggtagtgaaggttgtagtatcagtggcttgtaggttctcatagggtcagaagtttcttggagtcagggaagtagaggaagtgagctgaaaagagaggggttggtggttagggggttgcggtgatttgtaatgacaaggtctagagtctgaccacaggagcagctgaagcaaggtagatagatattgaaaacccaaagaattgaggcagaagtatgttaaatatgttaggtggtgacagtaaaccagcagctgaaatcctccaggatggggctagttacctaagggtcaattagatgtctactaggaggggtaagggacaaaacagtctgatcctgaggattttcagagaggagaggaaaaaagtggtctggaaatggcaatgagatacatggagtccacttaccccattctgagcaagggttatgggagaaaaaaattatctgtgcttctgtagggaagcgatatcctcagggaaagcccggtttctatgagagcaaaaagataagtgaacgatcagggaagacagtgtttcaggggaaaggctttcaggaggtatgtaggtagaagaggacataccaggggacattgtgttccttatgggaattagagtgtggaatgaagggtgacctatgagtcaggggcttttcataagttacataaacagataaagggcatattgaaattgtcttggtccaaagacagtggtggcaagagtggtagaaggccccctcttcctttctacgaatagaggcctggacatgggctggttttcttttgagcatgtgggataagtgcccaatatcttagatatctgttaattttaaaaatatttttaatatttacaggtcattagtaattatcagcactttagatgggagaattgctgccttggatcctgaaaatcatggtaaaaagcagtgggatttggatgtgggatccggttscttggtgtcatccagccttagcaaaccagaggtaagaattttctgttaactgttgactagaaaacttaattctaatgagtaattgctgatattaagaagtttggggccctattgcccaggtttgaggcctgtctgcctcttacagtttgtgtccctttagggcaattacttaacttttctattcctcagttcccctcttgtgaaatgagatggataataacatcttcttaggattacttggggcattaagtgagttaatcctataagtgagcagctgaggatactatctgccatatcagcaaagcacattatctgagctataaatgattgtttattatcatcacaagatctctaggaataataagataaatataaataaaaactttattgaattttactagttagaaatctgtgctgcaaaatcccataaattattattccctaattataagcagaattcayctgaaatttttttgtaatgtaattccaggtaaatttgattatttgcagaaaaagtgtacttaataatttggagctctagaatagtagaggggaaagagcatagattcaaagagacctcgcttccaaaattactctgtcacatgacttcaagcccctcagagctttagttgttctcatcaataaagtgaggacacagcctgcccgcatggggtacagatgggggagattaaataagagaagctgattttcctcacctttagtttcaattctgatggattaagtctctctgcttttctggagctttagtctgttgtttaaattacttaaaaataagtccatcttttgagtggtgactactaacattgaagcagtcacctctgttttccagaatgcctgtggccttcttttatatcgagttgttcttgtaggacactccctagggtagtcttttttctcttttgtcatcagtctttttctttaaaaagcttcctagctgatattaagtatggaaaagacaaaatcgtacatgaggggtttgagaatgacctgaatattggtgaccaaactttccaatgggaaactgctaccagtgacgcatctataataacagactttcctgtgctttccagtaaacccagcccaaatcttttctggtgcacccaaactgatatttaaggaaacaacactgccaaatttccacatttkctgtgtgctgaaccctgagtagactttataagtggctactgtttctcagtatactgaaaatatattttgagaatagagaacttctattgtattatgaattattaatacaaatagcaatttgattgtaaattacattaagtttataattgagtatggtattcaagtgaattactacttaagataaacttgtttatttttcttctgctgggattatgcttgggtatgcatgttttactttatttttaaactagacataagagatgatcagcaaaatgagaagattgtaagctgcttacatctgaggtaatatcacagtgtgttgtagtagttcaaagcatgtgtgtgtttgcaaactgaaatatatataggtacaaaaagataagttgcatggtatggcaaagtagaatgcaaatagttgtaataacctgagtgctagtaagtgtgtttgagttataagcagctagttgtatttgaaggttttcttacacatagccgttatattagctgtttttaaaactacagttcaacattcttactgtctttagttcgcaccattttctgtggtttattagggctcccttgttttcagtgtcctctctcacacccacccacccccaatcctagatcttttggataaaatttttgctttgaaatgttgaatcgtaggccgggcgtggtgactcatgcctgtaatcccagcactttgggaggctgaggcgggcggatcacaaggtcaggagtttgagaccagcctggccaacatagtaaaaccccgtctaaatacaaaaaattagcaaggtgtggtggcaggcccctgtaatcctagctacttgggaggctgaggcaggaaaatcacttgaacctgggaggcggaggttgcagcgagccaagatcgtgccactgtgcaccagcccaggcgacagtgcaagactcccatctcaaacaacaacaacagcaaaagaaatgttgaatcgaaagccttttcagaaagctcactggtcgcttttcatgcaggaaaagaatcctgatacctctttgcattatctagattttcattttctacttcatagaaaaaaaaaaagaaaatctgaaggtattgaaacagctgcgataacatgatagattaactagattttactgctgccccaaattcttgggaccatttcttgagagtggatgtttaatatgtagagatactgatgatataacgttgttcccagcattgtaacatatactcgatgctgcttacacagtgtaatcctcatagtaacccttctgaggttgataagttggtcccattttgtaaagaggaaattgcagctcaaataaatttgcttgaggttgctgaccggctatatatatggatgaagttggaactgagcccgagattgcctgactgtactccattctgcctgctctgaagcccttttgccaccttgtatatacctccctttctttacaagctcaggctcttcatagactacagtggttctgagactgtttggtgtcaggacctgtttatactctaaaaaattattgagggctctaaagagctttttatcaggctggagtgcaatggtgtgatcatatctctctgcagccttgaatcctgggctcaagcaatcctsctgcctcagcctcctgagtagctgggactacagacatgcaccaccatgcccagctaacttttttttttgtggagacagagtctcgatattgcctaggctggtctcgaacccctgggctcaagtgatcttcccaccttggcctctcaaagtgctgggattacaggcataagccaccacgaccagcctaaaacaaatgtttaaaaaacatgtattttattaaagaaataacaataaacccactccacaataacrtaacatttttatgaataataactatattctttaatacaaaaaatttaatgagaaaagtagcattttacatttttgcaagtctcttaaatttttggtttaatagaaaacagttgtatccgcgtctgccttaaatatattgcattgttgttttgatttaactacgtaaagaagaaaatccagccacatacaaatgtagttggaaaagggaggaatattctagtagccttttcaaataattgaggccattcttttttaataatctgccaaaacaagtggaagttttttaaaggttagttgcagtgtggaatcagaaaccatatcaatgaacattttatactctgaacactaacatccattggtctgtcttgccttttactcatgcatgattttataacttagaaaatactgactgagttacatagatcttttaaatgttggcatatttccttatagaatattttttaaaaaaacaaatttgttgctgttaccactgatctcatcagaaaagtctgtaagtactgggaagctgtgaagcgcaaattggcagatccaagttgttttgttttgttttgttttttgtcttttagagacagggtctcactctgttgcccaggctggagtgcagtggcgtgatcatagctcacagtagcctccaactcctgggctcaagcagtccttccacctcagcctcctaagtggctaagactataggcgcttgccaccaagctcagctacctttttttttttttttttttttttttttgtagagatggagttttcttattttgcccaggctgatctcgaactgctgggctcaagctatcctcctgcctcagcctcccaaagtgctggaattacaggcatgagccaccatgcctggcccaagttttccagtattctagaattcacttaaaaacataaattttatcacaaataccgtcagatgtgttctttgaagtaaaaagttcactttgttcattttttagaaaatgtctaccaaatacccagttgacttttgagtaaaattggagctcaatgaacaaagctgctagttcagctcacaactcagttctagaagtgcttttcctcaagacatgctttagcatgtggagaaaggcttgttacatacttcctaattagtcatgcagaataataaaaagatgtgttactcagggtcaagatttaatgaaatcagtcatttttattgcttcatcaagaacatttgtaagtggaactgtctctgtttttttcctttagttcaggtgtatgacagtgaagaataccattgtattcttagtttggttcctgaattgtgccaaggcaccggcagttttagtcagcattgcttttataccttcagggcaaatagcaacctttgtgaaaaggcaaatcacaccttgtttgaaaactgtgtgctattttgcacccctgaaagaatccacgaaccatactttgaaaattacttaattggtatatgatagaaatataagaatatttgtgaaattataaacatattagcaaggagagaagactgtattgtgagcatgagtcatctgttattcagcaaggtgtgtgctgctcagcatctagaagttatgttcaaaagttgaacatttgtccagttcagatttagaaaaaaaaaaagttggacaaaacaccacaaaaggatcatcaaggccgggcgcggtggctcacacctgtaatcccagcactttgggaagccaaggcaggtggattgcttgaagtcaagagttctagaccagcctgggcaacatggcaaaaccccatctctacaaaaaatacaaaatacaaaaaaaaaaaaaaatacaaaaattagccaggtgtggtgacatgcacctgtagttccagctactttggaggctgaggtgggaggatcrcttgggcctgggagacggaggttgcggtgagtcaggtcacaccactgcactccagcctgggtgacagagtgagaccctgtctcawaaaaaaaaaaaaaaaaaaaaaaaagaaatcaaaaactgccatttgaaatgctgtgaactggatgcatagagtaatactaccttcaaaatgcatctggtgcagtgttttcttaaggtccttaaccttcataatagttaacttttttaaaagtagttaacttcctctctcaraaacccagtgtgtttggttgtaaaggctggtgtagggaagagggccagttgtagcaggcagaaagagctggcatggatatatagcaggtgtcacctcccaggtaacaataaataggttcatggcttcctgtggggactcctgtgttagaatgtcagtttctccaagctttcatcaagaatggtatgaaagttgggcacagtggcacgtgcctcctgagtagtcgtcccagctactcaggaggctgggcccagttgagcccaggagtttgaggccagcctgggccacatagcacaaccctgtcttatgacgaggaaacagatgtaactcagaagaccagagaagatgtattctctgcaactatcaaagttacttattaatctgagaagctgaaggataaaggatttgatagactgtataataatttttaagttattgataaaggaattgattatggatcccatgtacttttgctggaatactaaagccacacaggaactttttagactgtgtggtattgtggaggagggactaggattcaggagcttcagttttagtcttaattcttccattaacttactgtgtgaactggctaaattatttaatcagtagagctttaatttccttctctgtaaagttatagaattggactacatctctaaagataatctaacttcatgcatcaggtacagtcacatacatgaaacacccaagtaaattatctggagaaatttttgaactttcccttttactacatttaaggattcttctgaaaataaagaacaaattcactaggaattaccattaggtacatacttgcctcctggcttgctctgatgttcttaaccttttctgatccaaaaggcttacagaatagtgtattttgttgctttagtgggattttgattacgtcaatggaaaaaataagctcctggaagataagggaaattgacagttccactaagaacagatgttttaaattayatttagaatgaattgtatgaattgtgtaccttgggacacacatctcatttgccactatctcctgaaaagagtgtggatacataaccaagctaaaaccgttaaggtgcatgtttgtgtgtcttagaataaataatgcacctaaagttcactctattagctttaacagatgtgcttaggttctaagcataatatttttgccagttaatagtagctaagaattttgtttttaattttcagatgtgaaatctgatttgctttcctctagtaatttatattcagattcaaccttgataaaagcactaaggaaatttgtctgtgattcctcactgattgccttaaaattttgttttgtaacacatgagcatcgttttttctttaggatctctgggctacatttggatcacttcaccaaatctaagtagattgaactatctacttctttatgtcttggaactcatttttaaatatgaagaccttccttattgttattcagaatgcatattgtaattgtgtatatataactaatttgtacttagatgaatacctttatctttatttagagataccatatttgttttctgttttggttttctgttaaatatgccctttttttcctcttaagaagaacaaacaactctatcgtctaaacttagataaggtttggggttttgctttattttaggcatgtttctccccaagggacaccgcctttctgtttcagacaggtgcagaaacagacagctctgatgctggtgctctccagcctcctccccctccccatatcagactacattccactaatataagggctttgaaaagtgggactgcctttgaaaagggtacagctttactggttactgatttgtttagaaagagtctattagtagacccttttaagtatttattaaaagaggatctgtaatctcttttaaagcttctcttacttttactgaaagctgtccaagttgttttgcagtttttcatttgcacgcaaactagcacattttgagtctgtgtcatctaagatggcagtttattttgaagcatagctgtcaatcatgtagcaagccaatatttaaataattgcctgggttaattgcttttcttttaattatagaaatgaaacagtgctttaatttaattttgttatattaatcccttagcatggctgaaagcagtgctgtgaactaagctaatttatcccagcattgcatgtcaccaaaggagaaactgatttggccctgktttttttattttttwttttwtttttttaggaaattgactcttcatgtacattgtttatgtcatgaatatatattaatctaggtgaaggcagagatagttattaaaatcagtgttcttttatcatgactgtgagaagtatgcttaaaaagctagtctggtagtttcccttgaggcattttgttttgtaggttgattaaattagtgaaaaaaagaattaaacaattgttatcaacttgatatttctctgctcttgagtactaatttacattttttaagataaataccaaatcattgcagaggtttttctcaacatttaagcatatagcatatcacttgggatgcaatctgactaatacccggatctgctgaacaatctcattacccctcccgttagggcatcatcatctaatggtgatgccccttcccttgtctttcaggtatgattcctggagaccctttacttttatcaaacagtcttccttttactttccccaatgtttccagggaagtaaaaatatatatttccataatacaacaatgttgaagcatcttttttttttaagtcacaaatagtcaattctgatatctagtagtgtagtcagttgctcattttggttaattaagatttactgtttatgttccattcaagtgtatcatttttgaagaattaaaatatacagacatatacttgttaatttttctttagcactgattgtctttattgattaataaagtactttcaatccgttagagtttttatgttacaatcaaagaattttaggcttgatagagctttctgataaatcaaaaactgcagcagtttgatatattctacactgaattaatctttatttggttttgaggccttgtttttaaacagatgtgaatccatgtttgggaaagaaataactgaccttgcataattaagctttctgtctgctcccgcctttaatttacttgtggagcaggtattctctagaattcaaaaagcttttgttatttttgaaattttgtattcatgaataatagttctctcctgaagtttccaatagagaataaaataaagctcacaatgaattataggtagtcacatgagctagactgagtttatatttttgcttttaacttttttctttcataagtatacatgtatatatacacataaacacatacaaattaccttaraagttcaaagtaagcagccctggatcataaacttttgtttgagtagcactttatagtttgtaaagtgatatctattcttagtcatttacatagccctgtgaagtaaatattcttattaaccctaattttttgcatgataaaatcggggatcaaaaaggttcagagatttatctgatatagtaaaggtgagactcaacccgagatctttgtacttacatctttccctctttccaacatttaatgctttttaaaataccttaatgcttaccaatttatttgtattttctctactaataattcttcatgtgctttatggagattaattactcaaagacatcttgcgtacagcatacttagcacgtagctcagcacattttgagcatctaaactgcttctaggacaaccctagtgggatagtcacaggcaccaaaacttaacacatccaaaactgaattcagcattgcgggattgcaggagggaggcgtgcagaattgtgcactgcccaggacagatgtgattcttgcctttctagaacttataaggtactgtgtggagccagctagggaggcaaatatgaaataattatagtacaaataatgcaattgagtgtggtaactggcacaaggcaggatagagcacaaagaaagactctaacaagcataagtgcttacctagcctgatggtcaaagaaggcctctcttgtatgatcaggagttactgaggcaagagatggatagagaggagggggaggattatgctgggagaggaaatagcctatctcaaggccttaaggcgagagttatcatggcatgtttggggaactgagagaagttgaggatggcaacaggaatgagggttgggagagagcagccgaaatgagcccattgaggtrggccaggatcaggttatgcagggtctagtaagctatgttagacattccagattttatcctgagccatgagaaaccattgaaggtttaagtggaagagatcactctgactgtagaaaatggactgaaacaacagcagaaattgggagactatttctagtctcccacactagttaagagactgcatggtagtcatccagatggggatgatagactggatggagacagtggaaatgagtgaagtaaagtgacagattcaaaagatgtttaacgaggaagataaaattacaagaccaaaggaggatttagtagtaaattaagaacaggtatagaaaggaagaacatgtgttgtttagatatgagttgggagagaccatgagagctctccaagcagagatgctaaagaaggcatttgactttatgggtcttgtgctgacagaggaaaagtctgggctgaagttaaaattagaattgcttgtgtcatgggaactgagaagatcaatcaccttgaaagaaagtagggtgagaagacctatgaccaaagctttgaagtccaacattttaaaattgagagagactgataagttagagaaaattgagagaaaaagtgtttcaatgatagatttgttttagtaggattttagggattatcctgctttccttcagatttttgcatctgctacttggtgtgaagactttatgaatatgtataaatataaatacttccataattagagataactgatttataatgcaaatgcctcttcaaacaactccttgatttgttagtcttattgaaagttttgcagcaaaacagaacatcagaaaaccctttccactgtcaactggggaacttggaaagcagtgggaaaaagcaggaagcctgtggatgcccaaagtgataaaagcattagtcagtggttgaagaccaaaaaggaatcccttttaagttagttgtggagagcgattttgagaatcaagtgaaataaggaaacgtgagacattttgtaaaacagtgaagtgttcgtttttatccgaggtcacatagtaaatgagtagtagagtcagggacccaggggatggggctggatgaggtgcagtcagctggtctggttggtatggatacatcttgattttatgttttggatgtgtgctgttgccccatcaccttggtttgcaaaacaactagtatggctaggaaagtaattgttctaggcaaaggagacttccagataataaaaaagtcaacaatttagcatttttaatggcatatttttatttttcttttttttttactttaagttccaggatatagcagaatgtgcargtttgttacatargtatacatgtgtcatggtggtttgctttacctatgaacccatcatctaggttttaaaccccacatacattaggtgtttgtcctaatgctcttcctccccttgctccccacccccgtcaggccccagtatgtgttgttcccctccctgtgtccatgtgatctcattgttcaactctcacttacaagtgagaacattaatggtgtattcatgtatttcacatcttcccaatcttaatgagttgtatctttttatttgtaagttgtaagaattatttatttgtaaatattgtaagaatgttattgtattatcctagaaatgctctctggggttcttaggtgggacagggatgtgtgcccctttaataaatattctaggataattggtgttttacactctctttcttcatggcctatgttcattcttccttatctctacattcagtgagtctgcatcttgccacactctttttcttaccccctcttctcctttttaaaccttgttgcttcttagcttatacacagaacttggcttttgttaactatcagggccagtgtgttcctggttagggaacacactggtctcaccaagtctcctgaacccttttcaattttcagttttatagtgggtgagttacttctggatacaatttttgggatttgagagtgtttaatgcctgagtcactaatcaagaaaatgmtartgtatgcaaatctggcttccaaaaccgaatgaggaaaagttctttatagaaaaatcctaactaggccgggagtagtggctcacgcctgtaatcccagcactttgaaaggctgaggcaggcagatcacgaggtcaggagactgagaccaccctggctaacatggtgaaaccctgtctctactaaaaatacaaaaaattagccaggcatggtggtaggcgcctgtagtcccacctactcgggaggctgaggcaggagaatcacttgaacctgggaggtggaggttgcagtgagccgagattgcgccactacactccagcctgggtgacagagcaagaccccatctcaaaaaaagaaaagcaaaaaaaaaaaaaaaaaaaaagaaaaatcttaactaataaatgcagaaagaatgacaaaattagaaattgctattctagttcttttattgaaatagtaggccatcaagcaatactaaaatggtaaaaagttgatgggacactttaaatggagggatcaggctgactcccccaaactcaagtgattgatagtaacatcattaaaagtggggcatgcaaacactatgtgcctcctaatatggtatagcataggggccagcaaacttttcctgtaaagggccagatggtgcttatcttaggctttgaggatcatgtggcctttagttgcagctggaaagcagtcatagacagatacataaatgaatgaatgtgtggctgtgttccaataaaacttttcttacaaaacaggcattaggctggatttggctcatgggctgtagtttgtagacccctaatgtaataggaagtgcgtagcaccagatacgaaggcttcttgtcaaaacaactgaacctgcatcagatcaaagctccaagtctaatcatacttttcaggaaatataggaaataaaggaacaagttaaatgacatgtagaatcctgactgtgggacattctataggacagataatctggtttctcaagtaaatcagtgcataacaaaggggttgaaagaagttcctttgtggagggaaaagaatcagatgtaatatgtagacttggaattcctcatcataaagtagatctttgagataataggagaaattttaaaatttgatgattttactccagtaaacaagtatatagtaggtgagtggagatagatgaaacagttggcaaaatgttgataattgttggaactggatgatagatacatggggatttattaatctccacattctatatgcttgaaattttttataaccagttaaaataaagttgaatgtactccaaaaagtgtgtgagtcagttggggagaggggttggctgcatagaaaaatagggaagaatcaaatggaaaacattttttcttatggttagaggaatttttgttttttaatgctggtagtgctcattttagtagtagtacttcctttattttctcatatgaaattccttcctccactttaaaattaaagttattttcacattttaatttcagatagaagtccctgattgcaagtgccactggtattcattgtaccacttaggttttgttaagaaacagaaacggaattactttactaaactgctttatgattacacagatagactctgggagtttgctagcaccttttattttaaattatgaacagggaaaaaacaataaagaaaataaatacaaaaatttagactttttaaaatgacttaagggagaagcaagtcacacaataagtttgagatgcagagcagcgaatcagaacaaatagctgcttacatgaacaaatcagtgggatgtgaaaatgcatcaccgtaacctacatttttttctaccargagatttgcagctgactatcgggtgactcattcctatgcttagggggtgaggtaatgctattgtgaagggtgatgtcatctctgtacctgaactgcatgcatatattgcttctgtggctctcaaggaaaagctccatctgctttcacatatgcagcctgaaagacttgacaagattggcacaaaggtcagcagccatgtgtatgactcataagcaaccaattagcgaagagcagctatttaaaagtgaacttttaaaatcacaatccagaaatatgacatgatgattcattattgaatcataatgccttgttgttgttttgtgttttgcacttactgagttaatgctgttgagcatttaacttttaaaataaggaagttttctcagtatggtcaatgatatcaaatcttgaatctttaaactatatttttaattgaagataaggttggttggtcagtctgttggttgattggctggttttacttttggagttgcagagaccatccttagggcaaaaatggattctatttcatattagtttggcagttgatttttgcacttaggagacattgtattccctaaggacccgctactgctttagaggaaaagaggtttttaatggaagaggaaataagtcaaaataaacgctatctgtttactgcagacacacttaactcctcttcctcttttagtcatgcacacctgctttctctgtttatactttaacctaatactactgttgagatgaccaattaaaatatctatttttaactttattatttgaatctagtgttctggtaaataaaatatagaatatttaacataatatggaggtagataatggtaaatacttgattttctatctgatatgtaactcaaaatagaagatcatatcggctaaatactacttattgttattatagggtatgtgcatactctgacctaaatttgttctaatggcaacttcaagttggacattctacaaaagataaaaataaaggttttaatttttgagaataaaatttgttatctattatcaggaaatagaaggaaacaaagaataaaatagttatgctaagactctaaggtaatattaggtaaggtatataccagtgtcacttgagaacttactgaaaatcaaatgttttttcagtaatgagtaataggaacccttaaatgtctagaattatggtaaaccttcatttaatggtatggtcttgagtttgattatagagctcctgcaagactcttgagtacctttcttttgtttttaaactcttgtttggaaataatttcaaactacagacagttgtacaataaacgtggtaccaaaaaagaaaaaaaaaaaccttatgtgctcagactttacctaccccaacctggttgcctgctttatatgcttgcccgtgtcctcttgcccactctcactcttctcccccattccctcatacacacttgtttttcttgaaatatttgaggataagttaaatatgcatcatggccctttactcttaaatacatcagtgtatatttcctaatagagatattctcttacataactacaaaagttataagcattatcaatttatattaatacaatgccttaccatccatatgcaagttttgtcagttgacctaataatatcctttatagcatcctctatgcctagtacagcatctagtctagggtcagatattgcatttatttgtcacattagcctcttttaatctagttttttttttcacagccctttctttatctgacattgacatttttgaagaatatggtttctctgttatttttaaaatggaattttccttactttgtgcttgcctgatgtttctttgtgctgagattcaggttgtgcattcttggctggaatactacataggtgatgcagtctctctcagggcatctaactctcattgatgatttttacttttggttatccaatcaaggtattatctccactatgtaatatataacttttgttttttaatttcttgtaactaataagtactctgtaaggagacaccctagaacatgtagatattctgttcttcatcaaagtttccacctcagtttagcaccattgctgactctggtatgacccagtctttactgtgatggtggcaaaatgctaatttttccaactccagcccttccttttccctcatatattatttattttatctgtttgctattggtatgaacatgtgaattcctatttttaaaaattcagtacttaattattttggtgcttaattgtcccagatttggccagtggccctcacccttttcaagcacatccttgttttttgaaagaataagatggtaaaggctcatctcacatctacactgccccagccctggaatctgccatttctctgaggagccctggttccttttggtggagaatgaaattagataacaaaatttgggcaccgggtatgagtgcactacttttacagccactgtataaacataaatataaacattagctgacctggtaagtatttcttggaggtacagtgaacaatttttgaggatatcacggtgtctcggattatagtgacaacaaaaaggaaagttaaggaatgggaagatttttgtcactaaacttacattgccaaaattttcttagatttcaaagcaaaaaaatacatgatgctaggttgaaggctagataggatttctgtggacaaagttggtacagaaggatgttccagaaagaagaaatgacattgacaatgacataactgaacaatatcagtaactttaaatgttgtgtttaaataaccatgcctgatttccacccattgggggagaactaaaagacagggatgaaaggtttatttaaggtcagttttagaggactttgaatgtcctctaaaggattttggatctttaggatttggggtctttagtaagaagataatagctgttgaagatttttgaatagtgtcataacaagcttaactctgactgaaagagattaatctggaagatacatagaagattaaggaaatttccagttaagaactgtaaagaggctattatagtagttaaggcaggatttgaactggatttgaactggaaaataataaggatttgaactggaaaatgaaagaaagaagtgaattagaatagtggtttttaatctgtcttccaaaaccccaggtttggggcaaagtagatgtgtgagttgaacaccaaatgagaactctcagttactgtatgcgagttttcaagtaagtatccctttaaagaaagcaatctgctgcttaaagaacaaaaaactatgtagaaaaattttgttaactcttacttctctcgtattcctgtttcctaaagttttgagcctggataatcaggaaaataattgtgtcattaattgatgtaggtcaaattatgcgttttttaaatgccaaaggtcaatgtcacaaagacatgtactaaaactcttactgaagaaataagatattcttggccagaagtcttggaattatcctggactcctttcttttgctcatgccataaagagaatccaccatgaaatcctattggctttacctttcaattatatcccaaacctgactaccttaaacagctctactgcttatcaactaacctcttaccttctgcctgctctctctgcctccactcttgcctctcagcctgttcactttccttgtggtttttcaaacatgatgggtatgcttccatctaagagcctttgcaaagcctggcctggcgtggttaactctctcacgttaagactttgcccaaacgttactttctcagtggggtctaccctaagctctttattgataatcccctctccaccccatgcgtatttaccattctccctttatcttgttccatttttttaacggcatttatcacctaacataccatataatttacttatttattaagttgtttgtctcgtgacaccagagtttaaccttcacaaaggcagtgatttgtttgctttgctcgctaatctatcccaaccatcagaatgtgccaggccataggtaagcccttaataagcattgttaaaagaagggagggcaaccgagaacacaaaaccagtaagcttacttactaggcttctatctcattgcagatttgagaaagcaaatgaaagaagggatgggacactacttgaatcagtatctctaaacctgtgttccttggagctgagtctatgacagtaattggccttgataaaaatagccctagaaaatactgcatatattatctatttacacattaaatattcatattacacatattacacataatcatgttacacattaacatactaattgctataagagctcctatagtaacctcttcttgaactcacttgatcataaaactctcttttggtaactcacctaccattatgggacccttttggcccatggtaaactgagtttgagaaaaatcttactagagtactatgtgtagggcctgggagtgattggcagttcttttaaattacttttggttgatggactgcrctgcttcatgtgctactcagaaggaggctggagtacatcaggatcaagactccagctcttaattactattattcttttaaaggtatgatgcttctatttttctgggagaaataagaaaaaaataataattaatgttatggcccttttaaaaagttagcttctgttttaggtatttgggaataagatgatcattccttccctggatggagccctcttccagtgggaccragaccgtgaaagcatggaaacagttcctttcacagttgaatcacttcttgaatcttcttataaatttggagatgatgttgttttggttggaggaaaatctctgactacatatggactcagtgcatatagtggaaaggtaagtgaaaatgctgaatttactttggggaaatcagagtaaattagggtagaaaaagtaatttattaaactacacttattattagttgagttttattgtaattttcccctgaggttgtcatttgttttaataagagaactgtgaggtaggaaggggaaactaataacagaataaatggcagagccaggaatagcaggaggaagagaattcataaatatggtytactgtgtctcaggtgtttttttttttttttttttttttgagacagagtctcactctgttgcccaggctgatctcagctcatggcaatcccccacccccaccccattccacaccccctcaggttcaagtgggttcaagcgattcttgtgcctcagcctcctgagtagctaggattacaggcacatgccaccatgcttggctaatttttgtattcttagtagagacagggttttactgtattgccaggctggtctccagcttctggccttaagggatctgcccacttcagcctcccaaagtgctgggattataagcaggagccaccatgcccagcctcaggttcttttttttatacattattttgcaatcttcacagtcttcctaagtgtaactttcgttttttttttttttttttttacattttgacagatgaagaaccttataaagattaatagtaatcctaatgataagaataattgatactactcatttatagggtttgatcctataataaggtgatccaagaggaaagtttatactcattttacagatgaagaaactgagactttaaaaggttcagaaacttccagggtcacatttaacttagatctatctgacaacaaagtcatgctgttaataatctagactttctccaacattagctcttaggatataatcataatataatctgcttctaagattgggtcttataaatccattatcaagagtagctaattaaaagcatcctttcaaccaggcaaggtggctcacacttgtaatcctaccactttgggaggccaaggtgggtggatcacttgaggccaggagttcgagaccagcctggccaacatggtgaaaccccatctctgctaaaaataaaaaaattagctggggatggtggcgcacgcacgcctgtagtcccagctagtcaggaggctgaggtacgagaatcacttgaacctgggaggtggaggttgcagtgagctgagatcacaccattgtgacgtgtaaacggtttatatacagacttggactaaaataaggaagaatagaaacgtggtctttttactcttgcatttttcaactttaacaattccttatctaagtgttaggcccatagcactttcttgctcttgcagatgcttttctgccttctccacccacctgcatctgcattgtgttgaggaggccatgccatcctatctggccgttttttgagcaaagcacttcaatctctgtttacttcggtagtctcatctgtaaacaacaggattgaacccgatcacctggttttccgatttgatgtgctgctacataattctggtattgtagaaggtatgcttttcgtgaggattttagtttggatcatattaactcttccttttttctttagtgaaaatttgaggcagttacttttgaatacaaaaagctctcagaaaagtttcaaatttttaaaaaccaaacacttttgttatacagaaactctaaggttgattttttttttaactcacctgaaattttattaatgatattgtagaaaagctatcacaagtagctatccatttcttcttgtatattctatggaaatctccaaagtaaggctaaaattatgtaaatccttaaaatcattccctgaaataaatattcattggtactgtcattgttctaaataactcattttaggagttggtaatctaactgatgcttcttatgacttgagtacttcatacacatttccttagtttcctttcactttttaaaaattacagattcctttaatatctctgatctattatgagttgtctccttttactaattttgtatctaattttgtcttttcaggtgaggtatatctgttcagctctgggttgtcgccaatgggatagtgacgaaatggaacaagaggaagacatcctgcttctacagcgtacccaaaaaactgttagagctgtcggacctcgcagtggcaatgagaagtgtgtattcagataatgttgctgttggtattatttagaaatacacctaataccaaaatttatcagatttctgtwtgtggagattttgactattttgttgccttaaaagcatatatatatatatttttttgatacggagtcttgctctgtygcccaggcttgagtacagtggcgtgatattggctcactgcaacctccacctcctgggttcaagcgaatctcctgcctctgcctcccragtaccgggrattacaggcacgtgccaccacacccaactaatttttgtatttttagtagagacggggtttcaccatgttggccaggctggtgtccaactcccgacgtcaggtgatccaatgtgggtcctaaaataaaaatggtttcatggttattaacaaattctgaactgaacttctcaccatatgcttcgggatatgataaccacaggggttctcatatgataactattagtttagtctcaggttaatgattttttttttttttttttgagaccgagtttcactcttgttgcccaggctggagtgcaatggcatgatcttagctcaccacaacagctgcctcccgggttcaagcaattctcctgcctcagcctcctgagtagctgggatgacaggcatgcgccaccatgcccggctaattttgtatttttagtagagatggggtttctccacgttggttaggctagtctcaaactcccaacctcaggtgatccacccacctcagactcccaaagtgctaggattacaggcatgagccacggtgcctggcctaatgatattttttatagcaatctcatcattcaaagttctttgaatacagaaagatgttaagacaaaattgatgtgtttctttgagcttgaacttatttgactctctaattatgtctagtaggtagtttcatagtttgattatctcaattttaaaataataatcatcttattcaattttcttgaagtattaaaacatttatttagcctaatacctttctgtttccttctttaaataatgaaccccttatgtaatttttatatttaaatatgtgattaaaaaatgtgatacctagattagatacgctgattctacatcaaatgcttgattttttttaaacctaatatttaagttttaaattgcctttgtagtaaaaataactttagattccatctttatcttttgaaaatgaaccagactttcgggttttgtctgatccgatgcagtgtaattcagtttcctttcctgaaaactgttttctcaaactcagttaagaatgcatttattctttctactttggactatgaatagggctttgcatttacagacaacttgaccttctttatcctgactggattttgtttttttaagtgtttgagtgcttactgggagctyagccaccatagcagcagatgtccaacttaacagatttttgagttaccagaataggaaggatctgggtttctaagatccatgattctttaaaatataattatttccataaatgtcagaattcttaactatgccattttatatctaagtgaaaagacacaatactctcagtagttgagtgatttttctatttactaattatagaggraacattattactgccactttaggataagactgctgaaacttacttaggaaagggtaaatgacttgccacatcttgttcagtggagatccaagattggggctgaggtatcctggatcacattgcctttttgaggccatgttttagtatgaatttaagactggtgcattcatcttgacttttacactggtttgttagggcatattaattttgctgcacttaatgaaatgtatcctgcctttaattaagaggtaaggcagactgtgtgctacctcattttaaggtgacattgatgtgtttggggaaaatcactctgatgtagaagtacaaacatttgtaagtttttgagagaaaatctgtcccwtagctgttgtaagggacacatcaagtcagtccacaaccctcaaaaccattgtgtctgaagggtcaggacaaagttcttgtgggccctcttgtggcataaatcagtagagcactcttttccagaaggttatgttgttagttttctcatcacataattttagtatttgcttcttcaatctagaagagttctatattattttgtccctttctttaaatgtaaatttctaaaacacacctttgtaaatttaaggtggaatttcagtgttggccactttgaacttcggtatattccagacatggaaacgagagccggatttattgaaagcacctttaagcccaatgagaacacagaagagtctaaaattatttcagatgtggaagaacaggaagctgccataatggacatagtgataaaggtttcggttgctgactggaaagttatggcattcagtaagaagggaggacatctggaatgggagtaccaggtacctaacaccactgaggatttaaaatacggttcttcctctcccagtctgaccaaacttattgattgggtggaacgaaattactactacttggggctctcagcttgttctctgtgcttttataaatttgtgattttaaatggtattttatgggttggaactatataactactgcttgaattatttaagaccttttttccatttttgtttagttttgtactccaattgcatctgcctggttacttaaggatgggaaagtcattcccatcagtctttttgatgatacaagttatacatctaatgatgatgttttagaagatgaagaagacattgtagaagctgccagaggagccacagaaaacagtgtttacttgggtgagtaaatgtatcttatctaacgatagtacacattgacatctagattttcttcttacattgttccttcctacttcaggagtgcctgtagtagttttaaatcctaatatcatctctgatgtacgttgcccttgagatttatacttcgatttccattcctgctacttttccatttgtccaattctgaaaatttttttgttgttgttggagatggagtttcactcttgtcgcccaggctagagtgtgatggcatgatctctgctcactgcaacctccgcctcctgggttcaagcgattctcctgcctcagcctcctaagtagctgggattactggcacctgccaccatgcccagctaatttttgtatttttagtagagatgggatttcaccacattggccagaatatagtgcacctgacctcaggtgatccacccacctcggcctcccaaagtgcygggattacaggcatgagccaccacgcccagcccaattctgaaatttttaattactgtcgcatattctttttctctgaggtctatattagaaaggcttagaaatattctcattatataacatgatttcaaattactcattagccaagaatggtggcacgcacctgtaatcctagctactccagaggctgagatgggaggatcgcttgaccccaggagttagagcctaccccaaactataatcatgtcactgcactcctgcctgggtgacaggacaacactctgtctgtttatatatatataattatttataagtaattacatatatgtattacatatataattatttatatgtaattacatataaaatatatagttaggtrtatatcctcaaagtctataattttctgtatttgtatttgcatccatattagtttgtgaccctcccctctttaagattagatttctttcttttttatcagtgcatctgtacaactgatctaaaaaataaaactctggtgtgcttctgggcaattgaaagcctttaatattataaattttgaaaactcttggatctaatttgaactagtctgcatcatcaaatactcataaaattctataagctctgacaatgtgccatccacctgttggtttgaatgaaaagcaagaatttgaaggaataacatgtcatttgtgttatgatagtatttaactgaattgttagcaatatttctagaattataggtgtttaggtaaactttcttgagaaagttacttagtgtaagctatttgttttgtgagagtacagtgacttatctttgaatttttctactggaacaattttcctgtattactgaaaatgtgctattattcagtgagaaatatcatatggaccttttgtgtaactttccctccctgtttttgttgaataaacattgagtttatctttgagtgcttcaagcatgtttcttctttgacaagagttttgtggtgtatgtagaaataactggaattaatgtaattttatttaattaaaaaaacctttttaaaaaaatcaatgcataattgacaatgttctggttgattcaggaannnnnnnnnnnnnnnnnnnntatatactttatattttattgataaaccatgatggtatttcagatgttaataatgaatttttattttcatttagagcatcatttcttggaagcagcagttgcttctaaaaaatgttaatcaaatatttctctatacaacttagaaaaactcttaatcattccctgaccatgccaaagtaacatttagcgcttaacatacttatattaagactgtttaggcaaaagttatctggttagcacatcatattctttgagactgaacgaatagaaatcaaatactgtgcacctacttctttcattatctttctaaaccttgtacgtgttttttactacatatgtcatgtcatattttaattgtttgtttaaacaactcagattctctgtaaaactgtgcttttcaaaggcaagagctctgggccatttgtttaacttatatgtttgaattgaattatggttgaatatcagtttattcaattaagcacgtgcatttttattcaagtcataacagttcagacttaagaaatattattattaagaaaataataattttcttttagattctccttccagaactcctgtcttggtaggatctgatgaatttgacaaatgtctcagtaatgataagttttctcatgaagaatatagtaatggtgcactttcaatcttgcagtatccatatggtaagtgaaaatactgagttttatttattttattttttaatttgaaattaatagaattcaaatgaagaaaagtcgattagagtatagacaataaaacatcttgggagacaatttcatgaatgattactaagcatacaagctccaaagttaggttgccagggttcagatcccatttttgccacatgctaggttgggcacatctaactcccctgtgtctcaatttctttatctgtaaaattagaataataatcctaatatctatgtattgagttgttgtgaggcctaaatgagataacgcaggcaaagtctcagttaacatcatacgtggcacatagtgtcagtaaacattggttctcgttattagctcttatttatcagactatattatgtaggctgtatagttgcctgtataatgaagaaaatgtgtttttcataaaactacatgaaaatgatgcacaatgaggttatcttcttactcagacaagagaaattagtgcaaaagtcaagaataggtgagatttggcatgaaatacattttctatttagtaagcagcagttttttgaagttaggatatattcagatatgaaagccttttaaacagttgtgtaattaagaagtcctcaaatctgtatcaggtaaacacgtagacgactcatcagttaccctagatgttagcactggaaagttattatataaattaaattgattaaaaaaaaatggctctgaactagaaacagcagcctttatcttttttttttttttttttttttttttttgagatggagtttcgctctgtcacccaggctggagtgcagtggcacaatctcggctcactacaacctccacctcctgggttcaagcgattcttctgcctcagcctcccgagtagctgggactacagatgcacgccaccacgcccagctaatttttgtatttttagtagagacggggtttcaccatattggccaggctgttctcgaactcctgaccttgtgatccacctgcctcggcctcccaaagtgtctggattacaggcgtgagccactgtgcccggctcctttatcttgatattgatcaaaagacaagttaggctgggagtggtggctcatgcctgtaatcccagcannnnnnnnnnnnnnnnnnnnnnnnnnnnnnnnnnnnnnnnnnnnnnnnnnnnnnnnnnnnnnnnnnnnnnnnnnnnnnnnnnnnnnnnnnnnnnnnnnnnnnnnnnnnnnnnnnnnnctggccaacatggtgaaaccccatctttactaaaaatacaaaaattagccaggcattgtggtacacatgtgtagtcccagctgctcaggaggctgaggcaggaggatcacctgagtccaggagacagaggttgcagtgaggcaagatcactgcactccagcctgggcaacagagcaagaccctgtctcaaaaaaaaaaaaaaaaaaaggcaagataaaagagaactgtgtagtctgaccacgtagtacaaaatagaagacaaaaaaagacaagctatttttctgggacaaactcattttgacagcctaaactgaaccaaacagcatggatgttttcctttcattttgtgaagaatgattggtggtaaaatttggtattttattgataactaaacaaaaagaaagctaaaaataccctgaaggaagattgagtattaattcttatatttaaagaattgaattattaatgaggttatgaatggagyagcccttaagatttttttctagtcttattacttaatataaagaaaatttaatatgcttataggataaaggaaaatgtctatatttacgggagaaaaatgagacaaattaagatgtttaaaatacgttaaagaagagagacaaaacttaaaaggaattaatgtgataagtcacaggaaaatggataaattttaatagttaaagacgggcctatttttgattacctttaaaaaaaacgttttaatgtttctatttgaagataatggttattatctaccatactacaagagggagaggaacaaacgaagcacacagattacagtcagattcctcgacaacccacattacaacaagaatatccgcaaaaaggatcctgttcttcttttacactggtggaaagaaatagttgcaacgattttgttttgtatcatagcaacaacgtttattgtgcgcaggcttttccatcctcatcctcacagggtaagaatcatggttgcttactgtctggtttccacttccccacctcctatttgcttctcaacccatcacagtctggcttccatccctactgctccaccaaagctactcttgccaaagttctcagtgatcttccttgtgttaaatgtaatggacatttttcagtccttatctaactgaacctctttgtatttgrcmctgttgaacatctccctttgacctttcttgcctgacttccttgacaccatgctctcctggtctccttgggtgtgatgtggatgcttyaggacctgatctttctcatcctctcagtattgttggtattcctcagcactccctcttttcactgttcatcccacaaactctccttagatggtcttccctactttcccagctccaatcttcttatatactaatggttcccaaatctgtttctctggaacagctatctagtaagtgctacacaggcacttcaaatgagccatatctcagactgtcctcatttcccctcccattcccctcccctccccagcctgttctagcatttttctctctcaaagaaacgtactgccgtatgcagtcacgaaagccatgaaatcattttgctctcccttatcagtcaccaagttctgtcgaatccttcctcctagatatcttcacatttttcttcttctctatgtgtcagttttcatttccacagcacaaataccatcatcacacctctcctgaatcactgaaataacttctaactggcctctgtgcccctagtcctcaggctatctccagtccattctccacaccctaactctagctgcatttctgggcttaaaaacctctaatacctgaccctcctccccattgttaggctcaagtccaaccttcttaaaacatgcaaggttctgaatgattcgtaccctgcctgcacgtgacccatccttcactggtaccctaatcccttcctcccctccaccgtgctcagccactaggctgagctgctttcagtccttcctgtagaccgtgctctcgcttagcctggtggtgctcatccctctaacctcgccttggaaccttgttccttacctcctctcccttccctctcaaataattaactcctgggtaatatcttttagtttgaaattagttgccacgtcccctgggaagtcttctttaacctcttatttctgagttagatttcctgcctatgtctacactctgtactcctcttactagagtatttactaaaatatttaataggtaattcctaatttctctctctacctctagactgtacattctttttttttttttttttttttcagagacagggtctcactcatctcactctgtcacccaagctggaatgcagtggcaccatctcagctcactgcaacctccgcctcctgggttcaagcaattcttgttcttcagcctcccragtagctgggactattggcatataccaccacacccagctaatttttgtattttttgtagagatggggtttcattatgttggtcaggctggtctggaactcctggcctcaagtgatctgcccacctcagctttccaaagtgttgggattacaggcatgagccaccacgcctggcctagactgtacattcttaaggacaagaaccagtctacactgtttaccaccatctcctcagccccttacacagtgcttggcacataattggagctcagtaaagatttgttgaaagaatcagtgactaaacaggtgacccacagtgccccaatttgaccatgataattattaacatcctctaaaacatcttttaggagatgttggtaaagaggcattgcctgatttaatttcctgttcttaaaagcattttaatgcaatctatgaaactggttaggaaggaaatctctctagtctttttgttgttgttgttattgttactgggttttttgtttgtttgctttttttccctaccttattttgtcaaaagaaatcactctagtcttgcccaggagtttgtgtttatgcttacatgtgtgcattgtctttctatctagttatgtatcatgctgtacatatgacatacccacattataaagaaacaaaatcccctcaaagactggagggatagcagtgggaagataaactttttttcttttataataaagcaaaatgctgcactttgttttcataatgcttttatttttcttgatgctacttatgtatttttcagtgttgtttattttataacctaaaattgttagctaacttcagttcagctttgtactggtagtgawtttgtttttcaccttatcagcaaaggaaggagtctgaaactcagtgtcaaactgaaaataaatatgwttctgtaagtggtgaagccaatgacagtagctggaatgacataaaaaactctggatatatatcacrgtaagwgtcttataaaatacaaccatctgaatcaaagaagaaatgacctaagatcttgtttaactttttttttaatgtgtggatatctagaaaaataaaacataggcttaaccctcaataaataaataaattcaggtaacttaaatgtattaaaagtggtatataccctaagaaagataaaaatagagtgttataggaatttagaatttcagctaccaaattaagttcttattcaagtaacttagttatttagggtctactatgtactaggattagcatttatagtaccagataataattaggtttataagagtgtgatatgagtctccacgtttcggaatcctcatttattttcattattgttctatctgtaataggaagtagaaatatagggaaaaaaacactaatagaacagatagtttttaaaagcagaagggggagatggattagctaaaagtaggcagtttaaataaaagtaaagaagctattagcaatctctcaagtataaaatgtcacctttgatgcattgtgataactggaaatggtgttatggtttatttttcatattacatggattatacctatttttctctttgtcttgatagcatacttcttatcactttagtgatatggggacaaggaaaagacgtggaactatactgcttaatatctagggtaatgattttatggcagaaaagattgaaaataatagataaatatgtatattggggccctccaaggaaacagaaatgacaagatgtgcatatatatcttatacataggcatatatctttatatatatacttctatatagatatagatgcacaagcatattcacaacaaattaaggaaatacttgtgacaattacagttctcatttttgatacctgtcatgtggtcacagctggtagttataagtaccttcctcctctatccatcccatattccctttcccattggagaacaacacctcagccggttgtaattctatatctggtagggtgacccaaatccacagtcctgaagggtctgggagattggtagttctgcctggattggattgttgtagttttccattgaccttaatcacaaggcatgattatacaaagagatccctaagggatctcatgtatttcagacctactctttcttacacctccactgtgaaacagcaatccaatttccccttagtagtcaggattagtcatccagccagcacagtagctgtcttctttgttgattggaaggcatgaggagttcaaagttgctgttgtatctcctggtggaagtgttcctctcycttagacaaagacctctaggcctgccgaacataaggtcacaggaacaggaagcaaaaatgttgccagtggatcactaggtggtaatggtgggtgatgccactcgcatttccatcccttgatccctggacctgtaaatactggctatgggagaaaccatgctataatatattagacactgattcagagcatatccagctttctggagaaccctggcccagccctgcaaggtacctacctggcagtgtaatggagtcttaaaaggccattctacctttctgtcaaaccagctgcttcaggatggtggggaacaggtaaaaacagtcaatttcataaacaaagcaaaatttactaggtgattaacaaatgctaaaggctactttaatacctttgctaataaaaatactaatatatcagtgactgtcaacaccagcaggcagtgagagaaagaataaaggatccaacaactcccatgaggtagtctactactgaagttattcactgttcattaaacatttattcggaacarctgtgtgcaggacaatatttcaggctttgggagaaataaaaagactgctcctatcctggagaagcttaaagtctatgggaaagatactactgggtaaaacaagcatgtaagaagaaagccatgaaccaaatcactaaatctgtttgtgatgatctaggaggacatcataaatgaagtcatatttgaactgaattttaaattgtgagagttcggcaagtagagatgaggtttggggagtagaataaatgcggtatcatgaataaagatgtatttgtcaggcttttgtcaagaaaattagaaaaatatactcaaaattgaattagacttaagtcagtttaactttattcaatatgaagaatgcagctcttgggtcttttttttttttttttaatatgggagttctataataatacctaatgttttttagtggcgacaatgtcctaggcactgttaagaacatgaactctgcattcagtcatgagttcaaatctcagctctgttatttatcagctgacaacttaggcaagatgatacttacatttctagggtctgtaatcacatataagatgttactctttttagaagataatccgtttttatataggtgttttccttaatatgggaagataattcagctggccctccaggagtaggatatgaagtttgtgggcttttgcatttggggagactgatttgtactgaggtaccttgactggctatttttaggaatacagattattactcttcattttctatgaaaggaattggcccatggaacgttgaaatctattgcttctccttaactccatgctttaaccagctgaggcaactactaaataaatgagtatgtaagtcataatgtaagtcttaaagtaaataatgagtatgtaagtcataaacttacccttataagggatatcagacatcatctaatttattcattaattcatgcatttattcaacagacatttgttagactttcggtttgtcaggtagtgcccacccattggaaatacaaagagaaacaagaatgattttctgcattcatggcccccawaatacagtggcggtgggagaagggagctgcttacacataattgcaaaaaattaagattaagtttaaatacttcaaagtattatgtgcagagtgttatgggaatgtcaagacaggggtctaagaaagccttacagaggtgaggagatgagcagaatgaaagaagaatagggttcattaaatgcaaagaggaaggccatcccagtggagcagacagcagaagcaaaaccttgaattgtgagacagcatggtgcaaattgactggatgatacagtgcaggtcagtgaagtcagcactaaagggagaaacaggctgcttagtggaggcccctgtgagtgacagatggtgagttggcttctgtttgacttggtacctccagtggtaggtacactgactcgtggggcaacccaacccatgtcagctttggttcctaggaaggtttatggctaaaatagtacctgggtataataggactgattaaaattttcccataaaattgacaggtaattagctaagataaaaacacattttctgtaattgattacaaaatgtcacagaatgtaaaagatatgaggattaggaatatgatattttggtagatgataggaagtattggacagcacacatcactagtgcagcagttgtaagaaaaagtgattaacaagtgattcccaattaaacatgtcttttttatttttaatttttttctaggaaacataagaatgtgtttgcttcatttatacaaacaggactaaaaatgctgttaatcaaattcaaaatatactatttattaagatgagttctatgagtttatacatttttatgtgtcataagattgaactgattttcacattaccacaaaatttaaaactgttgcaaacctttataaattttatctctttttaaagatatctaactgattttgagccaattcartgcctgggacgtggtggctttggagttgtttttgaagctaaaaacaaagtagatgactgcaattatgctatcaagaggatccgtctccccaataggtaatgggtggtaccttcagtaaacttgaaatcagcacagtgtgatctaatctcatgggtaaaatatccttcttactgtactctgtaaacaccatagaaaacagtttcagacgtttcaaatcttaggttctaagtgctgccaattaaccagctgtctaaaagttgttatctctataggttgctttctatctacttttaaaatatgcccttgttttttattattaactcaggactttcgtttagtggcttataataactgtagaccagtaaattgcagcattttaaaacattctatatttttgtataaataaggaaaagtactagaacaaaaacatttgaattatattgtctctacctggtaataactattaacactttagagtatttccttttgattttgttttctggtcatatatttacctaactggtagccagttgccagtactgtacagttttgtctgttgctttcttcatcatatcctctatatttttcatgttattaagaatatgttattagaatcctaaaatatattaaaagtattttatggcttggtaatagtccatttaatacacgtgccatattttgtttaaccatttcttattgttaaacaatttggtttctaatttgttagaattagaaataactttaccataaaaaaaacctttgcagtattcatctttttatgtaccttttgacaatatctatttccttaggatagattcctagaagtgtgatttctggctcagaacagtgtgatgcttaagatgatagggttccagcaataccttttattctaactatgtagaaggcccttgttgcttttttttttttttttgagacagggtcttgcaccgtcacmcaggctggagtgcaatggcacaatctcggctctctgcaacctytgcctccctggttcaagtgattctcatgcctcagcctcccgagtagctgggattacagacacccaccaccacacccagctaattttgtatttttagtagagatggggtttcactatgttggccaggctggtctcaaactcctgacctcaggtgatccacccacctgcctcccaaagtgctgggattacaggcatgcaccaccacactcggctaatttttgtatttttagtagagacagtgtttcaccgtgttggccaggctggtctcgaactcctgacctcaaatgatccacccgtcttgccctcccgaagtgctgggattgcaggcatgagccactgtgcctggcctcttgttgattcttgattaaatgcacactaattgttgtgctgtcatcatatctggtagtcacagctttttcaaattcctgtctggtaggtacaggaattggatggtttgggtactagggaactattttttttcttttggtaaataacttttgagtagtttaaatattcatatgtgccaggcactacataagtgataaaaactgagcaaggtttctgccctcaagaagcctgtacctttttggtgcttctgtatgtacactcaagtaaatacaatgcaagaaagattttgacctttgccttatcttagtaaatattaatagcttctcatgaagaagagcagatgtggccaaaaggcagtcaaggaagtcaagcttcttagaaatggcggcatttgctctgggtgctcaagagtagcctttccctcagtaggagacaggtggggagggatggccaagtgcatgaaatggcccgagcaaaggctctcacaagcacttggaggtggtatggagaatggtgagagttctggagtagatggaacaaagggtaagaataggggaggatggaagagaggaagaaaaagataggttggccaggtacagtggctcacgcttgtaatcccagcactgtgggagtcctaggcgggtggatcatttgaggccaggagttcgagaccagcctgaccaacatgacaaaatctcatctctactaaaaggcagttggaggttacagtgagctgagatcgcatcactgtactccagcgtgggtgacagagtgagaccctgtctcaggaaaaaaaaaaaaaaagatagcttgtagcaccttaaatgccaagcaaagaagttgggattttaaaactttatttgtacgtgcagtagatgcgcttgtagcatttatttccagaagagaaaaacaaacaaaactgaaatacttgtattttttaaaatacaggacttgtgtggccttttagaagtataccctaggctagccgggcacggtggctcacacttgtaatcccagcactttgggaggccaaggcaggtggatcacctgaggttaggagttcgagactagcctgaccaacatggtgaaaccctgtctctaccaaaaacacaaaattacctgggtgtggtggtgcgcatctgtaatcccagctactcgggaggctgaggcatgagaatcacttgaaccagggaggcggaggttgcagagagccgagattgcgccactgcactccagcctgggtgacagagcaagaccctgtctcaaaaaaaaaaaaaagtataacctaggctaactcatctgtttctaattttagtttcaagaaaagatcctattttattatttttctgttttcactattagatatgaatacttcagatatgaacagccttcagtgttgtcttactttctctctttttcaggctaattttatttctttaattttccttttttattggtatataatacatctacatattttaggggtataagtcatataatttgtaaagatcaaatcagtgtaattggaatatccatcaccttaaatattttctctctttcagggaattggctcgggaaaaggtaatgcgagaagttaaagccttagccaagcttgaacacccgggcattgttagatatttcaatgcctggctcgaagcaccaccagagaagtggcaagaaaagatggatgaaatttggctgaaagatgaaaggtaactaactttgttacacatacacttaagctagttttttgcttgtgtgattacaatgtcagttttataactttagggatttttttttttaaagaaaaggaacagcagagttctgttgtttcatgttttgaaaagttctctagccacttgtgaaattttggtttagattttgagaacatacacgggtgactcatgcctgtaatcccagcactttgggaggccgaggtgggaagatggcttgagcccaggagttcaagaccaacctgagcaacatagtgagaccctgtctcttagaaaaaataagagagaacttacattttaaaaaattactagttgataggactctatacattgtgattgattgagggatttatagtgacttttctcagtataaggtatctgcttctgtctccattttttaaaaatgtttgttatttagttctcttagcagttaacaatttacagctcctttttaagtagttttgaactatttgcagttaaaaatacataaacttagcctgaatatattgtccatattaactatgatgtgctataggaaggaaggccctttaaaaactattaaaggagaagaaaaaggaagcatgtgtagatagactgccaccaaacaactggagtgaaactcctacctacaggtatctaagcaacattagatccacgtgaggtaccttgttaaagtggtgcttattatagactcaaccaataactaagccatagaaggaccaagtgaagtggccccatgtctcaaggccttgtgaggcgctgcccttttaggttaattttaagccaccaaggaatcctgtcctcactttgcataaaaggctttggctgctctggcagccccagacagtcccaggtaactgtttcatgtataaaattaagctttaaaattaagttttttagaaggaatgaatggaatgtgatgttctgtatctcacattgcatgtttttatttagtttgtatgttgttttgttgtcatttggtaagtggccttattacagttgaagctttttaaacagagggtgcagttcaggtacttgaatcaatatatattcactcttacccctttgtatttctcccacttttagcacagactggccactcagctctcctagcccaatggatgcaccatcagttaaaatacgcagaatggatcctttckctacaaaagaacatattgaaatcatagctccttcaccacaaagaagcaggtctttttcagtagggattycctgtgaccagacaagttcatctgagagccagttctcaccactggaattctcaggaatggaccatgaggacatcagtgagtcagtggatgcagcatacaacctccaggacagttgccttacagactgtgatgtggaagatgggactatggatggcaatgatgaggggcactcctttgaactttgtccttctgaagcttctccttatgtaaggtcaagggagagaacctcctcttcaatagtatttgaagattctggctgtgataatgcttccagtaaagaagagccgaaaactaatcgattgcatattggcaaccattgtgctaataaactaactgctttcaagcccaccagtagcaaatcttcttctgaagctacattgtctatttctcctccaagaccaaccactttaagtttagatctcactaaaaacaccacagaaaaactccagcccagtycaccaaaggtgtatctttacattcaaatgcagctgtgcagaaaagaaaacctcaaagactggatgaatggacgatgtaccatagaggagagagagaggagcgtgtgtctgcacatcttcctgcagatcgcagaggcagtggagtttcttcacagtaaaggactgatgcacagggacctcaaggtctgtatttgtggagcatcacccttggggtttcaatctgacgttttgtgattcagagcagtacttgcagtactctgaaggatccttaagagttggggagagtaaaagcatctgagagcagaggtctgagaaagtagcctcgaaggggcctgctgcaagaataagaagtcttatgtctgaaaactttaggcaaaccatgcattcattgtcttcagtaatgtgtttgtgttcattttactgtaaaaggtattctcagtagtccaggtgagggaaaaaaaagaaaaaagaatctttaggtaaaatccaccatgagcagatatagcctgtttttttgtttgtttgtttgtttttgtttttctatggttttgagtaaccctgacaccaatacctccagggctctgaagcagcatggtgaaagggatccgaatggaaggagagacatgggttccttcattagccagcttgaattggggcaaatctccacacttttgcttctttttctgaactgtttagactttgggggaaggggtaagaagccgaatggggaaaggtagcaaatagttaacagatgactgtttacagctctaaaaccttggattctattttcaatatattcagtagtgaattttgcagtaatataatatgcaaaattattaaagagtcttactaaaacatgacatttccgtagtagtgtttctaaaaataagtacatggaacttttatttaactaatttcccacattccatatactcttagccatcaccagtagatgtggagtgaatgtataaatacttttctgatgaaagtagcttaaagtcttgatagatgtggatccattttaagtcttttcagacttaaaacagacttgtttcaggcacaaaagtagctatttggacacaagttattttcttctaaaatcagcagtaggttttcaaattcttgggtatattttaagagttttagggtaacaagaataggaattagaaataattcttattttttaatataattgttatttagtcatataaatcattatgcttcagtgattttgacgtgggcccaaactgattgccaagaattgttctgcactgaatgaaaagttcagagatgaattatttggttggattggagaagacagtttacaggagaccacacacccctaatttgagagaatactagcagttaggtttgaatatagtaaacgcttatcactaggtgggaaacagctagctgaaatacacattcttcttgtacttaacacttgctgtacacacaaatgccaacttgaaagacaatgaatcatgttttcactaataatgaatattcttctgctaattttataatgtaaatgagatattggtaaatatccatttaatgctacaatgttgtctaaagatttttctgtaattgtctatgcaccagaaaaattgcaagaagaaagttaatattcctgttagtttttctagaaatcagaaagttttattcctttctaaatagaagacaattccttttaaagatttctagtgcgccacccccaaccaaaaaaaaaaaaaaagccaagatttttgttcctgggtgaaaaagctgtacattttgctacgttctgacctaaatctttgagctcaatgttaaaccttctaggccctctccccctgttatattttggtcacatttttgtcttcaggactttggctcctgcctcttcagactaacttctagtcttctattttctccactctgaacttttctcagttcctcttgatatacactgttctgacagaaacctggtccttcttcattattctcatcacacctggattatttattctgtggtttctatggggtatgaaccatatctgtttcttttacctgttatagtctcagtacaatgcctgaatgttctagatggtcataccatttattttgaattttattttctttgcactcaaaagtgtttatactgacttaaccagaaaaggaaatctgttggcccacatggctaaactgttgagaattcaggtaaagctttagctgagatcaagtgatttagccagaacctggtttctgtcctccccatttcttgtttctatttaagtcttttggagttggtggggtagagggtggagagaaaagtattgctttttcccactatcagaaattttattctacttaaaccaaggacacctacccatccctcaacaatccctagccaggcaatgggattccatggattggcgtaagcaacttttagagcatggatgccttccacactaaccgtggggttttgctgcacagtcagcaagaaggaagttcccaaagtaaagtcaagatacttctgctggaagcacagggagatagatactggagagccaaaaagcttgtctattatagggttcagtaaataacaactgccatcagatgttgggagttgggaagaaagatgacatttaatgcaggatagtctattattgcctctggtacaaagttatttattggagagctgcagattattaccatagatcttatacacaataacttcatgcttccaagtcaaaatcgtttaatggtattttagagtttgggaatgcaatgttattttctggcagtatttgaaacatgatgaaattcaatttcatgagctaaatggcttcctttttcctcatttcaagggctatgaatggtggtcatattacccgcagagtagagtannnnnnnnnnnnnnnnnnnnnnnnnnnnnnnnnnnnnnnnnnnnnnnnnnnnnnnnnnnnnnnnnnnnnnnnnnnnnnnnnnnnnnnnnnnnnnnnnnnnnnnnnnnnnnnnnnnnnnnnnnnnnnnnnnnnnnnnnnnnnnnnnnnngagtagatatagtcttgagaacatagaaggttttacgagaggcagcatagagtagtagtgaagagctcttatcccttctgataatctatatccccctcagacgcaaaccaaaaagatcagtctgtttcattcattcaccaaatagtaattagctaccatagagcaagaactggactgaaatctgggcacgtggcagtggatcacaaggtcctttcctcatagagccagactgctcaggtctgaatccctgcttcaccacttgctagttgggtaaccttgggcaatttgtttaacttctgggcctcactttctatgtctgtaaaatggggttagtactcatctaatggggttgtagtacatgagttagtagtagtaaactgctttgaacagtgcctagcacattgcaagttctatttatgaactagttattattagttataattattaaggctttaagtcataagtgtagagatgcttgcctgggaagaatatatagaataataagattgaggattaagtaccatgatccctagggaatgtgcacctcaaagggtttaagtagatgttcaataaatactagcactctttgctacccttcccttttctttactagcagtacttgtctggcacagaaaaattgtcactattttcctgttagcccattttaaaaagaaatatgcttgaaaatatctagtttgttgtattttttctttgtagtcwtttaaataattctctttactttttcgcctccatgcacacccactgtacttttgtctgttgtattctttccagccatccaacatattctttacaatggatgatgtggtcaaggttggagactttgggttagtgactgcaatggaccaggatgaggaagagcagacggttctgaccccaatgccagcttatgccagacacacaggacaagtagggaccaaactgtatatgagcccagagcaggtgagtttttcagacctttacttactagcacagcagcagatgtacctgatgaatctcttctcatgttttcattaaaatacccagtaatctaaaacccagtaagtctgaaaattatgaaaactggcagtagtgttccagtagtggaatagtgacacagctaagatgtagtttctacaacctgaattggggctggattaagaaaaatacaacacataaaatgcactcaccccctgaacaagcacctgacagcaaccaggaatttggaaagagactttgaatgccaccctcccaaacttaactcgtttgccttgtgtagactgtgttggaactgttttcagagccagctagacccagaggtactatactgagctgccctttgtggtcactcataggcaacttccagcatgtaccacagtaggaaatagaggcacacaggccggcaggtgttgccttgtgggctgcttggccttcacaggaaaagcactgtaatcagggcagggactggaagagctgggggagcagggcatcctggaagcatcaggcgagcatgctcagccaccaccaggcaaatgatcttcacaagcttctctatgcttagagcagcgggtctcggacgttttgggctcagtacatacttacacttgtagaaataactgagaacccaaaaggttttcttaacaaaattttatctatcgatatttgttatattagaagttaaaagagaaatttataaaactttattaaatcaactaaataacaatgaaacctatcacatcttaagatatttttatgaaaaataagtattttctaaaacaaaaaaaaattacaggcaccaattcccctgcaaaaaaaaaaaattagagtgacatttgtttacatttttgccagtctctttaaagctaacttataaaagtgctacattcttctatctgcttttgtgttcaatctgttgcagtatgttattttggctgaagtacatgaggaaatctggcctcgcacagatatgtagttggaaaaaagagcaatatttcatttcaagtaattgtagatattttgtctttgatagtatatcaaaacttagtaaatgatagtttcttagaagtcatttacactgtggaatctaaaaccattcatgaatattttgtactctggtacttttaacatcccttggtccattttgtactttgaatggatctttttacccatgcttgactttacattgtgcattagtcatttggaaactattggttccctaagtttggcaactattccaaaagtcatcacagttcattatgtaatataaaaagtcactttggttaatacaaccaccaatctcaccagaaaaggctttatgtacatattaggaggctatcaaattcccactggtagactgaaatcttccaaaattttaattttcacttaaaagctcaacttttaacattggcaacaaatactgttagttttccttgaaatgccattctcacattgttcatctttttttctctttaaaaaaaaaatgttgtttgtttttttttttgagatggggtcttgctgtgttacccagactagttttgaacttctggccgcaagccatccttgaacctcagcctcccaaagtgctgggatcacaggcgtgagctaccatgcccggtctcattgttcatctttaagaaagtgtccctcggccagtcgcagtggctcacacctataatcccagcactttgggaggccgaggcaggcagattacctgaggccaggagttcgagaccagcatggccaacatggtgaaaccccgtctcttgtaaaaacacaaaaattagctgggcatagtaacgcatgcctgtagtcccagctacccaggaggctgaggcacaagaattgcttgaacttaggaggcagaggttgcagtgagccgagattgcaccactgcacttcagcctgggtgacagagcaagactccatctcgaaaaaaaaactctctgtcaagtatccaagtctcaataactgtagtttgtctaccaattattctttcaagtcaaaatggtgttctatgaaaagagcagctagagcatattgtaactcaaataattgcacaaatgctaatgatactcacaagctaatctatgcttacatcagcaggtctcaacttcttaaaattagtttgttttttaaattgactcataattgtacatatttatggggtacatactgtcgttttaatacatacactatttagtgattggatcagggttattagcatatccaaggtatcaaacttggagacaactattgtactttggtatggagcataaatgtttttctgaatattttccattttgtcagattattaaaaaggtgtatatttaaaggttgagatttaataaattaataatttytactgctaaggacattttaagtgaaatgttttttggttttgcctgtgagcacgtggtgctgaagaatgtaattgctactggtacagcttggcactgctcgcttgattcatgcttaggttctgtcagtgcaaatgtcaacacagtgaaaaattatatcttagtattattatgaaaatagtcttggccttgcagaccttttgaaagggtgttagggtcccgaggaatccatggaccatacttcaagaaccactggatttgactatctttgaaagattatatcagagaccagtaataggaactgcctttgaggagggcaagtttgttttactgtcatagagcatccttttgaagtgtttgcattgtttaccttagtcaagtgtttcttttttgcaatgtgaatttttattttgtatttcgtctttgaaggagattgcagtgagccaagatcctgccactgcactccagcctgggcaacagagcaagactctgtctcaaaaaaaagaaaaaagaaatcaagcatttttacatattaagagtcaaaaaagtatcttaagtgaaaaaaaacaaaatgcagaaatgtgtacaccttttgtgtaaaggaggaaaagatagatatacatttgcttatgtttacattaaaaaactctggaatgatgtgtaagaaacaaatggctatgggggcagtggcagaggggaagtaactggtggggctaggccagtgagggacagagtgagagggaacttttactgttagctctttttgagccatctgaatgtgttacctattaaaagttaatttgagatgagaaatatataaaaattggcaatagacatcaaacccaatgaacgatatgtgccaatggttcttgtgaatattgataccaaaatgagaataaaatccaaaatgtattcctagtaaaagacaaataattttaagtatgcttatcattataagctgagtttgtcattcctatattaaattaacaaagattaggaaatggacgatggtaagaacatggaaaataaagatgggaatagggatttgtacttgatgtagctaagtttggcaaatagaataataaaacaatatttctacctctgtatcacttacagacgacaaacacaaactgcagcaaagggaaaggatatggaaatacaagtgatgctaaagccaaatattagttatgacaacaaataaatagatgtgtttaaatatccccatgaaagggaaacttcaggttggattataatttaaaaaaaaaaaggttagaaagggaagctaggtaaaaaaatactaagctttatatacagttgctatttgaagatttattgatgaataaattataattatatttactttcattttgaacttctaggccacaaagaaatatcatggatattgtaaatgcctttttatgattataatatattaaaagaagggtatagtggtgtataaattgatttttataattttgtctgtttttatttttgcttttgcttctgttttgctggctggaaattttattatttttttgagacagggtctttgtcactcaggctggagtatagtcatgtgatcttggctcactgtagcctctgcctcctgggctcaagtgatcctcccacctcagccttccaagtagctgggattacaggtccacaccgccatgctcagataatttttttgttttttgtggagatgaggtgtcactatgttgccaaggctggtcttgaactcttgggatcaagcaatcctcccgccttggcctcccaaagtgctaggattacaggcgtgagccactgtgcctggccaactggaaattttaaaaccctcctaaataactatcaggtcaatagatgatgggttgataagtgcagcaaaccaccatggcacacgtttacctgtgtaacagacctgcacgtcctacacatgtaccccagaacttaaaaaaaaaaagagtttttaaaaataactatcaggtcaataatgaagtaaaaatactcatacaaagtattaagaaaatgatgaaagaagctgggcactgtggcttgagcctataatctcagctactcaggagggtgaggtgagaggatcacttgagtccaggagttccaggccagcctgggcaaaatagaccccatcttaaaagaaaatgtaaaaaactttttttaaaaatgaaagaaatgaaaaatagtgaaatctataggaagttttcaaagttccatttggagataaatttattttcaggccttcattacatagcacattactgtataagagattagaattctgctcaatagaaggcagggaggagccaagaagatggaaaacaaacataagaattgatactggtgaaacagtaaaatagcatcaccatggttgtttctaatagtttaaaataaagataatcctctctagcatagatacctacttaaggggggaaaatcacaaataaatttagaaattagaagagatacagaagagatttttatttataggagactttcatatatagtcaattggttgcaaccaaaagtatccaaactggcttacgtagaaaaataaataaaataaatctattggccctggtaattaaatcatcctgctcaaatgatctggccaaggggtggtgaaaggaaaaattaaaactgtatgaaatatcaaaatactataaatacatatttctatctataggaaaaaagactagaagagccataaaatatcaacagtcattgcttctgagtagtgggacttcaaatgaattttaatctattttggacttttctgtatgatccaatttttctacatagtcatacaacagaattgatattaaaaacagttttggttgggcatggtggctcatgcctgtaatcccagcactttgggacaggtggattgcttgagcttcagagttcgagaccggcctgggcaacatggcgaaaccccatctctacaaaaaatacaaaaattagctgggcatggtggtgtatgcctgtggtcccagctacttgagagactgaagtagaaaggatcgcttgaggctgggaggtggaggttgcagtgagccaaggtcatgccaccgtgctccagcctgggtgacagagtgaaacccctttaaaaaaaaaaaaaaaaagtttttttggccaggcatggtggctgacacctgtaatcccagcactttgggaagccaaagcaggcagatcatctgaggtcaggagttcgagaccagcctggccatcatggtgaaaccccgtctctactgaaaatataaaaattaccgggcatgatggcaggcacctgtaatcccagctacttgggaggctgaggcaggagaattgcttgaacccaggagggggaggttgcagtgagccgacatcttgccattgcactccagcctgggcaacaagagtgaaactccgtctcaaaaaaaaaaaaaaacacctttttaattgtgtttttaaaaakttattattatttaagaggctggaaataatacttttacattttaaatattgtgaaaacaaataaaaggaattctatctggatgcttattaatgaaggctcacgacttgggaagcctctctcacccagtcctatttaaaagagatgcttctcccttcactccctgcctgggtccatcccattacactggtttctttttacagcatttttaactctttgaggttcttttttctttccctgtgaaatataaactatcagtatagggacttagcttgtctctcattctactcttaacacctgaaacaacacctagaatgtggcatagtttcataagtgtttggtggatgagtgaaggtgaatgctagtgaaaagatgaacaccaggtagtcccggccaccccatacacacttctgtgctgactgtagtgtggcttgtggctgctgtgtgtgtgtgtgtgtgtgtcttggaaatgggttgccatttgagaaaggaagaggttgatgacaactgaagctatatttcgtattgttgaaaatactagaaaattaggatagctgtagaaattttatggcaatgtatagtggttaaaatttggtagttaaaaatggacagtcttaattatcttcttaatcctctttaaacatagaaactgtcactttataaagtgctccttaaaaagtcacacaaaatatttgggctgtatgaattgtacaatcttacccaagccttagaagctatactaaaacattgttttaaaattatttattattagaactctcttaattttctcatccttgaaataaatgagcaggacccatggttactttgttcttggttgtaattacgaagaaacacaggttaagttctagatttgcacacagcgattaaacaattcaaaggatatattctaggtcctaattccttattttttagatattttgtaaatataacttttcatgcgttcatgaggctacatttctttttttaaatatgtttaatcacgttagaaacaataaataaatttagtaacacattatatatctatctgtcctctagggaatacagaaagtatagggacatataacaaaaaagtaaaaatcacttaccaaaaatatctgtaagacattaacagcagttatttccttttctctctctstgtgtgtgtatatctatatacaccttactttagaaaataaaattggaattctactctaacattttggatacaatattaaaatataagtatttcccatattattaaatattcttagaaaagatttccagctgcatagtattcaacattcatttgggacattttaattacttgtaaattttgctattaggaatatcacttgggtaactatccctgtacccaaatacccaaatgtctgtacacatttccatctgccctaggggtgggtaaaattagatggcatcattaagcaggagtaaacatttattgccaagttgcttcttataaatttgtgtttatttatattctccaaatagtgtgtgagggtgtccttttcagttcccctataagatttgtttttgcacattttttttaacacttccaaaaccccagggataagaagtgagacagggttcagattgctacagtctcttggaagggaagagggtgatgccactgatgtggtcactgaagctttccatctgctcttctataagtacagaggcaggcaggctgcgcagaaggccagggagacagatgccaagtacggtttagaggggaagttgtgaagggatcataaaccctggcaactgccctgtgaccacctctacttcccagttaagaagtactggtatggagcatttccaaagttcccttctttggcagtttctcaaatgtcatgttatatctctaaagaaattttcacaaataaaggggttcttctgagtcaccaaaaggtcaattttaatttaaataatgctttctttagtcgagtagttctgttgtaattcatttgttcattttaacaactaagtatttattgagggccttctctatacttagccccagtgctggacgatagcaacacaaaagaagcatttcccttcctccaggacttgataatctagttgtgaagaataagaaatatacacatgaaaaatacaaccaagaatgcaaagtatccgtaattaagtgccctaatgaaggctaactacagttgattagtggtttggagtaatgaagattttctcataaaaatgggttaggactaagatgattagaaatgaaagatttgctttagatagcgttccctttgaaaaacctcacctcaggggtagtcgagcagattttgctggctcccacaaacttttttagcatggcaagtctccaggtttccgaggggcctgttttactgatgcatatctcagagctatacctgggctttccttctgtaatgctgagtagtttaattactcttggtgtagtagtgaagaaaagagacttgggagattaactctttgctaacatttttacacatgtacttgcatttaaaccaagaagtgactaagtaaactttgggattcaataatgctgtaatatcaactgtactgtctctgtgttaatttttaaattttctttatgtgggatttcagattcatggaaacagctattctcataaagtggacatcttttctttaggcctgattctatttgaattgctgtatccattcagcactcagatggagagagtcagggtaagtaccctccctactcaaaaaaaaagtttcaaacagaaaataatctmacatttacaaaagagttttttaaagacttagttcttcttaataccagcagattggttaactaaaagtgaaagaggtgatgtgagtaacacagagaggagttctagactatttgcttccatttaaagctcagtcttcaaaaacttgtttggttagattgtttgttcttagtttttgcttaaattcatcataatttaacaatgttttgcactcagtaagtttgttataagtaaaaatctaggggaaccacaaggtaatgggggccacacactcatatatttaaaagctggcagattaagcataattaggtttctttcctctcaaaataaaccatgaccacagcctttaaagcagatagtactgaaagtcttttttttttctcaaggcaaggtcttgctctgtcgctcaggctggagtgcagtggtgtgatcacagctcgctgcagcctcaacctcctgggctcaagccatcctcccatctcagtctccccagtagctgggaccacaggcacgtgccactatgcctggctaattttattttattcattttgtagaaatgggctctgcctatgttgtctaggctggtctcaaactcctgggctcaagtgatcctcctgccttggcctcccaaagtgctgggattatagggatgactgaaagtcattttaaagtagccctctgggccgggtgcagtggctcacgcctgtaatcccagcagtttgggaggctgaggcaggtggatcatgaggtcaagagatcaagatcatcctggctaacacggtaaaaccccatctctgctaaaaatacaaaaaattagccgggcatggaggcacgtgcctgtannnnnnnnnnnnnnnnnnnnnnnnnnnnnnnnnnnnnnnnnnnnnnnnnnnnnnnnnnnnnnnnnnnnnnnnnnnnnnnnnnnnnnnnnnnnnnnnnnnnccagcctgggtgacagagtgagactctgtctcgaaaaaaaaaaaaaaagtagccctctggccaggcatggtggctcacacctctaatcccaacactttgggaggctcaagcaggaagatcacttgaggccagagttcaacaccagcctgggcaacatagtaagaccccatctctacaaaaaatttaaaaattagcaaggcatggtagcacatgccttgagaggctaaggcaggaagatcactatgattgtgccactgcactccagcctgggcgacacagcaagaccctgtctctgaaaataaagtgggcctctgtcacattcttccctatctttcataagtagctaccctcacctcttctagttgttgtccctggtacttatctccatattttcaaagtttaggctcttgtcactatttcttattttatcagttttagatcttacttattgatctctggccatggtagaagaggatgtagttctcacatagagcaaaatgactcatatcttctaaccgaaaggacctaccaaatgttctgtacaatgaatgaaaaaaaaaaaaaamcagtcaaaataaccattttcagaacaccagaaataaaggccctaaaascttccagaaaggaaaataaaacaggtctaacctaagtaaaggatcaagaatcagatggcatcaaaatttatatagttataaatgcctcagagaatactgtcaagaaagtgaaaagacaaggtggacgtggtagcacatgcctgtagtcccagctacgtgggaagcttgaggcaaaaggaattccttgagaccaggagttcacggctacagtaagctatgattatgcctgcaaatagcctgggcaccatgagaccctatctctaaataaattaattaaatgaaatagaaagtgaaaaggcagctcacagaatgggagaaaatatttgtaaatcctatatccgaaaagtgtctagaattcagaatacataaagaactattacaactcaacaaaaagacaactcattttaaaaaggggcaaagcaatagaactttctccaaagaggataaacaaatggccaataagcatgtgaaaagatgctcaacatcgttgggcattagggaaatgcaaatcaaaaccacaatgagataccacttcagcaccatctagggtatctgtaataaaaaaattaaaaaaaaaggaaatgtcaagtgttggctaggatgtggagaaattggaaccctcatacgttgctggtggaatgtaaaatggtgcagctgctttggaaaacagtctggcagttccttaaacagttaaacatagaattaccatagaatccagtaattctactcctaggtatgtactcaagggaaatgaaaacatagacaaaagcttgtatacaactgttcatatgagcattatttctaatatccaaaagtagaaaccaccaaaatgctcatcagctgatgaatggaaaaacaaagtgtggtattttatacaatgaaaagtattcaaccattacaaggaaggaaatactaacatgtgccgcaacgtagatgaatcttgaaaacatgctgagtgaaaaaagccagacacaaaagtccacttttatatcattcagtttttatgaaatattcagaagaggcaactccatagaaacaaagatttccaatattttctttgtgctttaatatggccctttctctctctctctctcccctttctctttctccctccctccacacatayatatatacacatatatgtaaatgtacayacacacacacacacacacacacacacacacacacagtcatcttggtatccacaggggattggttccaggactccctgtggataccaaatctgcagatgctcaagtcccttatataaaatggtgtaatatttgtatagaacctacatatattctgtgtattttaaatcttctgtaaattacagtacctaacataatgtaaattctatgtaaataagtattatactgtattgatgagggaataatgacaagaaaaaaatctgtatctgtccagtacagatgcaaccatctatttttaaattttttaaatattttcattctgtggttggttgaatccttggatgtggaatctgtggatgtggaagaccagctgtatattttgaggatatttgatggagtgtacatctgtgctcaggaaacatatgtagttattaaatcaggaaaagctattgataaattttccatttgatagatgtacaacctcttagtcattttgttagagtatcaaaaaatattttcatgttgtatgtcaaaataaacttaataagtgatactttttttctttttagaccttaactgatgtaagaaatctcaaatttccaccattatttactcagaaatatccttgtgaggtatgtgtaattctcatcttttatcttctttagaatcatctttagaacgtaagcggtccttagcagtcgactcagtttcccctattttacagatgaggaagccaaaggtctagagaggaaagagacctgctcccaagagcccagaatttgttaaaaccaaacactggagctggggcctggctccttcagcctaatgtccagtgttccacactgtagcacctgtgaaatttatatattgataaatcttgaatttccttaagtaattaagttgaagtgagttagtatgtgttcattttcaaattggaaaaagtcaaaatttatctttcagtattataatgaagggttgcattaaaaaatggactttataacaatatattaatacctacatatacttaagtctgttttactaaaaattgtcatcatgtattttgcaaacttgatgaatctattcccagggtggctcataagagtacatgttacgttcaaagagatttttaaaaaccaagaaaaggtgttggttgctgatctctgccataattttttctaattaaaatttctattgagataattgtagatttacatgcaattataagatgatttttaaaaatcatatttatgtttcagggatgtgattaaataatcctttataatgtgttagaaaatcaaattacccaaaaattgtccatgtttttttggaatgagggttggcaaactagtgcccacaggtcaaatccagcctgccacctatttttataataaagttctattggaacacagccatgcccattaatttacaaattgtctctggatgcttttgtgcattgacggcagagctgagtagttgtatcagagacttgaaaactcgaatatggctcaaaagcttaaaatatgtacagaaatattttgccagcactgattttaaaaactgtacagtgatcaaacctggccgttttatcacaaaacaatttttatattttcagtacgtgatggttcaagacatgctctctccatcccccatggaacgacctgaagctataaacatcattgaaaatgctgtatttgaggacttggactttccaggaaaaacagtgctcagacagaggtctcgctccttgagttcrtcgggaacaaaacattcaagacagtccaacaactcccatagccctttgccaagcaattagccttaagttgtgctagcaaccctaataggtgatgcagataatagcctacttcttagaatatgcctgtccaaaattgcagacttgaaaagtttgttcttcgctcaatttttttgtggactactttttttatatcaaatttaagctggatttgggggcataacctaatttgagccaactcctgagttttgctatacttaaggaaagggctatctttgttctttgttagtctcttgaaactggctgctggccaagctttatagccctcaccatttgcctaaggaggtagcagcaatcccctaatatatatatatagtgagaactaaaatggatatatttttataatgcagaagaaggaaagtccccctgtgtggtaactgkattgktctagaaatatgctttctagagatatgatgattttgaaactgatttctagaaaaagctgactccatttttgtccctggcgggtaaattaggaatctgcactattttggaggacaagtagcacaaactgtataacggtttatgtccgtagttttatagtcctatttgtagcattcaatagctttattccttagatggttctagggtgggtttacagctttttgtacttttacctccaataaagggaaaatgaagctttttatgtaaattggttgaaaggtctagttttgggaggaaaaaagccgtagtaagaaatggatcatatatattacaactaacttcttcaactatggactttttaagcctaatgaaatcttaagtgtcttatatgtaatcctgtaggttggtacttcccccaaactgattataggtaacagtttaatcatctcacttgctaacatgtttttatttttcactgtaaatatgtttatgttttatttataaaaattctgaaatcaatccatttgggttggtggtgtacagaacacacttaagtgtgttaacttgtgacttctttcaagtctaaatgatttaataaaactttttttaaattaagtatgttgactsttattttgaggagttagtcccaaaatggtagattttctaatttataaaatgggatcatagatctaggaagagtcataaacctatcctcaaaaaaacttcttcctaacccatttcagacaggtatctttttcatcayttcccaaagacttggcaggccctttcaaaattcacaagatccataattgacagacatttgcccagtacctaccctgtgccaaggactgagaatatagaggactttcccctaaagggagagctctcagagaaaagggctgtggtgatgctagttgtattgataccgaggtgtatctgacatgtgccacatcgaggcatgtggcaggctgggctgatggggcatgaaccagctagacacaatctagaaaggtcaaaatgcatagcatctccatattacaaacaaataatgtctgccacgcaaggttatgagcaacttgtacgctggaaaaacacttcccagatctttgtggctgactgtatatccagactcgctcgcagcagtgctgctcaaacgacttccttccccagcttctgcttggttcctgtccagctcaccccygtcatcttcatctcttggtcagcctgctttagttgctattccttttctcccttcctctttaccccagccaggggtgaaggtttgttgacttctggcagcacaccccattcagtcccccaaagatcctttgacccccaggacttccctaggagctagccatggcagacactactattaccattctacttaccgtcaaatctaggtccagaaaggtgctgtgatttgttcaaggccacaaagacagcaagagcagaaccgggatcaaaacctagrtatttagattcctagtgttttgtctacccgcgtgcaccaagctgtctagggattggtaaattcttacatgatgtratcaggttttctttcattttaacctgggtttgcctttgctgaccaccagcaggaaagcaggcatagggttggggaagttaagagcctgggccagcaacacttaagtccgtaacactagtcagaatggagacccctgtgttctcacccacagccctttctactgagtccaaaccccactgcccactttaagttctgttgtttttccagcatctttccatcccccgcacttgcctctgcttttagcacattgtatttgataatacttattctcaggctgcagaggagccagcaactctgacgaagatcagctcccccttgttcgtttctaaaatctcagaaagtaaggggacaccttcttgtagtccagcaacatccagcgtaaagcctggtacttgattacatatttgtagaattgaatttgaggaacctacatataacccctgctacaataaaaatctggcaaaagtgaaggaggaaagatggcttaaaaatccttatgctagctgggcgcagtggctcacatctgtaatcccagcactttgggaagtcaaggcaggtgaattgcttgagctcaggagttagataccagcttgggcaacatcgcaagaccccaactctacaaaagatacaaaagttagccagctgttctggtgcatgcctggagtcccagctactccagaggctgaggtgacagaatcgcttgagcccaacaggcagaggttgtagtgagctatggttgtaccaacgcactccagcctgggcgacagagtgagaccctatctcaaaaaagaatcctgatgctaaaaacagatgaaagcgtcaaatctcagaagttttttgtttgtttgcttgcttctttgtttttgagacagagtctccctctgttgcccaggctggagtgcagtggcaccatctcgtttcactgcaacctccacctcctgggttcaagcgattctcctaccaggaaagaagagcacagggctctcctgattcacccttcagggaggcagcaggactagccggagggctggtccgggcataggaagcccatgagaagttttgaaaactagctacctagtctgctgtttgcctcccaggagcagacagaaaagcagacttttatgatgttaggatggagtggggggtttttctcactgacatctttgtctggatgcatttacaacaaaagccattttatttctgtgccatttttctctgaaagagtagagatagagcaagctcccagtctaaccactagccatagtggagaagtcaagggctaagcggggactctggatgttctttggctcactgctgggaacatctacgatcccccataactagattgtccagggactgccttgcgagacttccccatggagagccttttcctgcaactacagtagctgtcaccaggtgacagtcatgccttgcttaaaggtctgagaaatgcattgttaggtgattttgtcctgtgaatatcacgaagtgcacttacacaaacctagatgacacagcatgatgtctaccgaatattgtaggccatggtaacacaatggtaagtatttgtgtgtctaaacacagaaaagggacagtaaaactacagtattataaacttttttttttttgagatggagtctcactctgtcacccagkctggagtgtagcggcacgacctcagctcactgtatcctccacctcccaggttcaaacgattcttgtgcctcagcctctggagtagctgggattacaggtgcctgccaccaggcccagctgatttttgtatttttagtagagacagggtttcatcatgttggtcaggctggtctcgaactcctgacctcaggtgatccacccgcctcggcctcccaaagtgctcaccgtgcccagccccagtattataatcttatgggaccactgttgcatatgtgttcccttgttgactaaaacattgttacgtggcacatgactgtagtagacagtggagggctgagataaagaacatttttcaacatgtaaagttattcctccctcccctcaaatgttcaacacatcacgagaacaagcatgtcaacataatctaaacatgccagatattgcaaaattcraccgtataaagtcccacatgccatgaactgcttttaaatttctcacgtgaacaatgacttaaaacaacaaatgggccagctgcagtggctcacttctataatcccagcactttgggaggctgaggtgggaggatctcttaagcccaggagtttgagaccagcctgggcaacatgacgaaatcccatctctacaaaaaaagtagaaaaatgagccgggcatggtggcacatgcttagagtcccagctgcctgggaggctgaagtgggaggatcacctgagcctgggaggttgaggctacagtgagccatgattacaccactgcactccagcctggactacagagtgagactctgtctcaaaataaacaaacaaaaaacaaatacaggaacagtatgtgcctggctacttccaacaactctacttctaacaactctcagtatccctaatccctaataccttactcggtgcctccctctttggagcagctgagtagctttcctttctgattcttcttcatgttctgggggactaagaaaaggttggggaagggagagggaacagagagaacagcccatgcaaaggcatggagggagggcaggagtaaaaaagagagctctcaaaggtggggtcgggagaagtagaccaacttaagaattatttttgagtcagaaagaccaggatactggaattcactaaatacaggtaaaggagaagatggctcctgagtttctggtgtggacacttttatagaatccagaggagagtgcactttggggacagaagaaatgacagatatccctttttgaagatgatggatgagtattccaggactttgttggtaaacagttaaggtattattagaaaatcggaagctgtagaaaattactgaactgaggaaggacatgatgagagattttaagatcactataggctggacacagaggctcactcctataatcycaacacattgggaggtcgagggagaaggattgcttaagcccaggagttcaagactagactgggcaccacagcgagatccctatctctaatttttttttttaaatcacaagatcactatggtggctgagaaagagggttgacgagagggagaaagagttggagatgaaaccagacaggggccgttagcctttatcgagcaagaggtcagagggcctgagccagggcagtggaagctgaaagccatcccttctttgtccagcagctgaccacgtgctagctcccaacaaccagaggggggtcttctatcaatgctctgtggtgttgagttttaaaggacttcagggggtgctatagtgagtggctctttgagaagaacctgctgctttctcaaatgatgttagcttttagagtactcagagaacattgtcataaatgatggcagccactttgggaccagctcctctcttgctagcagcaagaatgtgagtaggaggagaggaaacagtgccgaatttgctggcatagagctctactgcctcccaggaagagcctgggagaattttcaccacccagaaaggtcacatacttgccccaagggagtgagagagtttgatattgatactgagaagtaatgaaggagaaagggtgctctttctccaaaaggatcttttcatgacatactcaagaaaacagttgtccagcctggccaacatggtgaaacctcatctctactaaaagaaaaaatacaaaaattagccaggcatgctagtgcactcttatagtcccagctactggggaggctgaggccggagaaccacttgaaccctggaggtggtagcaggaattgtcggtacaaagacctagcccaggaggaagaggagcttgggcaagycgagatcgtgccactgcactccagcctgggccacagagcgagactccgtctcaaaacaaaacaaacaaacaaaaaaaacccagctgaataartgaagatatattcatactatagataacgcaatgagtcagtagcataagtggaattactaaatggtttattaagcagataaatgacagattcaagttgcagagaagtgtgaatagtacaactgcaaccaagtaaaagagtttctacgtctgtttaaatggcatttttcatgggcatagaggaagtttcggaaggattctcaccaaatgctacactagctaccttacaagggtagacagagttggagaggttggagaagattattagcttcaatatgcatctcagcattgtttgagttctttccaatgcagataatactttaatccaatgtgattaataaattagattttaaaattaagaaaaaggaaaccaataaacaacatttacartatctttttttttttttttttttttttttttgagacagtgtttcactcttgttacccaggctgggctggagtgcaatggcgtgatctcggctcactacaacctctgcctcccgggttcaaggattctcctgcctcagcctcccaagtagctgggattacaagcatgtgccaccatgcctggctaattttttgtacttttagtagagatgggatttcaccatgtgggccaggctggtctcaaactcctggcctcaactgatccacccacctcagcctcccaaagttccgggattacaggtgtgagccaccgcccctggccagcgtttataatatcttaattgatctcatatttgtattctgctttatagtttattttacatagtctcatttaattctaataggatctctgcaaagcagatattttcatcactgttttatatgaaaaaaaaaaaaaccaatgcaataattaaaataactacaacagcctaacaggaagcttgtaataatacagttatcactgcattgcccttgttagcataacaatccccacttttctgaataatccctaattcagagagcattttagaggagtaacaggtgacaggacagcgctgggctttggaatta

SEQ ID NO: 10000 - DNA, 23597 bp, Homo sapiens
ggctctcctccttatgggttgtgtagacttgaatgaggtcccctctccaagcctttatttactcattgctgcaatgacagcaacctctctgcttcataaaagggtatatgaagcaaccctagcatggtctccaataagctcagtgggcattccttctctgtccccaccatatccatatggcctttctacaactatttctatgtttaaaagagctaaacctgcctgttatcccatttattataattctttcatttcgtatgtctaactgcacttgagtcctcacaattcagatggatagagtgaaggcttttcagaccctcaactgattaggtgaggcccacccacactcaatggggccacctgctttcatcacatggatatgctgaagacagattgttgaaatattctttgtttttaatttaaacttgtttcatcatactggttcttttgaggtgattttcatctcactttcaggtcgtttgagagtttcatcttactatataatggttgaaaaaggaaaggaagtcatcacttgcccaaggtggtggtgaattcccattctgttaccagccaagggaagggattaggggaaaatatttcacccagaaaagtgctgtgttgtttgagttcgccttttggttattaagggtactaatatatttttcatcaacaatgacttaaggcccctagaagttcatgaacctggtgtgggtgtgtgtttcccactcagatgtgctgtgtaacttgcacctgagggtaacacgaactctccstgggcaagatgtaaccagggaaagaaaggagaaggcagagctcagagcaagcagaaagccaagcaggagaccaaaagaggcctcagaggccatgtttgcatcttccacagagggacagacacattctctgcctctccagtaaacacaaacatgcaaacatgcacacacagagacatgcacacacacggaccatacacaccacaccacacacacacacacacaactacttatgtttctgaatattacaaacatcattacaaaatatgaaatgtacaaagaacaattcccggtggctcatgcttgtaatcccagaactttgggaagccgaggcaggtagatcacccgaggtcaggagttcaagactagcctgatcaacatggtgaaaccccgtctctattaaaaaakacaaaaattagccaggcacagtggtgggcgcctgtaatcccagctactcaggaggctgaggcaggagaattgcttgaacccaggaggcggaggttgcagtgagctgagattacaccattgcactccagcctgggcaacagagcaagcctccgtcttaaaaaaaaaaaaaggaacaattcctgaagcttctgatgatttctggctgaccatgaggttggaagtgggaacacattaagggcttaatgatgggacacagtgatgtaaccactgtggagccacaattgaagtgctgagattcagcattggaagacatctctgtcaccaaatgaacacgcctccctaaagagctctggcagtgagtcaaaggcttcatttgggtcaagacagagttattatacaaaaagccaagtttcattctacaaatccacatcggggtcaatattttaaagtgatttcccccaagttctgtgtagagcaagctgacagagaagaaatggctctgagatatctggcaaggtgcagatggactgaccacaagccgcttatccccactgtagctccgggctcccttctaccacagtggccatatctgtgaggttctgccctttccctggggccactgcatcagtcagggctctccagagaaacggaatccacaggaggtatacctatagcatacacaaaggctttattataaggaattggcccatgcaattatggaagctgacacatccaatgtctataggtccaaggtcccagttccagtcctaagagkattctcctagttagagacttctctctaactagggagagtgttggctttttgtcttcaataacagtctactcaggccctcaactaattgggtgaggctcacccacactaggaagggccatctgctctcctcagtctactgactcacttgtcaatctcatccagaaaccccctcacagacacattcagaataatgtttgaccacatatctgggcaccccatgccccagtcaagttcacacatacaattaaccatcataactatctgttagaccccaccttgcagggggcagtcctcctctggaaaccttcaggacttgaagtgtcaagctcatgtgtgcaaactgtgaccaacacacattttcctgagaagaggcctcagacaaacaaaaaaatatcatgcatgcacatttactcagataatgactgtctgttgcagcctttaygctaaacagagctaagagtagagatagtgcagattaactcagacccagaaacttggggaggcaccctgggatcctggaagcagatgctgggagggcagaggggaccgagaaaggaggtgcatttactcagctcttctgagacaattctgctctcctgcggtgcactcgttctgctggagaaagggctcactttgagtttgaatcttaaaactgcatgtcctttaaccacactgtacctgctcaccaggctgtggacactaaattgttgggaaagtgaatatatttcatttttttaattaaaaaagcatgtaaggttatattacataattgtgatatataatacatttattcaaatcatatttaagtttggggccacatgattttcaaaagtatacagatataactcatagtatctttcaattttattcccataagcctagatttgatttaaagtctaagcgcaaaggtagagaaattttttagttgtttagtacctgccattttatttttctccaactttttattatggaaaaagttcaaagatacaaagaaggagaacagattgtacaaccccttccctaaatccaccacgtagaaccaataatcaccaaccttttgtcatatcagcttatgtgcacgtactgtgctgaacaatttaaaataagttttagacatgaagacattttaccctttaatacttcagcagcacctcctaaaattaaagccattctcctaaacaaacattatgccattatcacacctaaaaacattaacaataattctatactatcagtcaatatcccctccaatttgtaatttcctccaaaatgtttttgtgtgcgtgtgtgtgtgctgatttgtccagctgggagtcaatccggatttgtacttattgttatacttcttcttttcagctgttcttataccagaagaatccttcaccccttttwcttgacattgattttttttggaagagctcaggactgcagaatgcccacactctggtagtccagtttttcccatggtgtcatttaactcatggctcaaactcttccatttcctgtaaacttgcagtaaagtctagaggctttgcaattgattcaattgaagcatctttggcaagcacacagcaacaatgatgttgtgtgtttcttttgcatcacataatgccaggttgagccagtattagtgacactgagtttgatcttyctgtaaggtacagccagatgtctccataaaaaaatggaaaatggaaaacctttttcttttttttttccaattagcacccgttcgcctgcacactttcacctaagggtttgacacccactagtgcacactgcctgatttaattatttcattaagggttacagaatggggatttcctcattctcgcatttctacgtttatgagctggcattcttctgttaaactgctttcacttgtgaaacaggatgcagaggaggagacttattcaacagaattgtagggagggctgtttctctcaaaaggagtggtgagagaagatggtctctaccggggcatggagggctccttgtcagagtctagtgtctgagctttaaggcccaggaagagggcagcagatgggggtggggcagtgggtgagtgagaggcccgtgtgtggggagacccactgaggacagggatckttaggsaaacggagcctcactgaaagaggaatttcagtgatgccatgggtcagatcctgggtctctcttagggaaacctgccataaagcatgagagccacattactcctcaggscttctgggctccgattccgcagactagttttggaggcatcaccacgcctcaaggttgctctgttatatcagggtaactgactttctctaggaacggagacttgggtgccccttaaaacaaccctcagccagtatcctagcagtaaatttttcatcacgggaagcaactaattgaacagaggtgtgatgaacctactgaccactttggtaatatagacacagtggccacagtatgggggattgttatcctggttgtgaccaatgccaaaggagcatgtttccttcttttcttgacttgatgctgtaggagtccaacaaagggaagcacattcaggcccacatgaaacttgggacagaagtggcttctcagagccgtgcaccaggcactttgaacaagttggaaggctacagtgccggragactccacagtagcacaggcgaagtggcttaggcgaaaacgctgggaagtaccccagctcccgggggccagagcctctagggctggcagcctcagcaggcagagtcacttgcctccttcagctcaattgctgagggcttgcgtttctctgcagggaacaggagtgccgccgacttccactcttggtgcccttcaccgctcaaactgcaccccaaataagcgtatgcaccctgctccaagagaaggatgcgctgggctgatcctctggaggcaagagggcaaaagacagaaagtaacgagcggcctttgcacaaagaatcctcaactctctgcagcggcccctgcggcccaatcctgccggcccaggaatgcacggtcggataacaggcctctccttgctttttcgtcttcttcctcccgcttctctcctctctccttttcctcctcctcctttttctttaattttctcctttctccccaagcttctacagttgtttctgtgttcgctcaatcatggcctttggcattgattgaaaatttggcagttccttctctcggaattctgtttgaagccttcatatggatttattattattattattatttttgccacacaaaaggggcaaatccgcgtgaggaagggggtcgcatgggggtcggctgagatctgctggctgccggtctaggaggggcgctgctctgtgccggagtgggctctggtgcaccagcagaggctgggggagagtgctgcccccgcctggagcccaagtctctgcgtgcctgggggtagagcgcggagagggaccaggcaggcgccggaggggacccgcgcggaaaaggaagaagcccaaacaaaaacgctgtccggcgccaggcgcccacctgcaagcccaagccggtgctcggccagttacaaaagaaatggtcaggatctggacaacgataatgatagtattaatcctcctattaagaatcggcccaaacaaaccctcgctgtcagggcgacaggcgcccgcccaagcccagacctcggacctggttccaagcctgttcccgctgggtctctgggcgcccggtttctgcacctggagctcgcccgatgaggacaaggtctggaggccggcctgggaacaggggccgaagggcgagccggaccctaggggattggtagggtcggggagaaggggtccaggctaggggcgggcggggcgcagggagaccaggcggcttgagcgggaggtggggagctggaggagtgccgggttcgcgggcgggggacggggagaggggggcggggagaggggcgggagtcgggggcggcgaggggaggggcggagcgcgggtcccgccccggcgggccgctggaaaagtttagtctctgactcgctcgggcagaggccgaggaagccggttccggggacgggcaacagggactcagggaccagaaggcggctgcaggacgcgaccgagcaggaccccaggcccgggaacgacgtcgcgagcgctgagactgccgggcctcccagcccatcwggcattcgagcgcaggaccgggcgccccggcaccgccgcgcgccacccgctaggatgccggtggccccagcgccctcagccgacggaggtgagaggcgggcccgggcggggcgcggaaccagggtggggggctgggggccgaaggacccacctttccaacaaaatccccaccgatcccgggcgcgacggggacttgggcgcgccacggcggccggagcgctccacatcagcacccctcccccagagccgctgcaggaacagggaggaggccttttccaccgcacccggarcgtttacaacgggctggagctgaatacctggatgaaagtggagaggctgttcgtggagaagttccatcagtcgttttccttggacaattaacaagttaggcttccacagtgccagggcctggggatgctggacgtgggagagggttgtggtcgttagcctgggaaaatcattcttttaaacaatattcgccggaaaattagttttttcctaacatttctcaaacaaggcaattagggccgtcagaatcggtgctggaagacgaagtccccacagtgcaataatgaggttcccacggaaaatcagtacgttgtgttcgtaactgagataacagctagagaaggggctttgggctttttgagtctcccaatagtcagtctctctctctctctctctctctctcttcctctgactttctggctttggacactcccaatggtatatttctttgtggtgtttttatatttggatataagagaggaacttcttgttggatttttaagggaacacacttcgttttgacccttccaataaggaaaggggagctacaggaacagagagctctttagaaggttacttttaaatggaggcccccccattcatggtacccactcccacttggacctctgagacctccagaattaggcatcattctaaaatctggacattagaagtcacagactttgtatataaccacatattcataatttatcttttcaatgttttttattcatagatgaaaatcttgcaggcatagttaagaaaaatataattcctagaaagtacaagggaaggattatgctctgcagatacatgactaacaaggatagctggccatgcccagggctggtgttggttgaggaggtggtgatggtgcggggcatgtgtgtgtgtgtgtgtgtgygcgcttgaggagttgtggaagtgttcatatctgtaaagtattatttcatggatgcagaccttaatgctaggttgaataactttgttgccatagaagaagaaccgcacgtcaggcttttttcattagcaaaccagtaagcactcactttgggcctytgaaatcacttccatcacctaacaccagagatacaaactgaagctagcccttaagagcctccccctaagatttagagagaatgatttctcaaccagttttcatctttgaaagtgccatttctccctttatcattgtgatttttattcaaatgcatgagtctctgattttctaccatatacaaagggtagagactacagtttcctatagaagaaacttcacatagtggccgaaggatcttatttctcaaaattcaggaactggtttcctctttctggaaattatgacattaacttgatttcatggtatctctttcatcttcctcaatgcctgtgctgtatgtatatttttattatatactgtaggtatatttttattaccaaaaaaaggagaatttgagcatgccacaatcttgaaaaatctgaggttgccctgctgtagaaccctttaactgccaggactttgtactgtttcccaagtgttaccagagccaggccgccagccttatgcagtctgtttaccttagctggaaccagggtgctgtgctgtgggttctatgaaactttctgtttcttcatatttggctttgtaattcctttcttatcagttttggaggcatttcctattattcctctgccatatgttttctgccaaattaattgccttaagattttccttaagcttttggaaatgtataatgtttgagaaaaaagaaaaagaatagactgagtggaatcgtatctagtttcagttaataacaygtttcagttgatgttactgttatagctactgggcataaagtctccttcccttttttgaatcctatttttgaggcattgaagctgtgtctgtaagagacaataggccagttgggttaaatcagtgacgagattgtccagtgcagattggtgcccagtgagtggatcttcactgctcacaggccggactggggtcagctcacacagcgaggtgacggtccgctcctcaagcagtggatggtgctcttcggccttgcagatgccgctccattttcctggcttcaaaattttccagatatttcagtgcccccagaatgacatgctaacattctgctggcatgggagcatgaggcagtttgtctctaaaacatgccagagaatctcttgtcactacctaggcaaagaaccagtggcaaggtggcagcctcccaaagagctcatccctaatgtgacatcctggaatcagatggcacggacaccggcccagccccttcccagctctgtgactaaggacaagtgacacccyccctcccccagcctcggtctcctcctgtgtacattcagaaggcagatgctgccatgaggccatgtgtgctatgtccatggtgcaaggtggcacgcatgccgagtcaccaggtgagactgccgctttgggaagggataggaaggatctccggtagccttcgtgggcaggatgcctcttatttgaatgtgcctttagccacctcacagagcctatttccacatccctgtggattcatccctgtggaaatcttgagaatcatttatcctatgctgtcatgaagcagcagcagaatggagaaggtttaaaaagactcatggacaggcaaagcggtcaaacacctcctggctcagacgcacttgccttcccacacacaagtctggaagctcaggatggtgttcacggaggcagatgctcggggccggggcctgagtttcctggggcacagcctccatatctggggttccctggactatgcccagatagctcataatgtcccagccttatttgtgatggagaaggacttggggaaaagccaccgggaagcagtaagtctaaccagggaagtgcactgacttgcatgctttgaagaagagaagggagaaaagatacaaaaccctcacctggtttgtctgtaacagttgttatttctcaggggagctgcattaatgggccaagcctgtgcagctgggtgtgtgaagcatgcattttgcaatggactgtctccaaaagcagagcgaggtcacccaagaaatctagagcaagggaaaatactcattagcaaaggaattttgctggagccttgtaacggccgactcattatttcctttccaagttattttaaatgaaattttaaaaaacatcttgctttccaagaaattttgcttgttggcatatgtttggtgttttgattcagtttggaggatgaactagttaatttccctgggagtacatgcctattaaaaatatagcatsctgcatctgaccaagatgctatcttactatcttattgtgcctatcttttatgcggagagagaaaggggggtgttgggaaggagaccagactgtggaaacattttctttattttttctctttttcttccttttatagtttgtttatttttcaacttgacatgggtagagaaagcgaatcgctagtatagaaagcacatctggaatccatccggcctcctctctctggctcaccctcctcccagcaatgtttctccttggaagttgggggaaggtaggcacctctgaccttggcagggtctaacttggggtcatccactgcatactcatcttccagaaggcgtcttattcctcctcgacaaaaaaaaaatgtgttggtattaaaatgctttgaggtaggctggatgaacccagcttagtgargatgacatgaaaacccttagctaatggggtctttattgagtagaactcaggkaagttcagatgtaagcagtgtctctcagtaaacatgaaaagactgaagatgcagacaatcaaatacttaagtctcttgaagagctgggtggtgggcgggggtcttcccaggtggtcagggagatgtgttagtgtagcacttggaagagagtggaacgaccaggcaaggatgtgccgtggaggtgggcagtgggagcagcccagtgtcagcatctgtattggttagaagaccaccgctaatgaggaggagcgtctctaccctgcagctgtctgtactcctgtgtcttccgtaatgtgccaagctctctgaatatatgcaaaactagtctgcaaaragccatatgtctcagcatctggctttatttctaagtgttcaggtggaatttaagccgcgatcaaatttacaatgtcactgccagctctggacacttacttttggaataaagcaaagagtgaacactaatactgcatcagtcttgccctctgttaggggccgccccttctccccacaccagttttgcaagatgggctggctggggtctgagaaacccagtgcctccgagtcatggttaaagcccatctcagacaccaacacaccgctcacaaatcaacatcgacctgcgaaaacatggacatgtgttcgccaagagaacatcctcaatcaatcccagcagtgctacttgatgataatcaacacatgggccatggaagaaattaccccatgtccataaacaagaatgaatagagggtagtgtatctacccacaccatgagagcaagaatattcagcatgcaggtgcatctatgtgcatgactcgtacaagcatcatggggagaggaaagcaatggacacaattgtatcctgtagggtttcattcacgtgaaggtcagaagcaggctaaactcacctaggggagagtcctatcccaggtagtggtcatgcttggggacaggtggtgactaggaggggcacaaggaaggctgcagsgtccggcccatcttgttgctggcctgggtgctggtctcactgatctctgtgtggtggggcaggtcagcctcccaggcctgctggtgcctgcagtgcccagcactcctgccgtgcctggcagtgttagtaccaatccgccagagtgactgactcccctcttgccctgagtagggcttgctgactccaggagcctcagggcggggtgggctttgagctttcttctagcaaacttgaggtctgtggctggtacccctcaggagcggaggggaactcttgtccatgagatgcttttaaccgtgcgcaataatgtgtagacgcatccaaaatcaatctggcctttagcccagcacttaactcttgggatgaggcctgctttgtaaatgttgataatccagagaaaatgagcttttagattccaaagacagccagatatcttccacttatgcaaaatgcagagaatcatatttaacaaaagatgttctggacaaatatgcttcttgagggatgaatatttaattataagggaaatgataaatcaaacattaatgggaaaatatgtttgccctcaagattcatgattttgatgggtctctggcaaatcttatactatgtttattggggttattttattgctggttattagtttttaattgtttgcttgttttctgctctgatcaatttttgtataagccgtgggtctattcaccctcttctctccattcccgggagcaagtccacatctggctgttggatgcatggcaaaagcaaaggtgtggagaaggttcagaggagacaggacatgtataaaatggtagggtcaggttgtcatgggggaaactgaggcacaggaggcaagctgagttagtacaagaacagtctgaatcataacgacatgccagtattacctaaaaggatgaggaacatggagctgtacttgaatccctacgtgagctggggaaaaggggcctcaggaatcactgacattggaaccaaggtttgtctgcagcttgtcggtttctgggacagaaacccaacatactggagtgggtatcccagcratctgtaggataaaccaggacactgtggtgtcatggatagctggctgtctgccaggtgatggcccctctggttgcaatgtgagccgggcaggtcatccatttggcagcatggtgagggctctggccccagttgctatgggagggaggatgctggcacagggcactgttcacagactgcctttgctccatgccttttccatgagcatgagtggctgttcgtgtgggaaacggcagagccctcgcrgtccccatcagcactgtgcagtggtaccggaggtggcaggagacagcctgatggcccaggttgtcttcatacccggcttcatgccagggtgcatgccgggcatagcacatgtgtccctgagaggcccctgatcaggggtggaaacccagcaaagtgaaaatcagaaatagtgattctccagtycctgttcacagataaagaaagaaagaaataataagcaatactaggcctggtgtggtagttcacacctgtaatcccagcactttgggaggccaaggcaggcaatcacttgaggtcaggagttcaagaccagcctggccaacatggtgaaaccccgtctctactaaaaatacaaatattagccgggcatggtggcgggcgcctgtagtcccagctactcaggaggctgaggcagaagaatcgcttgaaccggggaggcggagggtgtggtgagccgggatcgcaccgctgcactccagcctgggtgacagaatgagactccatcccaaaaacaaaacaaaacaaaacaaaaaacaaacaaaaacaactaaaaggacagtatctttttagcacccatcagtgtacaggatgctggggagggtactgtgaacttacccatggtgaaagtccctgtgttaatggataagctcaatgctcagaaaatgctgctgactgtggtattgccccatttaaagagacagtttgcagtacgttttcagaagtggcatgcagcctcagagaaaagtcaccaggggctggcatgattccagaaaatgttacagagcaagtggaatttgacttgaggcttgaaggatgggcaagatttaaataaaattcagaaacggtagagagggaggggctggggggaaggctgcccactggactgtcctgtttgcctccaggagaacctacaggcaagacatggtctcttctcaggtgaatgggaagccaagtagggctggcatgggtgagccacagctcgaggaggcaggccccgggccctgcgctgcctgtcatggctcatgagtgatgggagagatctgggcaggcaacctcctctcatcctgcatcatcagcctggacttggaacttggctgctttttctttctgcagttagcrgagggccttggccaacacataagcctttctgccagcacttggcattccagctgacctcgacccaaggcctctgtgacttcaggaggcggcagctgggaagggtcagggcagttccaggcagagcacagacgtcagctcagacatcctaccccccgccaaccccccgcccccggggtttccagagcaaccaacaccaccaagctccaggacactggaaaaaaaatctttgcaaagaagcaaggggccatctcagaaaatccaggtcccccaaattgatgtagggagaggagggctttgacagcattcagcactccagagggtcacgaggatacagaaaccatttggagccacctctgcttctcagccccacccaggcaagccctggatcttcaagggactgatttgtacctgggaataaactcatgcatggatgagattcagagtcaatcacaccctaaaatgcagagcccatagtattggtgagttgttcatgtgtctctgaagcaaatttagggctgtggttcaaacatcgtaaaagttaaaaaaaattcactggatacacacagtaggctcttttaaattagcctcatttgaacttaattacatatttaaatactcaaataataaatgatggctgggtgcggtgtctcatgcctgtaatcccagcactttgggaggctgaggcaggctgatcacttgaggtcaggagttcgagcccagcctggccaacatggtgaaaccccgtctctactaaaaatacaaaaattagccatgcatggtggcgggtgcctgtaatcccagctacttgggaggctgaggcagcagaagcacttgaacccaggaggcagtggttgcaatgagccgagatcgcaccactgcattccagcctgggtgacagagcaacactgtgtctcaaaagaaaattttttttaataaaaataaaaaataaaataaaataagtgagtccactgaaagcggtttctaccttgatagttgggtgtgtggcgtcatcaacatcacagaaggctgatcgatattaccaggtgtggttgagtgcaagtgtttgaggtctcgtgggggaagagtttggaattcagaatccattgaggccttcactcaccactttccctctctcgctgtgttcccaaatgtgccacttttctgttggctcacatgcacccatgctctatttgatattcagggctctgaatttcaagccagactcagtcagtgtgattgtcactgctttcctgtccttcctttatcatctgtagacttgggtcccgtttttgcaggttgatgttctgtcttcgctgggctctggactcactgctcacgagtgcggtgtctgcatgggcactgcccagacatgcactgttggtccctcgatggctgcatggtcaggcctcagggctctctgccaggccgacctacagcccatacagacctgatttctgggcctggatccaggggatgccatctgggaagtgcgggatcttcccacgatgtcactgtaaaactcaccagggaggttttagaaattgaaccggcatcattcagattccatcctgctttttggtcctgagaaaatcctgcttttccctgagtaactgggataatgggtcaccagctcccatgccctagatgaggactagttagcattttctagtgcctggagatttccagatggaagctgtacttgggtctgtgtatctttgttacaggattcaataattcatgcactgaatttcccttcccggcaactccagacaccaaatcgcttcccatggtgtcccccaatcacttaggaatttagcctgtgtctaaagaccctctctgcagcctgacgtggctmgccatcccagtacttccacgtttttcrtgcctttctccaacagcgttgccgtggccccttaggcggcgatcgttttatcaatggtcgctccctctttttatctgttggcaggagccctttttcaacgccctcgctggagtctggcctgcacgccttgctgaatgaagccggaacctcagccccgcttccctttgaaatgaatgttcctggggcgccctctcgtggattttggagctaatcgtctgtgaatgccaagtgatggcaactgccctcccgccgcgtctccagccggtgcgggggaacgagaccctgcgggagcattaccagtacgtggggaagttggcgggcaggctgaaggaggcctccgagggcagcacgctcaccaccgtgctcttcttggtcatctgcagcttcatcgtcttggagaacctgatggttttgattgccatctggaaaaacaataaatttcacaaccgcatgtactttttcattggcaacctggctctctgcgacctgctggccggcatcgcttacaaggtcaacattctgatgtctggcaagaagacgttcagcctgtctcccacggtctggttcctcagggagggcagtatgttcgtggcccttggggcgtccacctgcagcttactggccatcgccatcgagcggcacttgacaatgatcaaaatgaggccttacgacgccaacaagaggcaccgcgtcttcctcctgatcgggatgtgctggctcattgccttyaygctgggcgccctgcccattctgggctggaactgcctgcacaatctccctgactgctctaccatcctgcccctctactccaagaagtacattgccttctgcatcagcatcttcacggccatcctggtgacsatcgtgatcctctacgcacgcatctacttcctggtgaagtccagcagccgtaaggtggccaaccacaacaactcggagcggtccatggcactgctgcrgaccgtggtgattgtggtgagcgtgttcatcgcctgctggtccccactcttcatcctcttcctcattgatgtggcctgcagggtgcaggcgtgccccatcctcttcaaggctcagtggttcatcgtgttggctgtgctcaactccgccatgaacccggtcatctacacgctggccagcaaggagatgcggcgggccttcttccgtctggtctgcaactgcctggtcaggggacggggggcccgcgcctcacccatccagcctgcgctcgacccaagcagaagtaaatcaagcagcagcaacaatagcagccactctccgaaggtcaaggaagacctgccccacacagccccctcatcctgcatcatggacaagaacgcagcacttcagaatgggatcttctgcaactgatcgtctccatgcgccctgctctgcggctgtgttcttatttattgcatgcgtcgcttccacaggggcccctcaagagctgtgactcgggagagctaccttactttgaccaacagcctgcccagtgtggatgtctcttacagagggggcccaaggaatcaccaccccgcttcagtgtaaacaacgtgccttgtccactttgggctccagagtctttcagatgtactaagctgctgacatcatccactgccttctgctgcatcctagacaccctccctgttgttcacagagagggaaggtcgtgggccacacaatgctgtgtgaccctctccgtgtgcctctgaatggtgttttgatgattttacactacatttcctgtgcgtagaatggatgcttgtatattcgtacatctctatgttacacagaatttgtgttgcaggtgtttgccatgtggtacctacatagaatctccatacaacacacaggtaacaggttatacaagtggattcagactgaacccccagtacaaggacattgttttgaactaggtggacatgccatccctggtctccttagactgacatgattctcatgttaaccaagttttaaaagttcaaattccccaaaaaggcttgtccaaggctggccccagatgtgtgggtctgacccacaccagccctgtgtcctgtcctttcagtcatttgtccctgcgtaattttaatcgtattccaaagcccaattatgtgatggttttcaggtttctgcaaattacagaagagccagccaagatcacccaggagcttgtgcccccagatgggccaaagaaagagcctatgaaggagaagcagaagcagacggctggcctggctcaccttcccacgccagtggggcaggggtctgcttcaggaaatggaagctgtccaggaaatgagcagagattcacaagacagcactttgattctatgttgagtttgtttctatattagaaaagcagcaagtcagtaatcccccgtggcatcacagctaagtagctgtggccaccggcagtttcacagcatcctgaaagctggcactgatcgtgactatcagtgaaagaagtttaattttcaggttagaaaatgtgatctggcagtttatgcattcttcagagtaatgtaataatacctatgtgatgctgtaattttacttttcaacataagttgaacccgtagcagtctgtttaccttgtaaagggattacttagaagacatttttgtacatgctcttccccaaggattgtacgtattatacaaatagatggaaagaaaagtgaacacgtttgtagaactttcataagcacacagttgctgtgttgagttctctttaaaaacaaggacaaaaccaaccagcgttcaaaggaacctcccatcagagtcccctaaagtattttaggttcagtgagcatttgcctgaataaaacctaaaagagtagtcttaacacattactaactttttctaagagaaattgattcctgttttgtcatctgatgcaatttgctcttataaagagacattttcataggttcagagtaactcacctccatgggctgaccaaaggcttttctaatttttgttactgatgagatgaaacctatttgtaaggagatcttccccaggagcatttctgttgccttcttgacatcaatgaaaagtagcatattctcttatgaaatagcatgagaaaacacagggcatttctaggacagtaaaacgttaaagtactggattaagaaaacaacaacaggctgggcgcagtggctcacacctgtaatcccagcactttgggaggctgaggcgggtggatcacctgaggtcaggagtttgtgaccagcctggccaacatagtgaaatcctgtttctactaaaaatacaaaaattagctggatgcgatagcacgtgcctgtagtcccagctactcgggaggctgaggctggagagttgctcaaacccgggaggcggagattgcagtgagccaagatcgcaccactgcactccagcctgggtgacagagcgaccctctgtctcaaaaaataataataataataaataaaacaacaacaaaatgcatcagagagccaaaacattcagtattgcattttcacataggtgatgaaatgactttggaactttatctgtgttatagttatgagttgctttgggagacttggagctctctgtagctattgttcataacactttgctccataaccctgatgtccgcagtatctaagtatctcagccttcatccattaactctactagggagcccacagccaccatttccactaggaggtatcaatatttgtggtatgacataaggctcccttgaaataacaagacttttgagcaatctgaattaaaaatacatcaaaaaagtaatagcgctcatttgctaaatgcaaaaaataatcacctttgataccaatgtgcaccaatatgcctaactagctagccagctggagataatttaccagggaatgtttcaaagccctaactttgaagtttggaaacaggtggtcttctatgctgcagagaaactatgcattaggtctcttttcaattagaaacctttactatttccaatgtatgtttgttaaaaataataataataaaaccaaaagcctttgtggaaacccactcttcgtagtccatgtgatgggattgttttatcgttttcaccgggtgccctccccactgcaggggtgcgcactgttgttgcaggcttgctacccacctgtgtttcttagcatttcaggaattaaaccacattcagaaccccaaataacctttcccctttcttcttacccactatcataggtggtattttaatgaagcrtctgtgccttgggtgctatttacaccaattttggtaggtcatactattttgagaatggtcttttgatagggagaaatttctaagacccatggtaataaaagtgcagctcaaagacatgggacctcttgtcctgccccatttgctgttgtttatgcagcaggagagaataggtcagaaccaacctttgcacactagctttctcccacacaaacggtccattttagcctctctgtcccacttgctatgtaaagaggaggccagtgctcggcataactgttctggtagcgatgcttgttacaactcatgatgaaatgtcccaacgcaagtgaggacgcagctgcccgccccagagctagaaggtaaggtgagttctctaggagtacatctgcccggatgcattttcattccgcagccttgatgaatgggacgaggctttgttgtgactgttttttaagcagtcccccagggaatcactgaaaatacctacttcttagagaaaagtttcaagctcccctcctctcttttgtgaggcaatacaaaatccatcatccaaatgaaagatacttttcacaacagcctttattgcctgcagacttacatgtatagtcctttaaacaattaactgtttagaaaatggttgtttctctcaacccttgagccagttattccacgctggtaagaccctttcacagaaatgtaacaaggtgcattttatagaaaacatctaattaaatcaccagtttcatgcttttaagttgtatctacaagtgcaaaactgcaacacccaaatgtttttagtatctaagtcagatatccaaaagttagctccataatcagaaatgcgcacaccactgttctgataataaaggcacattttccaataaccaattataacaagaagtgcagcattacctaaattgggtgtgtcatcttcccctcctgggtcacaggatgacacctggggatgcgatgccgtgcctgcacttggcgatcccaggagcacagaaatgcaccagacagatcatgaagggctaatgcttggaaaccacaccatttcctgacagagtgaaggratccctgtggatttatcaaaagggaggagggaatttaagctaattctcttcacctgctgtattctcaaatctccaaaacaccagataacttaggttttttcatttgtcatagaacaaagattagagaacttgaaattcgttttgcatttccactcctcagggatgtcaaaaaagccagttctgttccagcacaaagtagaaagtggtgaattggcaatacgccaagacatagactgttacagtaattctttttgtttcacaaaagttaatggaaacaaaacaactttcagataatattcatttgtcagtatgtataatttgccatccaaatgctttttaaaaagttattatcttattattacacattaaatttacatggagttgtctcctaatcctgggattttaacaccaaatgtttaattctgaatacaaagaaacattcacatacttaattttacaatattctggaacaagttatattcaaaagtcaaatgaacagagaacattccacttgcaaccaacacatagctgttaacaaaattaaccccattaatatttaaagacggatttatccattaatgcctgttttaattgtcacttgattttgatggttagaaactttggttatggtaaaaatgatcacatgagtgggaattcattacctcaaagctcaggaccacagctccccatgtgcatgtttttctgtctgcagtatttcaaggtgagacaacaaaatagacacctaaaattgtatgagattttattcctggtgctttttcagcgagaaccatttttccagacctagggaaggagcctgtgtgtttttggcctgaaggattcatcaattcagagcatctgtgacagccaggaggaggaaagaagggaggctgggatcacctcccgccccttctagcatctctactgagagtgacaactccaggctgtccacccccatcctgagccttccacactcttctccrtgccactaacactcagtatctgacgcctgcagtgcgaagcctccagagtccccagactgacctgggcactccacccttgctggttctactttacttggacacacgggtaccttaaggcttgtcacactccaacacctttgtgtgtgtgtgtctttatttctttctaggttataaactcaggcagaggcctcatacattcacttctctatcccaccatcccagtacagggccagccacatattaactaatgcacaaatgaggccaagaaactggctagaaatcccaagaaactgtgccaagtatatgcagctgcacctgggaatacacgaaagcatgacatcacgagcacagcctcctccaccacaccttccctttctcctccttccctgctggcctcagacagctatgcatggctgcatgaaggaagatctaaatctggacttgttttatcctccccttcccttcttctcacctttattctgcctccaccttcttctttctttgtcttcccccrctggcttctctgtcatttcccacagtgggttcccccaatccctgtggtcctcatgtcctgttcttgttctctttgtgctggatctcacatcctacagcatccaggaccatcctccatggctgatgccacagcctgccaattcccaaattcttcacgtttgtttgacttcctacttagctgtaaaaccaaagcccagggaggagtcccaaggtgcacaacacagagccaatctgcgtgtgtacagagatgcagatccgtttttaatcaatgtaagtatatgcgtatatgtatatacatatgcaattcacattcacaagtcctggtataaagttgcaatttttctggctgctataaaatgtgccagttttaaaactgtgcatttgttgcttgcaaacttataaatatgtataaaccccattataaataaattatggctggcagatggcatttaagctgccagcaatggttgcatggagttataaatgcttattaattctccacttttaaattcacagcacggaccctgggatctgtgacatgaagtggtgtgaaagcataattataaattagaggggggaaagccatcaataagagacaggtaagggctggaaactctcaytagtgagtggttctcaaagtcaagacttcagagcagctgcaccagcatcacctcgagattttttgaaatgcaaattcccgggccccactccagacctagggagtcaggaacttggcggggccaggggggtggaagggcctgcaatctttgtctgaaccagctcacagggtggttytgatgcctgccttccactcsaagtctgcttgtcacgaacgcctgtctcagctcagggacatccccggcttaggaagtatgctcaggtgtgtgcagggccagtcagaaattgtttccagaaacagcytttcataagtgatagacttggtgaataaataccccagctgtctccccgccttgctgggtgaactctggggtgtcagctctgtctctcggggttccccrgtgggattcagctccagttgtgcacatgacggtaacttacttgataatgcacgccttccccgtcagcttccttctctccctacttccgggatcttcactcarataaactacataacctcaagtcctctctcagggtctccttctggaggaaccccaactaagaggaagtagaaacactgtctctcccatctgaatgactcaggcttttatgcattttgagatggagcacagatgtagaacccctggagggaagcactgcttgccatttccgtggggcagggggc

SEQ ID NO: 10001 - DNA, 54308 bp, Homo sapiens
caccacccaggatattctcttgagccctttccagtgagccccctgcagaggcagccactggtatgatttctgcccccgtacctgactgcctgtcctagaactcctacaaatggaccgtggacttttttggatctggcttcttttgctcacaatgtcatgtctgtgcgatttgtccctgtcctactcatggacagtcccttcggttgctgctgggtggtgtccagtgtagtattcctgcacctttgttctcctggaaattagaatctggggacagcaagaccaaggaccgtctcaacactggcccctccaagagaggctgctgggccagtcctgctttgtgaggcccggctgttccacctttccctccatgtgggagctcccacagacctttccagaaatctctcttaagttggctggagcccatttctgctgtttgcaatgaaacgtctgacttgatatgtctcattctgctgcttaagactcttctgaggcgtccacagcccaaagggtgaagtccaagtgctcacagagaccaccaggccatctatggcccagacccgttcccccagcccccatgcacactctcagacgctgcctcctctcctcccagcctcccacctcccctgcagggaggcacttcctgccccgcctgttctggtgaatgcctcgctccctctgcctgcagcctagacagcctgtctgtggggaaagcttctgtgatgaacagcacccgccccccgccggcccccaaggaaagctgaggggctccgcgcagtgccctccacgccacgtcgttcctgacccgccaccttggctgagatgttgatgttgggttgtctgggctgtggcccccttggactgcaggatccagggcccagggctctggccggctggctccctgccccacccccgatgcccaagcctggcacatggtggtgttcagcacacactggctgaatgaatgactttgttaaaagaatgaatgaaagtccaaggaggcggggctgccgcacacttcagtctggcctctgaggagcccagttccctctccaaatgggaaaaccaggcctgctgtgtgtgcggctctggtgggaggcgcacgatcccctgtgagcctgtcacggcaggggccctgatcctccttgatcctcacctctcggcccctcggctcccgctcagactgggcccctgtccccagcccctagcccagctttcagtaagagcgaaaaagagtggtgaggaaatacaattcaatgtcaggtgctatgagaggcagtggaggagagagctctctggagccataaaccccgctcgaaagcaggaaaacattccacagttggttttgtgcatgagtgtgtgtgtgtgtttttttgcagctgtaaactccagggccagggctgtaagcttggggaagggaaaaagcgaagggggaggaggtggagaagggagcggagctgcacatgtgttgcagcgattaaggagaatgggggccgggagggacgtcccaaaggggggagacaggtggctgggcctggggcagcctgaggagcccctgcagaagggctggaatgtgagctgccctctgagggaggcagtggagtgcagaacggaggtgggccggcggggagcgggatgtgtgtggctcccgtccgagccctggccgcctggacgcagaccagctggctttggggaaggcgtccagctctgaacaggactgaaatgaccctcggttctccctggagcaggggaagcgattggcctggggagctgggagagggggaggcagagtggaaaagccagaccggctgctcttgggggtgtcgctgccccaggagacacagggtggggggcacaggattgggccaggccgggagccgctcaacctgggcaggctctgagccagcacagacgtgagctggcacccctgttccttctcaccccgaagcctcccatggcccctgcctgccagcccaccattcaggagtccccggcatccaccctactctccacctgctctgggctttagccaaaccagatccccacagccatatgccctccagactctgggcctctgcatgaccttctgccaggagaccctcccctggttccctgtgtagcctcagcttctcctgaccccccagaggggtgtgggctctccctgctcagaatccccatggcactgagtgtgtcttgaaaaccaatcatgtccacggatggacggttggtcagcgctggccatgtaccaaggactcttcatacctgtctcgttgggcccttccagcagccgggaggtggggtggaggcctctgttctccccattttacagaagaggagactgaggcccagggagcggcagcagccctcctctgcccagcagatggcaggccccagtgggctccagcgggctggtcctgggccacgctggggagcagggccgccctgcactccccttccctcacccccacagccgcaggagcgcccctgctttatagaggcgctgaaatgcctggaatgccaggcagctcccgcctcccaacagctgtctgtctgcccggcccaggagggctggccggctgctgcgtttgcgtcctctacattttgaacacctgacctacagcactgggtcaccccagagcacagcagtccttgtgcctgggctctccatggggcccatggaggctcccccacaactgttgggaagggcagggctttgctgctttctgcctgctcctcggggtccccatgcctgtctggactgccacccagggtcctcccctgcgcagcgtgacatggctccgcgtgtgcctctgcggccagggctgcaatgagcaatccgatattatcctcagctgcaggctgaagatgagcagctcaccacccccagcttctgaacacctgccaagtgagccaggtggagggcttggcccatcctagctctgggacctctgcatgcccttggccctgggagcctcagtgtcctcgtctgcagaatggagcttggggcggggctacctcccagggttgctgcaggggctgaagagtgcacagacgtgaatagctcagctgccagcccggcctctggcaagggctctctaatgtctgttctgtgaaccagggactcctcaccctccgaagtggggagacccatcttccatttacagagacccaggagctgggagaggggttggggctcgaacctgggcttgcctgagctacacgtctgttacctgctcccctttgcagggctgtgggatggtgcctggcaagtgccactcactgagtgtgactgagaggggacagccacacctgggtcagcagcagccccagcccacagtttcttctggggacctgagaattcagctcccgggacccagcctgcccttggggacgagacttgtggcagggttgcagctggcggggatactgtcggggagctcttgcgggcaggagactcttttgcaggcttgctgggaagcctttcatcttggctgtggttcctcccagagctgtctcccagacagcagggctctgcctgacctcaggccacagccacaccagggctgctcaggtccctatccctgctccagatctggagacagaggagcctctttctcctagagtctcagaccaggagtggcctaagcagtctctgttagccatagacatgagctcccccagctcgagctttcagcgttggcctaacagaaaacgccagtgctcctggctgagaaagaaggaggaagaggaggaggagaaaccaagttctgtggtccggcaccagctggtcacccctgggggctgcagtcccctcctcagggcaggctctgatcgggggcataggtgtaccacccagggatgtccattctccacccgtgggctgagccacagcagggttgatgttggcagggagcactcccagaggggaatcggagtcctgtgtgtgtgctgggaggacggagagcaggccagcccagacccacacctctcagtgaaccaaaggctgctcctgacccctttgcaggccctgcgtccctgttggtcccagcctcttgtctgccccagcttgcctctctacgtggaaacttgcccctcttgggcaccacatccctgggcttgcagggaaaggagaagctgagtcagggctcgcaaggccctgggctccaggaacagcagtggaggccatcggggagggtcccgctgctggtcctggtggggaggctgagcacgtcctgctgctctgggctctcctgggacccaggtgcaccccatcctggaccaatgacaggcaccccatcctagccccagacatctcacaggcacactcgagagacaatgtgagaaagttggccaggctgagaaagtccacttggactcaggcggggtccaagccttggcctcagcttccttctctgtctgggcgtggcagtgttacctgatgtggcattgtcaggatggaggatgacagcagagtagacactggccccgggctaccctttgggctcagagcaaagcacgtgcagcccttcctttctccaccaccatcccaggcccttctcccatatggactcatttcagcctcacaagagtccagcatggggagtgccttatcaccgccactttacaggtgaggaagctgaggcacagagaagcttctgccctcgcccaaagtcacccagctggagagagayggagtcaggatttgaacccaaagagtccggttccaggcactcacgcgtgaggctgctgttgctgtgctattggaagagctgctgcttcctatgctgagcctccacgctaagcctctgagacggggcccttctgagtgtcgggatccaaggtcctgggtttcctgcttcacctggctgtgacaccagtggctgcccgcccctggtcactgtgggtggcatggaagaaagagctcactggcttggtgatgtcctcctgcccccagcagatatccctgacayggggcatctctggaggtcatggccgtgtgcgagcagagcccgaggggctgctgggggctggggttcttccggtccgccagctttcagatgatgcttccaggagtcctggtgcccagaaggggcctcagggctgctggggagaagaggggaagcaggagcccccacctctgcttttgtctcagttgtctcttgagtgtgcctgtgagatgtctggggctaaaaaaggaccttgaccttgtgcaacagaccaggaaactcggcctgtcagggacaagtggcctgaagtgacctggccagccagtggtcgtgcatggacctgggaccagccagggaaggcgggggaggctcttcccgtatatccagccccaggggggtctcagggacagctggcttctatcctgggccaggaaggaagctcggggacagggacggctcttggggttgctgaggccccctcgctctttccctggggctgccttctgagtcctggtcctcttccggggctgccagccacctcccagctggccacatggtcccttggtggccccgtcccagtcaggtgtgagaactctggctgggtctgcccaggaggctcctaggatgttctgggtcctgggctggcaacagagaagaaccgcaggatgccagggaaggtggtattggtgggccactcttgaggctgtggccggccagccctatcggctaggtgaaccacactacacacatacatttgccaggcctgctaggcctctgggtgacagagaggggacccacctcgacagctcgggccacgtccttaaactcccgagcctgctgtggccactttgctgtgaggacaggccctgctcccactgcggcagcctaacatcctccccagggaacctccaaagtggtcagccacggcccaccagcccctctgcctcaagcctgcttctctatcccygccgtgttttccctggaaccccaccctcccgggcatcccccacacatattcctgctgtcctatttctaagctcctcagatatctggaaaacactggcggagaaaatccccttcttttttttctctctctttttttctttttgagacggaatctcactctttcacccagactggagggcagcggcgagatctcrgctcactgcaacctccacctcccaggttcaagcaattctcctgcctcagccttcygagtagctgggattacaggtgcccgccaccacgcccagctaatttttgtatttttagtagagacaggattttaccatgttggccatgctggtctcaaactcctgacctcgtgtgatccccctgcttcagcctctcaaactgctgggattataggcatgagccactgcgcctggccaacaatccccttctaaaggcaggtggtgtctccagcaccagggccatacggctgcaacacccctacaagtgccggtaggtgtgggctgagaccatcctacatggggaaggccctgagaggccgggaatttgcaggccgaagagggatcctggagagtgggggactcacctcaacagcactctctaaggggtaaggagcccctggcatcaggagctrccagagcacctgctacgtgccagtcatggctccctgtgggcctcaagtctgcaggctctggggtaaggggtgggggtggtgtggaagtgtggctggccaggggagctggggcctggagggtcacacacctgcaggaggtcacagagccaggggatggctggccccacagacccgtctcccaggtggccagcctgcagcctgtgccgtcctgctgagccaagagaagacactgggggtgtttgtgttggtcggctgtggggtccctcccaagggaaaccgttagtcaccctggcgctggctggatgtgaggccacaaacgccaggagagctcggggactgtgccaaggggtgcgaggcctggcggtcaccagaagagagaggaaggggatggcagaggcacccagagcgagtgtaatccggtcatgtgagagggactgggtgtgtgtgtgcckgtgtgtgtgtgtgtgtgtgtgtgtgtgtgtgctgggtgacaggtgccaccatgtctgtgattcagcacagcgaccccagggggcagtgtgggcctgggttagggttagggttagtcctggttccacaccgcaggtggccctgtgactaggagcagccaccttgcatcccagttgccccagcaggagaatgagatgaataagacttgcctgcccgagggtcccggggagagaaacttaaacaacccggcagaggagagaacccgacactcaggagcgctggcatcccagccttgcctactggagaggtgacttggtccccgaacytcagttcttccacctgtgaaatgcagatcataaaggtggatctggcctcacagctctgggcccgtaggacaagctggacagagggcagacggtattatcgctttcactactattactggtggctttccttcccagcctttctggtgggtggtcagacacagggcagaactttctcatgaaggcagctgaaggaactcacaagtttcttccagcagggaggacagagggaaggagaagtgtcttccmggcactgctgtgggcccaggacatctgctgcatggaggcaggggcatggatgaaaagacacagatgacctgatggaatggtgccccagcttcctcctcctcccctttttggaggtgcctctgtttgycgaggatgggctctggggaagctggtgtgyagaggctaggtgcccagccttgctttaggaaagcctcacaaagtctggggcccgccgggrgtttcccaggggggctctgctgctccacccactctcgctcccctctgtgccctgactcagcaggaacagaggcttgagctccaggcctggcctgccaggggctgccaagttggtgctggacatctgcagaatccctgagcctctctgccctggccctggctgctctagccatctggtcagcaggccacgggcacatctgtctcctccctggagcccttggttcattctcgctgggtctcyctgcgtccctccacctgcttaggcccctgcatctcgggagctttctgaggctcgtgacctggggcacggtcgtcccggaagttcagcctttccctccgtacaacggagccatcagacgggacacctcatacatcccagaccccattctcaggagccccagggacagggcccgctctggaggcagaagccggacaggcggggctggggctttgccaccgccagcctccccggtaacctcaggccagcggctgctccgtctggacacccgacatgtggcccccagttctggacccgggaagaaggcctccctgctcgccgctcctgggccgccgccgccggcagcagccaacaggcagctgggccggcctggccgggctccagaggcgcagagcgggttaaagtgtgcgccaggccggccggcgcgggcgggggagcggcctggtgggaagtgtgagtgttcctccccgtctgcctgacagctataaaggcggccgccggcgcagagccgccactgggctgcgcccctcccgggaaccccctctcttggatgctctttgaagtgggagagggaggcggcgcgggggaggaggggaaggggagagggaggccgggccgcagcctctgcactcacgccgcccccgcacgcacagcgcacctggcgccgtctgccctccgcagcgctcgcccctttctctgggaggacaacctgctgacccgaagccaggtaggccacctcgtccccgtccccctcacgttgcagcgtccaccaggccagcccactgctcagagtggggctgggggtaggagcaccccgcgccctctggagccgttacataacgtggggaggcttgtggggaggggtcgggccgcagagcacggggcagggtggcctcccagcacctagccttgtgcgcccggagctctgtgtgcacggcagacctctctgctgccgccagccgctgcttttggaccccagggagggatggatccccgtgagcgaggcctggccagaagccagtggtgtctggaagccttaatgaaaaaagcaagtgtgaggccggctggcacctgtcttcagccggcaggcagaggctggggcacccgttagccaatggcacagtggagggggctcctgtgggtgtgaggctgagagtgcagatggaggtctgcaggggagggaggtggggggcaggcggcgggggcaggggaggtcagactcaggctccccactccagggtgcactgctgygtsgtccgggctgcagtggtgtccttggagtggcccctgaaaatctgcaggtgccgggcctgcaaggaaactcttcaagttggatggaggctgctgaggagggaggggcagagcccgagttggcctctggcctggcaggggtgaggggtgacctccatgccttcttcccctggaattggccaggcgtgggggtcgagtccctgagtttgctagtgtgctaccttgctgtgtggctttgagcaggttggctcccctctctgggctccaggttatgagtgcaggctgcgtggtttctgaaatcccttctctaactcgctggcaagtgaccctcagcacctgagcaaggcctggacagaggtcatggtggatctctggtcttcccttccacagggcagggtcgacgctgaggagggggtggggagagctgagggcctggaggctggacagtcccttccaatgggcttgctttgacccctggcaggtgttttgagccaagggtgctggctgttgggaggaagtcagccttgtggccctggactgctgacatgctggcacaaactgcacctcctcctgccctgcccctcccccaattccatcttcyctccggggatcgggaggcggcataggtacctgggttctgcctcacctgagtgccggctgttgctggatgctgactgtggagctgctggtctagggcgaggctgcacattcccccgggacctggccaagcccatccccatgcactgaccctagcagccwgtggcagaggccattctcctgcgaggccagcaagagctgagccagttaaaatcccaaggtgctcctgccaaggcgctggactgagcccaggcccatcccttcraaccagagcctttccccccgcctgggtccccagccccctcagccgaggctggctgtctccacagcccttctctagggggcttgaggacttggaggcaaagcatggcatgcttccctgcatgcccttggatcaagggtggcacaggcttagcacgcacaccgccgctgggtgtcttgcctgmagcaggcattactaatcattcaccaagctccttcttgctaagcctagactgaggcggggggttcatccttcccaacagggtctgccagacaaccacgaccaactagtcccagataaccttgaggcctgggcactggctgggccccgagggctcttcccaaagcgtaccctggtcatctggaagaggatcggagctggcctggtggtgacagtggccttgcytcctaggatggatggcagatggcaatgttcctgctgggcctggttcctgctggttctggcagttgtagctggggacacagtgtcaaccgggtccrcggtgagtggggtgttgtggtctgagggcccatgccagtcccctacccaggtgctgtgatcactctcagatggactggcttggagggagccgtgtgggcacgtgccccaggtcccagaacccatcttggctcctagaaacttctkcccagagccagtcagatcagcctctgaactggggccctggctactgtggagcccctggcgacttggcaggcgagggctgagggggctgagtgcttcccttccaagtgaaggccccagcacggccagkgtaggctgtgtcctgcagaacgcagttgggccctgagctgctccggggaaagtgaggacagttagatgcggccccaggagcttgccaagcccccaggccatcctggaccttaaggtcaaggaggacccgtggcccacggttccttgggagwtccccccagcgccacccaggagatctgaacccaagctgccgagtgaccctgcaagggggcccagccaggsggctgtgtcttctggtcccgctgacggtgataccctcgggcatggggtgggggcaggctggtcctcctgggcacttgagccctctaccatctgggggtccctctcacccaggacaacagcccaacatccaatagcctggaggggggcaccgacgccacggccttctggtggggggagtggaccaagtggacggcgtgttcccgcagttgcgggggtggggtgacatcccaggagcggcactgcctgcagcagaggtgcgaggttgggcacgtggccctgaggggatggcatgagggcagggtagcgggcaggagagggcggttggctcttcagcctggtggcttctccccctgggagggctctcgggttgggggcagcacaggctgagtccccccatcagcctctgctggacgcggctatggatgggccccagcactggtgctctggggtccttcatgcttcagggcaccaggaaagccctttcacgagagggcaggagccatttctagaggtctgtcctggaggcggagaaccaccctgacttctcttctgaagacctgagtgagggtctttagaatatgccagggagccccgggagaagcagaggactggcaggaaagcctccgctgccagatggacctggctcctatctagcctgtgctactccctcactgtatgaccttgggcaagtcacttaacctctctgagcatcagttttctcatccatggcatggagagcgtgctggtctcacctcatgcttctgagaacacacatgtgtgtgcacctgggcacaggcctggcacacaacccatgtggttgtttcaattctgtgtactgagcccctgtgctatgtgctgctgatgtagaagtgaatcaaatctcattcccccttggctctggtgtgtgtacggggtgggagttgagtagggaggaaggagccctctgggtcacgggtatcgggagattctggatcccagtggccgtggggccagcccaggcgacattcctgaaactcctctgcagccctcactccgagcctgcatctttctgccaggaggaagtccgtcccgggccccgggaacaggacctgcacgggcacrtccaagcggtaccagctctgcagagtgcaggtgaggcccggcccgkgcaggggcaccatggcctgctctccctgtcatcatgcagttttcagggggtcttccaggtggctcctgggcattctgggcattctgttgtgggctgctcttcaaggagagcccaggagcagggttgagaaggctgcggggggccctgggctagtacggagccatccactgtccagaccactgtccctgtgcycacatgtgctcagcaatgctgggacgggcggactcactctgctcctggaacttcaagtgcagcctcaaggtttggggtctctggtcgcagctccactttactcacaacattcgtgcacctggtgctcacagagacccagcagttgccaggcttccccgtcccatgaaacagtaccccccacsccataaaacagttccctgggttgctctcggagcccttctgctccagcccccatcagcttccttgggtagccgaggctgragaggaggttctgactctgaccaggcagctctcagtggggccctgggcagttggaacctgaacacctttccaaggactgcagggcgtgaggctggggcacgccgagctgggatctgggcctcccaggctggctcgtgtggcttgcctgggcagggaaggcagagcagctgggggtctctgtgtctgtgtgtctcagggggtgtgtgcgcacgtgcagggagtgaggggctggagggaggcaggtggccaccgcttctgtgttggcgtcacctggtcagctgccctcctagggcagtgcagccagggttgggggaggggcatttatgagctccagcatgagagggacccaggtttgagctctggcccyggcacgactaagctgggtcccctccgaggatgagtctcttgtctgcacgctgggttcctctttatggagtcaggaccacgatcttcctgatttacgcagtgtgcatggccacggaccgtgtgccaggccctgtyccgtcactgtagacacacagtcagggcctgctgaggacacgggcgaggggagcacccttgccagccatcctagggtcatgtcccctccaccgcaaggctgggagaaggcgtggtggggactgggagggttgtgtctagagtaggcsgagggctggcgtggggggcggagctgcccttycctgcgtccttgctccctcctgagagcgcrtgggagcgcgcaggagccctagaggccaccccgtgggccgtggcccccgcacggctgtcccggctgtcccggctgtcccggctgtcccggctgtcccggctgtcccggctgtcccggctgtcccggctgtcccggctgtcccggctgcagccacttcctgcttagcctggacaaaaatgcctttgtcgggccgagttcctcccggagcctccctgtcccttcrcttcccaggagtgtccgccggacgggaggagcttccgcgaggagcagtgcgtctccttcaactcccacgtgtacaacgggcggacgcaccagtggaagcctctgtacccgggtacctgccgccctggggacccaccttgcagggagctgactgagctwtgggggtagcccttccggcacctgggaccaaactcgacgggtgggcaggtggggaaatggaggtggtcagacgaagagccaggaatgaacctgggtctcctgagccctggcccaggggtctgtcccctcccccatgacccatgacatcaacgcaggacagattacgggactgagttccctgcagacctgacctctgacggcagtggtgacttgctcacttacttactggctcctgggcacagacaggaaccagcctagacgatcccaaacggagactgcccacacggtcccatggaaagcaagtagctcaggcaacagtgtaaatgcttcatccttctcctgctcacccgcaagggccagggctggggtgcccagggccagcagcacaggggtgtcgagttggctcagacctcctgcagagggggaaccccagtatgggtctcaggcgctgctccccactcacgaggaggtagaagctggaactcacggggtgtgggctgagccagaagacccatcagtttctgccactgagacctggacaggttccttctgttctccaggcctgagttgccccatctatgcaatgggagctgtctcagagggaggaaaagggaagtcctctgaatccggcatttcctgccccgctgaaaccttctgtctttgtctccctccaccagatgactatgtccacatctccagcaaaccgtgtgacctgcactgtaccaccgtggacggccagcggcagctcatggtccccgcccgcgacggcacatcctgcaagctcactgacctgcgaggggtttgcgtgtctggaaaatgtgaggttgttaaacgttgtagcaaaagtaccgccggtctcactgtgctgactgcccgcccgcctgtgggaggcagtggcggccccggggcctggccacagcgcmctcccagcagccctctccctctcccttcctgcagcccatcggctgtgacggggtgcttttctccacccacacactggacaagtgtggcatctgccagggggacggtagcagctgcacccacgtgacgggcaactatcgcaaggggaatgcccaccttggtaagccacagcgcgccctggagtccaagcacagcagagtctgggaatcgggggtcctgagtgtgctcctgtctgcagcctcctgtgtaccactgggcaagttcttcccctctaggggcacctgattcagcatcccaggccgggtgagctggcctggtgattgtaggcctccgttggcttgcaagaatgggcaaccctttgttgaggacctgctgggtaccagtggacacttggcttgggggtcacatttgccctttgagacagcctgcagggaggtgttaacaatgcaccttttttttttttttgagacagagtcttgctctgttgcccaggctggagtgcagtggcttgatctgggctcactgcaacctctgcctcccaggttcgagcgattctcattcctcagcctcccgaggagctgggactacaggcatgtgccaccaagcctggctaatttttctatttttagtggagatggggtttcactatgttggccaggctggtttcgaactcctgacctcgagcgatmcacccgcctccgtctcccaaagtgttggggttataggcatgagccaccatacctggctaacaccacactttaraaagggagaaactaaggcccaagacccattctstccacggatatgaggtttgaccctggcacgmtggattctggggcctgagtttcagaggctccctgtcggctccaggctgacccagcccagaacccctcyttcccttgggcagcacctgtccccttcctaagctgcaggcatttggcccgatgtttgtgtccagctctgtcccagccctcwtcgggggtgggcgtctgtgcatgggacagcactttctacttttggagggatgtcacttgtaatgcttggcattagattgaacacacttttggttctgaagaaatgtttgaggaatggaactgggttattgcaacctccagacctgggaaggcaggacagcttcagacccacttagcagatggggaaaccaaggcccagagtgggaataatctgtcaaggtcccaatgaggccagttgactctggactagaaccaggcctgttagggccayggaggacccgaccgtgtcttgaaggtcgagggaatgacctcagcctgccactgagggctaactgtggcgtgagtgttggctscaggaggtgccagtgggagggcactggagagggtggggcttggacatgggacctagggacgggygtgccrgactgacaagggacaggcaggggtgtgaataatgcgggctgggtgtccagcagggcgaggtgggcagaggccctttctttggaggcctcgctctaggagccgctaaggtgtctgattttcctcccttcctctcacaaacctgctcacacggcctcctgctggacccagggcatgcagagggagagtgggcattggggcagcacgtgtcttgtagggcacgtagtgtgtgccaggcactgtgcacacagtgaggcctgagagatagggctcatgtcctcgtggaactcagcctggggccmaggggctgacatgcaaacagcgcccctcattcttctccatattcacaaggtaactcattcacgcctggcaacagctctacaaggctggcactattactgttgctgaaatatacagaaacagtcaaagagaggctaaataactcatccaaggtcacacagccacaagaggcagaacggggcctgaacccaggcagcctactcttggcctgtgatcctcccagctgagccacactctttccccrgacgaactgtgcttggtaaccacgctgggggctgtgggatgggctggggtattaaatgctcaagaatcttgtgagctgcttgctaatttgaaaattaaagtataacagtctatatttaaatacattatatttaaaacaaagtcaccattttctaatcctttagtgtctataactatttttttttttgagacggagttttgttcttgttgcccaggctggagtgcaatgatgcgatctcggctttctgcaacctccgccttctgggttccagcgattctcctgcctcagcctctcaagtagcggggattacaggctcccaccgccatgcccagctaaattttttttgcatttttagtagagacagtgtttcaccatgttggccaggctggtctcgaactcctgacctcaggtaatctgcccgcctcggcctcccaaagtgtataactattttatctgtgtggcaaaaacaccrtatacgggtgtgctgcagcctctcttcccaatgccacacccagtgatatcaggttggtagtgcaaacaaacatagcttcagtcgcttgcttcaagcttctatcttgaaacccaaagaaggggaaaaatgttttaaaatgcattttgaagttaagctgccccattacagtggcttgaaattggccacagcgggggtgtttacaccacggaaattggccaatgctacaagtcacagctcctgttccccygtgtctccaaagagcccactgttaaacattttccagagcacggctgtcygtgagggacaggtcaggatctccagggacctgtaggtgtgatggtgttaggggagggatggcaggcgggtacyggcctgcaggagacactcaccccagcagggagatgcacgcggaatcctccgttcccrgagggatccggtgagamaagcgtcaagcctcaggaaacgtcygacctggagagccccttctttcctgtcccagggcrtattaaaatctcyccttctccccaggctcctctctcagccacctgccagcaatgcctctccttctcygagcacctcccctccagacccttggtttctttctagctgggaggactgcatggctgcctccgcacgggcctgggggccttgaagacaggctctgagctggctgatattgcccgatctggatctcagcctggggcctggtgcttaggaagggcgtaggcttagttggagattctatctgcagctctccttgtcctttctcacccacgtctttgagtgtagckagccttgaaagycarcgtgttgttgtcacaagacaggattttaaaatggcagtgacaatgcacgcagggagctggggctccatcggctgcccagggtctcctgggtgacacatggcagagccggactgaactcccagtgtgctccatgtccctgtggccctcgctgtccctcgggaggggctggggcaagcacggatgagccytcctatggccttggtaggaaggggtgagcctgggcaggtgcccagcttggtgrgtcagcctctgcaatgggacggggctgagctgagctrcacaagcgggtgtgggggttgggccagcccttagacagccaccgctcaccctccaatagctgtggagtgggygagtgccacccaaggctgcctttccaatcaagaggggctcactgtcatccktttgcctccaggttactctctggtgacccacatcccggctggtgcccgagacatccagattgtagagaggaagaagtccgctgacgtgctaggtgggtacgcagtgtctggcagctgcctcactgagcttttggttgtggagcgttgtgcgtggcagagaaggggcacttgaccctggaccccttcctccaggacagggatggaccagtgctgygggcatggctgcaggagccagaacttgagccagctgtgtgggtgtggctggggtgctcayaggggagccagctttacccctgtgcatggcaggaccttgaactcagagctgctggacaatgggagggtggtgatgttgggtggtgagctccctgtcactcgagagcctggcacaggcagaagctgggggccgctgcagatgagatccctgtggggttcgaggagtgagtctcaggagatgacaaggtcaaggtagcactgagaggaagtcggtgcagaggtaggattccgactcaggtctggggtctcatgctgatgttcttgccattagtcagactccgctgggaggctgggctgtaggaggggagtcctctaacctgagtattctggagttgtttccatgatggacagagtggtgaggccccatcttggtggcagattttgagtgtagggagccttggtggcaaattttggaagagccctctgggaagatggagtattggccgagcarygtgccatgtctgcaccccttgggccacagtgggcaggtgctgacacctgtgagctgctctgtgctcggcccttcccttyatggggcgggcttgggtatagrgacgctgttcttggacacaggtgcagccccaaacctgacactacctgggtttactccccccactgcctcccactcttcttgagagccagaactggtggggtgaagcccatctcctaagrgggtgctggaagaggaggctttgctgaaggtcttcaggctgggacccaccttgggttctcctgttccctctccagagcctaagggccagccctccgtatgtgccctggggtctgagtgcccctgccccagcaggtctgtgctgcagatgctggctccaccacccagcgccctgggggctrctccctggcccgagcggggagccgggcctctcgccaggccagttgctttgtcgcttgcttgctgggagagtggagaggccaggaaactccacattctctgagctggctgcaaagctcttgctcttgaaacagacgcgtagaaataccaagggtgggctcggagcactgggaaagccgcaggaaggaaggtcattactgtcaggaaacaggttttggacragagcctcggatttaaccctgtgcatatacctggaaacagggccgagacaaccaggccccagcacactccccctcgcagaacttggactctaatttgcgttatcttctgacttttctacgtgaagggggtttttcaagcagacatgtcctgcttgttgcgtctgtctgataataaattaattgccccggctcctctgttcatattgcatcaggaatttggaagccgaactcctcttctcccactggccagttcctggaactggctttaaggacaccctttggaagacagagtgtcccgagcgccgartcggcctcctccctgcgtccccagccctggaggccccccacctcttctcactctccatggccccagggaggatcagttccccytgaaaccccaccagctctgggcwgttgttccagtctgcaggggtggtggggagtgggggctgcagggcttcatgggccatttgtttccatcctgagcttccatcaggctggagttaggccctgggagtgcccacccacccggccccaggaagagggcaactgagattgcaccaggccrccctggcctgattgggcacccaggaagagggtgactgagattggaccaggcygccctggcctgattgagcacctcggccaggcctgggtgcacgggttgactgggtgaagggtcagcatggccctgcctgcaagggcagcaggaagtctctgctcccgtggagaggttggagctggccagctcagggcgatccccaggaaaggcctggtggtcagcacacccatgccagccaggccagggctgcagggtcactctgtgtggatgacgggaggggcacccaggacccctgctgyctcgtgtgtgccttccacaggccacagactctcctgctccagactgggtcccttggttgtggtgcgacctcattaccttgcagcccctcagcttcttcacaggtagccacaagaacaggaccaaatgggtccccagccagccgtgttcaatgtctagaccagtccttcattgctgattttaggctgagaggaacgtgcgtttgcccctcctccgcattcactggccasactctccatgatgggagtttcctgtctygggagcatttgagccggggttctggagggcagggctggtggtggttccctgagttggtgacactggctcctcccccagccagtttggccttttgtgaccggcggctttgcccttccagctcttgcagaygaagctggctactacttcttcaacggcaactacaaggtggacagccccaagaacttcaacatcgcwggcacggtggtcaagtacmggcggcccatggatgtctatgagaccggaatcgagtacatygtggcacaggggcccaccaaccagggcctgaatgtcatggtacgtgtgcygcaggccttgggggccccaggggccctgggcactgyttccccagaatccagccacaggtgaggtcttccagcccgtgacgcccccagggccactgtgcgcgtgcaccyggcagcctcaccactctgcgtgggctggggcttcacgttcaatcactgttactcattcacttgttctttcactaactccctcccccattcattcattcactcggattttggttcatttccagtctcccattcactcatcagttcattaattcatttacctgttcacttctcactcaaccacctattctctcacccacttcttgaaatcattcattsctccatccattcactgtggctagcttccctggaggaccagcgggggttccgtgctggcccatttcctgccctttgggaagtccacagggagctcggggcattaaggttgaggctggacccctccctaccccacggtggaggggtttatgcccctacctagcttcaggctccaccccctccccaggcactatggtgctsggtccttagtgccagggcccaaggtagttcccgtggcccctgcccctcccctgacatggcctccccaggatactcaggggttctggggtggggctcagggcccgagcagtgrgcaggagrgagcgtgggcctgttatgcccgrcttgccacaagttcttctatggctagcgtmtggaaatggagsctctggtggcttggtgcctcagcaccgaaaatatgtaaaggacttgtcatgtcactgaagtcaggtgacatcaagawgggcagttgtggtgcccgtcaaggcctgctgactttcctggaggccgagggaatacagcagggwtggagccaccccacracctgggctgttttggtttccagatctccctgtrgtgggtttcattgcctcaygttgcaggtcatgaaatgtgggcacagagcgagtgacttgcagtcatggaattgtgagtggcacgactgggctttgaacccaggcctgcctggtgccagagcctgttctttgtttagctgctgtgctggaggggtctctaactgggggtgcttgtccatctccccacactgctttttggctgaagagctttcctggtgaccccggaatcaaatgggggccacgcatctctgtgtctrtgcttacctggtcctgcctggagctgtgtctgraggtggactgaccacttggctttgcctcctggctgcaggggctgttttrtaggtcagggtccccagaaaatagactctgaggtgggggtttgtgtgcaagagrgcttggggggcagtgtcaggagcggtctcaggaacactgrtgtgggcaggagggcacgggactagacagagggrgcagctgagttgtgatgcagtttcaacgggcttcggccagccccctgggggtygcattatctcaagttggggcaggagggcatcrcatactgccaggtgtagttgccccttgtggggggcatgacctggggagagacagctccccctggctgagggaaattcctggggtggggcacagctgtgaactgttgcrcrcccaccccaggcagttcaccgaagggtggggtccgtggtccacccccggcacagcttggacccatgcgctttgcacgagtctgccttggcaggggaacagcccctctagaattgcattggtttctttctcagggagccttacaggaggaagtttagtgggctgaactgcagctggtgtaggggctacaactgacactcacagtttccttcttctgcgacgccctctatttccccttagcctggcttagcacctcagaggggccaggtggctacctggtgaggtgaccctggtctccatgaccgtctcaacctgaggctgctgcttttgtccagttatcatcacaaggggcagggggataccaagagatgcccagggcatcagcaggtgccacatagattctttggccccagggtcaaacaacgcctttcctactcttttttttttttttttaagtagagagagggtcttgctatgttgtccaggctggtctygaactctaggcctcaggtaaccctcctgcctcagcctctcatagtgcttggatttataggcgtgagccacctgccttggcctgtctgctcttgatgatcaagttcratcacccagccaggacggccactcgtttccatgctgctggtctcttggcacaaaatgcccaaacagaccgtgtgtggccgcagcctaaagtgtaatgaaactgttrcttcgtctttgggtggaaacgttccccatgtgcaaaccaaggtctccagaccacagaccccagagctgcagggatggggaacacacagtccccaagtggtggctgggaatgatcgctactgctactgcccctcctgcatcccagacccatgtcttctatgtgctgggcacacagcaccaggactaggcacagggccagagggtatgagacagctgtgtcagcamgggacccaagmtcccccatccaagacccttgcwcccacatccgctttctagctcacagctatggctgtgtgggggtgccctgaagagcagagaaaaatggccaaacttgatttagagatgggtcggcttgccctgagggtgcaagctggaagtaagatctacttcactaaagccccatccagggctggcctggaaaaacggcagtgaaggaaaatcctttgatttatgtgggtggtgcctcatgggagatgccccatcctcacgggcgtgctgcctttcagctggcactgtggctccccsctccattgctccatcaggctggcatttctgggtgttggaggatacggcaggcccagtggatctcacagtcatgcgcccattgtggcacgtcctctgctataaagcgggtccctttgtttaatgccatgttctcggtaccctgtcccrttcaatcaaatactctgtgagcctttgggcgttggggctgtggctgagcttctgtgggcaggaaaggcaacttttatttaggaccagattcagcacttccccttccaggatggaaggggtctgatgtgatcagcttgtcacccagtagctgagtggcctttagaggtggtactttagaggcttagtgttgaggccagagactggactccagttcaggagcggaaggagctatggtggctgtggtgagtgagaagccgtgtgctggggccacatgtagcttccatcccttcctccaygctgattcattcacccgttgtgcctgcagtggggtgatgatgccwgtgactagcctgtgtccagtggcaaggccattctgtcttctactggggtgtttagtgcctctcgcatggtgacactkcctggtacaaatgaacaaatgaaaggaagacctccatcctttatgcctactccctagatccagccacaggtacctcctccagacctcctggtccccaaccttctgatctttcccacccaggctcctgaccagccagccaagccacttgccaccacccatgattcagttcatactctcatctcgggctgccctgcctcccatcacaccgatgcttacatcacatgcactgcctgaagcccatggggaagattttccttcactgctctttttccaggccagtcctggatggggctttagtgaagtagatcccactttcagcttgcaccctcagggcatgccgacccatctctgaatcaagtttggccatttttctctgctctcccttcatcataagggcccccccacacacagccatagctgcgagctggaaaggggatgtgtgggtacaagagtcttggatgggggagtttgggtcccttgctgacacagctttgtcgtaccctctggccctgggtgtgcctagtcctggtgtaacacttccaccttacaatggattgctgctggcggagctggtagaactygtgttggaggcagctctggctgtgtgggtcrcctgatgtcccgtagcccaagtgttccatctctagtagggcctcgcagtgtgccagaagttttttgcaagtgatgtgtatttatttrctgcagatggccttgctccagaaccatagggtgctatgttatgctttccctacaggctttccagaaattccatctgacatctttccctaccacagatatctctattcctataggatctgccaggtcatacggcccatgtggcgggctgcttgcctcacagcctggacctgctgcagggccccttccactcaggatcccacccaaagcagcagcttttttttttttttttttttkttgttatttttgagatggagtcttaccctgttgcccaggctggagtgcagtggcacagtctcagctccctgcaacctccgcctccyaggttcaaacgattctcctgcctcagcctccagagtagctgggattacaggcgcccaccaccacacccagctaawttttgtayttttagtagagatggggtttcactatgttggscaggctggtctcaaactactgacctcatgatttgcccgcctcggcctcccaaagtgctgggattacaggcgtgagccaccgcacctggccagcagcagcttttaatgtcacccagcagatgagttgaacagatattcttggatgtggaatatgctggctccagaattactcttcgtggtggagggtatgagatgctgtcaatttctctttcctctcaaagagatgtctggtacgccctagcccgcggaaccctgacatttccactaatgtaaggggctgccgaatcttcacagggttgaatctctgctcctctggaagacaggtgctttaccaagacctctggcaccagygtctgctcctctgatctgataagtgtggcgccatcagtgcagaggacaaaggtcaagtgcttggagtggtccagatgcctttatagtgtattgtaattgggagcgggagcgtaagtgtagccctgggtcaagactgtaaacacatacggttgtccaccccaggggaatgaaatagtttctggtccaccttcttgacagggatagaaaagaacatattttccagatcagtggccacctaggatcaacctgaggccatgctgatctgctctaggagagagaccacagtgatcacatcctggcagtggaggccaccacttggtggagggtgcagcacccatccagactcggatggcagatccctggggtctgtcttgttattgtgggggctgaactatcgagttaaatgcgggatgtgatgggctggctacatctgcatcctttaggtcagcccctacctgctctatgcttctaagtgccatcctagtagcctggtagcatttctccccacgttcttaccaaggcgctaacttctttgtcatgagaggatgcacccagcagttcctgagggctggtcctgccgttccattggtgtatagccccttctcccaggactgccctgactgggcgagaatgtgacttaatctaagctattggtctggtggctgggagaggagggcaggccagctcctgtgggaggcccgcgtggccgtgaaggcagaggtctctgtgtcgtcttcaggcaggggtggcgctggctttaacagggacaaatgggacaggcccatttttgaggccctgaaggcttgggacgtttgagatgtgaagtttttcaagtgtattgacgcagatccccacaccccgagtctcaaggtccccctcttctggttggtctctgtcctgggcatagcaggcctagcagagttgggaagagcacgctctctgctccttggaggtgcctctgcctctcccgccttccagytgcaggacacgagggtgtctttctctgcggctgcgcagaccctcaccctcmcctttccatgccatccttccgttcttggggtcctttacttccacaaacctctgcaagtttttaacccctacccctgccccagccaactctcaaacacttgagctattgcaccaatagtgcatttcctttcgctggcattctctcccagttccctagtggtgaaccttttcacaaccgcttcactgtcttccgggggtctctgtgctccaggcatttctacgtgggccctcgttgcctctgccagcccgtgaccctctccgacatcctattttaaaatcctaggcctgcctgctcctgacaccagctggttttggttggaatctctggaaaaagcaactcctggagagaggggcagcaggggtctgtggagggagaagccgggctgccccagggtcttgacaggggcctcagcccatcccacagggagccctggagcggggatgagccttcactgttgtctcgaattgaggcagagcctgggtctttgtactcccacctggcctgggcagtggggctctgggttggagggtggtgggagagggacaccgtgattacttagaatttctggcacatggtgagaagaaaatgcaggccaggttttgttggcttcattacttaaattctctgcatacagcatgcagagacgagggcccacctgggcgtgcctggaagactgtgacgccttgttgcctgtacccagggtgggccactccccccaccacacatccccagcccccgccctgttcccaggctctttgacttggatgcccctggggcaggagcactgcgttgggctgggctagtcagtgtcattccctgagggggctcaactgccagtcacagcagggaacgcaccctgcagctctgtgggaaggggattggtggggaaggggctggacagagtaaggaggggctggggacccacttctctttccctaggtgtggaaccagaacggcaaaagcccctccatcaccttcgagtacacgctgctgcagccgccacacgagagccgcccccagcccatctactatggcttctccgagagcgctgagagccagggcctggacggggccgggctgatgggcttcrtcccgcacaacggctccctctacggccaggcctcctcagagcggctgggcctggacaaccggctgttcggccacccgggcctggacatggagctgggccccagccagggccaggagaccaacgaggtgtgcgagcaggccggcggcggggcctgcgaggggccccccaggggcaagggcttccgaggtaaccaggaggagggaggcatgagggtggggcccgggaggcagcccagggaagggggccttggggaaggggtctcagaccctttgcagacctgcagaggaggttcctaagagctgccagctacctgcagatgtcctctgggcaggcacagggttgaggacttgggataggtccttctgtccatgcattctttgaggtagatgtggttatccccatttgatggatggggagactgaggcttagaaagaggaagtggcttggccaagtcatgcagtccaccgtggaggagctgggagtcaaatgcaggatggtctgatctctcgctcaccccatcgctcactcaacgagcacctggtctcacctcagctcggacagcacagggagcaaaagcttcgggggccccaggcgccccttggctgtgaccgtgtcactccagcctctgcctttgtcctcataggcctcctcctctgtgccggtgtctctgtcggtccccttctgataaggatatttctcagtccacgataatttcatctcaagattcttaactaattatatctacaatgaccctatttccaaagaagatcacactctgaggttccggggggggccatgaattttggggggatgctattcaatccactacagaagtcgattgaattcccatcagcaagagatgatccaggcaggtctcatgcctccgttttgcccgaattacgtcctctagttaggcagaagccctccttctgggagcttcttggttcagcttggtgtttctggccccctcgtccaggtcccctccccagggcagcccttgcccccagggctcggatgtgcccacggttgagccacctgtctcctctccagaccgcaacgtcacggggactcctctcaccggggacaaggatgacgaagaggttgacacccacttcgcctcccaggagttcttctcggctaacgccatctctgaccagctgctgggcgcaggctctgacttgaaggacttcaccctcaatgagactgtgaacagcatctttgcacagggcgccccaaggagctccctggccgagagcttcttcgtggattatgaggagaacgagggggctggcccttacctgctcaacgggtcctacctggagctgagcagygacagggttgccaacagctcctccgaggccccattccccaacgttagcaccagcctgctcacctcggccgggaacaggactcayaaggccaggtaggaggcactttcctgagccctgtccagggccctcagggggcaggatggggcygaggccaggtagaaagtgaggccccactgggggggtctggccagaagggctgaggtcctagaggtagaggagagagggccccttcttcccggggttctccactcgctgccccgtggatctgagcacaaagtcagaggcctgggctgcagtgagttttccccaaaagttatgtccatggattaggatccagggctgagcccctatgtgtgcagctgatggggggaagggaggcaggaagctaacagctctgagcatgccttgtgagccagggacagagctcagcattttatatgcatggaaacatgtcatcgtcacaaccgcccttagtggtggggttgctatttgctattgtgggctcagagagagctagcggtgtattcgaggtcacagagcctgagaacctgggaccccttagttttaagcctggacagtcatggcacacacgcctgtaggaggaggcggagctccaggcagctccccaagtgcagagtggctcagtcccaagcctcagcaagggctggagaggatctagtggattcctccatgaggggcaagagcctgaaatcagggatraagaacaaggctggcattgcagctggcaagggccatgagagagtccacctggggccaggcctccagagccaaggccacagctgggtctacatgggcagccatgtctgggggcagccatgtctggggacacctgggcagtcacagccagggttgtctggacagtcacagctggggacgcctgggcagtcacagctagacctggggaagtctgaggttgggagcttccctgggtcaggggccagctgtgagcagggtgaccccagacctgtcgtgtccctactggagcacagtccgtggtgacaagccccgcctgcccccagatagagggtggccacccttgcaggtccccacagtttctcccagcaactcacatgtgcctgggggctactttaaacaggcagtgagtgggggttggaggcaggcacgggctcactggtgtttggttttgttttctgaggtccaacccaagccctttgactttagacgcaagcatgaactgaacccggcctgggctgggagtgctgagtgggtcttccttggggctcagggactgaatttgatgggagattcagggttcactctcgaggtgatgtggtttggggccaccctcccacccatccagccctgggaccagagcaacaaagccaacctccctggtgagccaggagccccaggggatgcctgccgcttttctcaaactgttttctgaggccaccgaggtgcctggggctgcggggtgcagggaggatgtcctgagcacttctggcaggctctgggcggaatcctactttgcagatgtggacagagtggggcctcggagcctcctctggctgcccctcttcccacaggggtggcacagggctgtctgctcaccctttaccttggcatgctcaaagccttgggtaggtggggcctgtggctggttctcaggactcgggcggggagggccgggccttgctttgggtatagtgtctgagtctgagagggggtcctgggtaaagggcaggagggacggacccagacagtgcctgcctgtgggaacggcactactcaaggctgccagtctgtctgtktcttcagcgtgggccctcttcacctcccagggcagtccggggcattccctggtattccgtgtgtgaggcccacggtaaggcctccagtaagtagaagctattagtagaaaactgagcctccaagtggcagcagtggggggtgcctttcaggacccactgcctgggtcagggaggccagctctccggcagtcacggccctccaaatagaataggtttatcagagtggcaccgaggcctcgctgtggaatttggcttaaggcatggacactgtgtgagttgagcatctctgtcttcctctgggcctcagtttccccatctctcaytggggggcttgtcaggggctgccctttgggcccaccaggtcaaatattcagtgatccttaggccagggtcatggcacaagcttacggatcctcaagccgctttgtaaagagtctctcctgccccatcttggttgactcttaccctcccctcttagcccccygccccaggatatattgaatttccagggcctgtcaggggcctcaagggtcgatcaactaggctgtcagcactcagaaaggccctgactgctgagatgccgctgctcccccggccggcctgccatcaaaggatgctgccgcacagggaccaaagatggtgtggagagataaagggcagagggaggcggcgggggaaaccaccaggccaaaatagccacgtctcggccgagttgtccaaacacaggaagtcgtgtctgctcagagaaggcaaaatcaaaggggcagcccagaaaggaaaggctattttcatctttccagaaaagcttcaaacaatcaagggaggggcccctgtcaccagactccgactttgggaacaagcttctgagacacagagacgcggagtccctctccgcagccttggggggagagaagaacagagcactttctggcttgtttataaacaaacacggtggcttcagagcttctcctgcctggggagcccgtgagcctgtgtctggccgggcatctgggcgaaggaccctgaggagtgacaggtggtctggtggtgactccacagccgtcaccagccccagtctagcagctctgactttcacagctgagaggggcagtgacttccttccagatggaggagagcgacggtttggtgcttcagcgatttccttggtgttccgcttccctgtgctacttccaagaacggaacctgctaggcgttgcattgttgtgcaaatatatgcagggttatgttcaagagttgcatctgctatgccccacacgtgctgctgcgaagagtgtgtgggcagcccctccagaaatacctttggtgcttaaaatccaaagggttattttgaaccgggcccgctctctcttgagtcaggcatgagtcatgctgcctgctggctcagagcrtgtaattagataaagatggcggagcgtctccatgggtggggtggaggggcatgggttggatcttttcatctctttttgttcttggggagaatttaaagctgttgaaagtaggtggggaactggtcagcacagtttagtgttttctgaatcgaacattaaggactggtcttccgggttctccgttccctgaaaggacttacttatcctgatctgggtgctctgagtggcccccattggggcagttttccaggtttccagggaacttttgttctgagatgacagggtcttgggaaaccccccacccacccccattttttttttttttttgagacggagtcactctgttgctcaggagtgcagtggtgtgatctcggctcactgcaagctctgcctcccaggttcatgccattctcttgcctcagcctcctgagtagctgggactacaggcgcccgccaccacacccggtgaatttttttttttttttgtatttttagtagagacggggtttcaccatgtcagccaggatggtctcgatctcctgacctcgtgatccacccgcctcggcctcccaaagtgctgggattacaggcaagagtcactgcgcctggcccccacccccatttttaaagcttcctctaagttctraaagagggaggagaaggcactcttcccttccccttgagccccaggatgggacagactctcctggcttgaagctcccaggtgaaggaggctttgaagaaacagtgggaccagcccccagcccgcagcccttcctgggccttggtccccatgccttctcccttcactcctcttctccctccctgagtttagggagccacaccagtgaactcactgctgaagctcctgtgggtagatcattcctggggcctcagatgtgtggtcaaggcagcgttcatccccacaaatactgcctggctgtgggatcctcccattccagtccaagcaaaacagaagagcaatgctcacccgcttgcctaacacattgtaaactccccattcaatccaaacccatgtctgtrtcacggagtcaatctgaaagcctttctgaatataatgctstaagcctgaccacccccaggtgactgaaggtcctgaagaaggacctgtgacctggcccacgtttcagcccagtgaagtatggcrgcttggggtcatctctagccagcccctctgggcccagaggaaagtggagttgggcartgccacctgctgcactgtccagtttaaaaaggaagtcgaggctcgaaggacctgctgtccaccgcgccggcttgccatcgccccttctctggctcaggggcggcgggactccatggtggcgtcccagagcagatgcccgggctgtggagctgctgccgcctctgcttccctcctcccctgccgagtccagaatgagcctgcacattggatgtggaggttgggcccaggcacacctactggttcaaagaagcaaacagtcctaacaatagttggctttggctgcataggctccagccaagaatcatagctggtggctggctgggacccagcgtgcctcccccgaccccagcaggtccgtgcagccatggcctgcctgaattgcactgtaggctcggcccctgccagcagccgagctttttaattttgataattggaggctggatgcctagtgtcccccattccatcagagtcccagctggaggagggggtgggagagaattctggaacattcttagcacataagacaccttctgaggtcccctccccggtgggaagaaggaacccactagctgatgtgagaaggtaatattgagaagcctgcgtgtgtgcagggagcaactacagtgctgggggccccaaattctcaggccacccctcccctccggaaggagctcgggcagctcccatgcagttgagatggaaaacaatgccaatcaatcctaaaatgtgcccctctgcgggcgcctcatccgttccacttcagacagtgggaactctgaccgtagcaggtggagggtcggcccggggctcaggacaggtgtgtgcttcaggcgaacataccctccgaagaaaactccctcgcctgaaaagccggagcctgccggtggggcctggagcgtctcatcaccttccctgcttggtctcgctttcaggaccaggcccaaggcgcgcaagcaaggcgtgagtcccgcggacatgtaccggtggaagctctcgtcccacgagccctgcagtgccacctgcaccacaggtactggtcacgggtgccaaggggcrkcaactgccctgaacccatttccatggacatgggctggggctgtggggcccacccactagcttgcagcccccaaactgccctcggggtgcttgtccgtggcctcctgacttgggggcagtgtggcgtgataggagtttgggtgtctggtgaggccaccytcattctcacagtgtgctagaccatrgtcaggtccaggcccctgggggtcatccgggctaccacccattggtggtagcccttgtctgttgccagtgataccatgttttgttagggcaaacatcctttgggttaaaagtaagaaatcttaggtagcagagattttactttygcttccagcaaacataggaagggagtcataggcccctgtgatctgtgacgaagggaagtaggcaaattctaggacctcatcagcaggggagaagttaggaggggaaaaaagaccctcctcggtggtgcctggacagacagakgtgtgtggttagtaagagttgagctgggatttgaacccacagctgtctggttgcacggccaccatcgccctgagacgctggccacagccgctagagctggagctgcctctgctgcccactctagtaccctcccctgggggatgccgcgaggtctgatgtcaaacccaggakcaggatacagggccgttgatgggagaaaatatggcagggagaccccagtgccggctgtgaggtcacattttatctattcttggggcttcatgtttggatgtagaggatacccagctggccctcaaaaggtttgatgctcctggtcccgccccagtgccacccatttgccagggcatttgatgcccttgcagtctctggccagtgaggattccacacagctgggcagtctgagcttggccgcaccctctgcagccctgctggcatctcaggagatgggcccgagagagggaggggctggggcggccctgcaggctctgctcacactggccttgcctctctgggactgaagaaagggctctgcctcctgttacaagagcccccaaacagggcatagccatggggcatgctgtgttcgcccctgcgcctggcatcctggagggaaaaagcaagtgctgtgggcggcgtggcgggcacccggctcggccaggctcgcaccgccgtgggcggcgtggcgggcacccggctcggccaggctcgcaccgccgtgggcggcgtggcgggcacccggctgggcccggctcgcaccgccgtgggcggcgtggcgggcaccckgctgggcccggytcgcaccgccgtgggcggcgtggcgggcacccggctgggcccggytcgcaccgccgtgggcggcgtggcgggcaccggcttggccaggctcgcaccgccgtgggcggcgtggtgggcacccgacttggccaggctcgcaccgccgtgggcggcgtggtgggcaccggcttggccaggctcgcaccgctgtgggcggcgtggtgggcaccggcttggcmaggctcgcaccgctgtggrcggcgtggtgggcacccggcttggccaggctcgcaccgctgtgggmggcgtggtgggcacccggcttggccaggctygcaccgctgtgggmggcgtggtgggcaccggcttggccaggctygcaccgctgtgggcggcgtggtgggcacctggcttggccaggctcgcaccgctgtgggcggcgtggtgggcaccggcttggccaggcttgcaccgcctggttgaccacaccatgggccctgggcaaattgccaaagccttccgagccactgttttccacaggtgaactgggacgcctgcttatctcaaaggtgggttgtggggatccacatgaaacaaggaatagcctctcatggtcagaggtcaatggatgctgccgttctgagggtggctgccaccacctgatgcagggtgcggcttccaccatacccaggagcagctggccttggaagtgagccatgtgacctgccttccgggcagacccctagcggagctgagcatggtgrtggggtgtcagcagggtgtctgctttgccaagtcctttgcggacctgccctgagttcctccactcttcctggccaggggactccaagcgtgtgggcgttgtcagtaagtgtcaagcctgtgggcgttgtcactaagtgtctgcaaacatctgtgattcctcccagacacatcgctggctggagaggggacgtcgctcgagacgtctgcagggtgaggcagcctcgctggcraggggcctgatgggcagccctgcgtggaagatgtccccagggaggacacagcactgtctcccaacacccagagaatggcagggagggggctggactgggtctgtgcagcgtggcccaaggtgcagtggggcaaaggacaacaggaaatcagaaagacaggttttggctttggaagaaggaaactctgctttacaggaggttgttcagaaatggaaatgagccaccctgagagacagagagagagagagagaaagggggagagagagagagagagagagagagggagagagagagagagggagagagggagagagggagagagagagggagagggagagagagagggagaggaagagagagagaaggagagagagagagggtgagagagagagagagaaagggagggcaggagggagggagagttccctgtcactgtgggaggtgctgaatggcactgggcagaaataacagagtcagggtccaccctttgcataggttgtgtccgtgcggatgtcccatggatggtcattggcccaccctccatcctgtgcctcgcaagaacccaggcacagggcagttctatcagtggggcagatcagcctgccctgagctttggccgcggtggggaarcttgtttttagatttttcttcgaagacactcttttggagccatagcaacagaggagcgtgagtttggcctcggctcaggtcataggtggaagtttctgctgcccttcggcgctccagggcaccgtggtgaggacagtggatcctgcggcccccaggcttcatcctcccctttcttttgtttcaaggaggggctccgtggctcagggggtttgaaaagcaccgttttygagatgggtgtcatgaagagggtgcccagaaaaaacgtcctggcatttgattctcacaggctctctggaaggttcccatttcgggaaggagcatgctgaggcctggagtctggtcacggtcacgtcaccccagggaggcactgagctgggacttggattccagtctctcttgaccaaggcctgccgcgtttccactccgtgacgaggagcgaatgaataaccaggcacttggcgatggtctgcaagtccccagccccgcacctccctgggccccagagcgggtgtctctgaggcttggaacattccragcagacctggccgggaagccagcctccccctcagagaaggctaaaggctgcacggcccagctctggcgggagaggaaccgtgattgcagcctggctcgtcctttacggaaaaaagaaaaaatccccttgtcggctgcttcccaggctgtttcgttccatccagcgctggggcttggagaggcaggagccgctggcctgcagacacacgccgccgggcggctgggttctctggatrtggggaaaccgatttccttctgggggaactggcagctgcagccaagaccgttccatgatgcccgtcatcccggaaggctgggtctgtctcccgtggccacacacacacacacacacacacacacacacacacagccacagcagaagcagcaaaccctaaccccaccccaaggccgttcccactgctgccggctctcccagaatcatcctgctcctgggcagggagctgggcctgtgtggcagttcggtaccaggcaagggtgcaggggcgaggacgaaagaagcagaaggtggagatgtggtcaaggaagtggcactgctaggtgagggctgcctgtcacccactgtcccccagtgggattacagagtacggggcaccaacaaagacaggcacacagtgatgattaaagaaagttcaggcctggcgcggtggctcacgcatgtaatcccagcactttgggaggccaaggcgggcggatcacctgaggtcagaagttcaagaccagcctggccaacatggtgaaacccaatttccataaaaatacaaaaattagccgggtgtggtggcacatgcctgtaatcccagctactcgggaggctgaggcaggagaattgcttgaacccaggagggggaggttgcagtgagctgagattgcaccattgcactacagcctgggccacggagtgaggctccatctcaaaaaaagaaagttcaagaggatgcttgctaaggactggggcatgccacagagggcagggcgcgcccgaacccccaccatgacctctgaggaggctgacggggctggagccgtcagatgtcactcccgcctgcctgtccacccagggatgggtggttgctgaacgcctggcgatgggggacacctgactgtgtttgcctctgcacctccacgggggccagctggagcagactcaaagcccggactccgtgacatgggaactgggagcccagctgggttgggtggggcggggtgggggtgcaaagagaagagctcagacccgcacagctcagacccacagtgctgccctcatgccacagttscacaagctgtgactgatccccaagccagaaagctgagctgagaggtcaggtgacttgccccaagtcctgaggcctgtctgctgggctccaaggtgccggcatggctcacagacccacccctgtccccaacccaggggtcatgtctgcgtacgccatgtgtgtccgctatgatggcgtcgaggtggatgacagctactgtgacgccctgacccgtcccgagcctgtccacgagttctgcgctgggagggagtgccagcccaggtacctgccaccaggggccctgggcagggggtcggcagggggcgwgaggggctctgcccaaaggagcagtcagacttaccccctgccccgtagaggttcttcgtgtgcagggcygtgggggctcttcgaggaggggcatacagacctcacccctcagagaccttctgggtcttcccaggagttgcaatttaatctgtcactgtgcctcgtagacagtaggtgctcaattaatgcttgccaccgcagatttagaaaccattctcaacattatattacagcggtatctttgccccaccaggcccacttggcacatctaggatttttataaactcaagggattattcccaagattccatgcctattggctgtcccttggatgtgggtggaggcctattttcttgacctttgggcctcgtctcctgccttgtggatgcagtcagtctgagctgagtgcatcctacacctagtgacaagtggggtccccagatgagcctgagggtgcyggcctcccccgacaaggatcacacactcctcggaggctgagccctcctgctccccgcacacggccacactgcctcttcttttctggactcctccatctggggcctcccacttcctgcacgtttgctcctttctgggaagggcagaatgcccaaggtccccagaatgctgctaaggctggcccgggggtggggtccagcaggccctgtccttcccctcagagcccatcagctttggacctcttattccaagtctatctgcctggaagacttccgggtctcrctcataacccctcccagctcaagctaaggggaaggagaggtctttccccagcacgctggccatgccccctttctggacacagatccagaaatgtgccttctgctcacttccacccttgccagaatcctgtgggcgcacagccacctgtgtgacacagcagggcacgaaggggcaggaaggccgagcccacgctcagggcacccgccaaccaccttgctaaggtgctccctgaagacctccggggccgtcatggcccagcctgcacccttgagcctcgacaccctcctgtctggcttagcttgttgtgtgcggttttggaccacataggggaggaagggaggagccgcgttgtctctgggggtgtgggttgcatggggtcccggctgccatgggggggatcattgaaggccatccgctcccggggcaggtgggagacgagcagctggagcgagtgttcgcgcacctgcggagagggctaccagttccgcgtcgtgcgctgctggaagatgctctcgcccggcttcgacagctccgtgtacagcgacctgtgcgaggcagccgaggccgtgcggcccgaggaacgcaagacctgccggaaccccgcctgcgggccccagtgggagatgtcggagtggtccgaggtgagtgcctgcgggagcaagccgggggtcgggaagagctggggagctgggcttgggagatggaggtggctacacctgtgtcacacccccyctgccccctccccctgccgccccagtgcactgccaagtgtggggagcgcagtgtggtgaccagggacatccgctgctcggaggatgagaagctgtgtgaccccaacaccaggcctgtaggggagaagaactgcacgggcccgccctgtgaccggcagtggaccgtctccgactggggaccggtgaggcctgcactgaggggtggctgggcgtgcggctggtgaggggacccagagctttgccttgatgtgcctcagtttccatttttttccgaggcaagggtgtgaggtcaagaatgtccaaccagccttctcccatgttattataggaatcaaaacttctctccaaacacgtggccagcatcaccttccctctatcacctgtttatctctctgtatctctctctgcctttgtctccctgtgtgtgtctgtgtctctgttcctctgttggtctgtctctgtctccccgtctctgtttgtctccgagtctctctgtctgtctccccatctctgtctctctgtgtctgtctttgtctctttccctgtctctgtctctctcatcgagaragatgctcagatgctagctggggtcgcctctgggtggtgggtgcacagatgatctttttaagtgtgcttttctctgtgtgcttttcatcaagcatgcattatttctgtaattagaatagaaaatgttatttaaaaagtggttaccatggcaaccgcttcgacactgcctgggagccactcctctcccttgggactgacatccagggcccctcctggtgtggctgcctctcactggatgtcccctgcctgtcctctcccctgcagtgcagtggaagctgcgggcaaggccgcaccatcaggcacgtgtactgcaagaccagcgacggacgggtrgtacctgagtcscagtgccagatggagaccaagcctctggccatccacccctgtggggacaaaaactgtcccgcccactggctggcccaggactgggagcgggtgagtgccccagagcccgcggaagggcctcctggtatctggagarcatttggccagagaggagagccagatggctgggaccacagatgggtgaaaaagaggaattcattgcaaattatgaagggacaattccctaaaaattaatttagaatacaaaaggcttaaaaggtaggaaaacaccttacaagtccccaaatctcaattttgcatggctcagtggtacgtgcagaattggcattgcccccagcctgggcccccaagtccctgggacgcagaaagctagggacaggggttgttttggctgcctgctcctggcccaggggcctttgcgacctctgatcgtgaccagtgtgtcttccgcacccacctgtcatcgtcaccaacttgccatttcagacgagttgctctccacaaattgctttcaaccagcagctcccggcaggtcactaaaccggataatctcgagccaaattgttttctgctaaattgattttggccaaatcatcactggccagattgtcattagccaatttgtttcaaaacagatggttatgtgctaaattgcttttgatcaaatccatctggggccaaatggttatcgaacaaagagtttccagccagtttgttatgcactggagcattctcacccaattgctattgaccagcccgttgtcaccagagtcgccgtgggccctgtgtgtagggtcctgctgggccctggcgctgacccgctccctctgcccyggcctcagtgcaacaccacctgcgggcgyggggtcaagaagcggctggtgctctgcatggagctggccaacgggaagccgcagacgcgcagtggccccgagtgcgggctcgccaagaagcctcccgaggagagcacgtgtttcgagaggccctgcttcaagtggtacaccagcccctggtcagaggtgagctcccagccggcccctctgaggttgcctgaggccagacctgaatgtcgatcccgcccctccygcctcaagcstccttaagtgcttcctgctcctccctccctgacagcctctgtgagggctttccttcccgggaaagcttctcaaytccaccacgtcagctggtgcgagagccagcacctccaggaagccttctctgatcttgtccctgggatccctacggcactcgtcctgggcctttttgggcccgggaactccggcctcgaattgtggcctctaagttgcatgtttggcagcccatgtgccggacaccgygggacagacagaccccaggtgggcggggggagcagattgggctgaggcagacacaggcttggccctctgggagccacagccaaggcagccgcttggaatttagggagacagtaatagacatgcacccccatgtcaggacaccggcggggccagagggaagggcagtacgtctcctgcacgggtctggcccctccgagattctttgactcttgggcccccagaatgccccagcgtcaggatgtgaggcaggactatgctgagatcgcggttctctttgtagaggggaggagagccctcccaccctgaggccctgaggcacgtgtggcaaccctsacccagttctttgcctgaagggtctcctctctcccaatagtgccatgaggagaggttcttttccccattcctcagaggttcagggagctctctggcccactcggggtcccacagttactgggggctgtagcagacattggaggccaggcctgtccatggcmctagagtgaaacccaggtggggtgtggcatctgcaagggaaggggggcctgaaccagctcatcccaaggggccctgggcagggagccccgaggtgggtgggcagccctggtttcacagagggggtggcaaactgggtgccccctcgcccccagttgtcttgcagagcaaacaggttgctttcacctctcctgctgttttccccttctgctgcacttcctgtggggcctccgggtgactccagagcctcgccatgtgccagtgggtgcccctctgccttctgggccccacggaggcagccctgtctagactccagcttgagtaactcacatcagctgtgacacatcagccatccgtgcccctttcacagcagcgccagccctggccccagacccagccgcctcacacctggcaatgccatgagcttctgagagggggacctgggggtgtccagagggtatctgggaatcactgggcaggtgcttccatagccaggctgtttacctggggtctccagctacctctgccctcagtttcctgatgggccaactctgaatacccaggcgacaaaatgggggtgtcagacggaactcagagcctggaacgttcatggtgaagtgcccaggtgtgtatcaggccctggcgcccgagggctccaagtcttggttgctgtggcgggtggatgcaagatcctaaaccttatgagttcaaggcagagagtccaagagtctgtgaggagcgagctggggaccccagtgcggccctgctcagagattggggtccaggccccgggcccttgccaggtcccaggctcytcgtgcacgcttggtggtgtctggcctccaccctgccccgccaccccccaccccccaccccgccccagggcctctgcctgccctgtagcacacatgcttgttcrggagggagaacacacactcactcattccctgttgcccaccaaaggacccccgagtgaggaggggaaaggctgagggtgggcctggggcttcccaggggaggcctgggcagagccagggcctgaagggtgagccggcttttgccgggagtcagctggagagaccacggcgtgccgggccctgaagcctccttctggaaaggctaagcccggtgggagggagagtgggaaggggcagggaggctgactggggttccagggccccagggagccagcccaggtctgtagtttgggaagakcactagcttcagatgggggggccactgtggggccaggaaacacggacccactaggtgcaggtaccttgctgggtgatgagccatggcacggggggagccatgaagcgatgaagcggggaccccagaaggacagcctggggtgctggggaggagcatccccctagccctgatgaggaggtggcagggccagacraggtgcagctggcacagacggctggtgggcgcgtggactccttcttcctggtggctgccccccgatgccggtgcatagcggcggctcagtcagtgtttgttgccccagctgcccagtcccatccactccccaggggcagaggagctggcaccagggctggccgggaatgtgctgctctccagaggcacgtccagaggctcctcagggccctgccaaaggctgattgtcctcacgccgtcagcgccaagccagcctctcctcgcctgcagacggtgccagcccccaccccctggctcggagcaggcaggcaggcagcagtctttctgccaagtcttaatcggtcttccttgctcctttgcaaacagaagtggagagtgggtcccagggccagggcctcccaccccacccatctcagaggacagagggctcaggtcccagacgtgcctggatgatgtggggtcacccacattggggggagtgtgagggagccaccgcctgtgggatcttggcaggaggacagcagggtgactggggccagcagatgtctctggtgttctggggagctcakcggggttttccaaggggaacatctggacggggagccactggagggggtggtgacttcgcgagatgcatttgatcggcccacaacaaacagtctgcaccacagacccaggaaagctggggccagaggaccctcagggagatgggagaggagggaccacccctcactgtgcatctggggagactgaggcagccctgcgtggggagagaatcagatcctcctgackgccagctagtgcctggaccccctgggaaatgagagaggagggaccacccctcactgtggatctggggagactgaggcagccctgggtgggagacaatcagagcctcccgaatgccagccagtgcccttttgtcggcatctcaactcagccttggagccgcaggtctagtttcaaatgggcttccacgggtcctgtgtcagttgggactcatrgccgcctgggaagggtggggtggggaagggggagtgtgcaggttccccgccccctgcccaggcccctgccccatcaggaggctttccccatgccttctgtctctcccacaccagtgcaccaagacctgcggggtrggcgtgaggatgcgagacgtcaagtgctaccaggggaccgacatcgtccgtggttgcgatccgttggtgaagcccgttggcagacaggcctgtgatctgcagccctgccccacggagcccccaggtgaggcgcggggaggccgagggtggctctgggaattcccaggggaggcgaggacagagtcagggcctgaggggtgagcagacattgctcaccttgatggcgagcctgggaaccagcttgagagaccaagctgtgcagggagtgggggctccctcccggcatggccgagccccactgggaggggagagagggaaggggaatgggggaggcctgactggggctccatggccccagggagccatgctgagacctgtactttgggaaaagggtcagcttcagatggcagggccactgtggggccaagacctgaatccaggatgactcagctggagyggccaggggctggcacacagggggcagggaggggagcagctgaagcagggcctgggcacctggaggagggacagggtgccaggtgcagggcacgtgatgagttatgctttggatacattgagtggtggacggggggcccctgtggaacccttggggatgcttaggcctctgggtgtgacatctgtagctcctttaggcatcactcctcttgggacacagatcaaatcacctggcatgatctgggacagcgacatcttggggacagagatgggccaggaaggagggggcagagagctagagatggagacccaccacggggtgggaggcccactgcccctggaaaacggcacgtgggggtccytggggttttcgccccttggccacctcctgaaactgccctgcttcgctctgtgttccttctccagatgacagctgccaggaccagccaggcaccaactgtgccctggccatcaaagtgaacctctgcgggcactggtactacagcaaggcgtgctgccgctcctgcaggcccccccactcctaggcccggcagctgcagccccttccagatgaagaccaagcgcccctcctggggctgctgcagcttctggggsctccacagacccccctcctgcrgggcacgctggcctaagagacgtggcactgagcctcggctgtcgagaggggacttcccacggcccrtggacctttgtgctcctggggcagagcctccggcacccagtggcctcccccagacagagccacccctgccgtgggaacctgtccgtgttcctgcgtggatcctgtgtttgtggctcccactccccagccccccagcagcccccagccgaggggcccagggcccacagccagcggtggaggtgtcttgctccgggcccgtagcccacgccctctctgggtggcagggccttctgaaggaaacttgcaggcgagcccaacgtggtggggggccttcctccctcagaggccatggggtgagaggggctcaggcagccaaggaggcccaggcgtgctccctcttatggagcccctcccatggagctctcttcccgccgcactttytaccccgggcagaggcgcttgcccacgggacgtttggggatggacctcggcccccgcccctgcagtcagcgtcagtgctcatctacgttaataaagtggtcctatttatggcggcatcatggggtctcagttgcctctggctggagaagtgggtggcctggggattggagggcccaggcctggctgtgtggggtccctccagctcactgaggcctcaggggcaggggtgggcygtgggggaccacagcacctgctctgaggagaaagacagacgcagataaaaggcaacgagaggcgtggggagtgtgcagggagggcgtctggggacactgggactcaggcgctggagtaggagtggacatctcgagcccatcagcaactggtacaggacctgtgggggcagggggcagggaccttggctaaggtgtasggcacccacctccaagtgcgtgggcaagaacagaggagatgaggcaggtgttgggggcgcggggctgggcccaccttgagcctcaggaaacagcaccgtcactgccgctcctggagctcatggagggcttcctgacccggacttgtgggtgcaggaacgcaggggcttctggggaggggctgcttggttgacccagcagcaggagtggcttttcccagacaagagggcagcaaagagcactcaggagaggaaaagtgacacagctggaggacgctgcatgggaggaaggacggggctgtaccgcccggagaggccccaggaggtgtctctgagcacgcaggcagtcgggaggtgagtggctgccgggctgcttcctcgatgtgaggccagcttgttctcagactgggagccacagcagcgtccatcacagctttaggggggcttctgaaggacttggggctctrgggaaactaaggcagcacccccccccccagtgtgttcttgcctctgagtgtgcctgcacgcgtgtgcactgasgsgctgcaatcaggatggtcctttcaatccctaaagtccaggaattaagaggcccctgggatggacttgctcaaggtcaccagcttgggccggacagaaccgagtcctgagaccccggggtctgaggcctctctgcccacctcaccctktgcccgccctcacctcgctgttcttctctcctcctgtgtcccccaacccacatcttyctgtcttactgtttcctcccggcttctcctttctgccaacatttattatacacttactgtatgccaggttctgtgcccagcacctcctcggtgctgcctggatttatcttccaaaggtccccaygatataggcatcgcgattaccccattgtgtggaggctaaaactgaggcccagagatgctctgtcacttgtcccaggggacccagcctgttttycccccccacaaccctctgtccaggggttcagagtccactctggtagttctcaatgctggaagatggatagccaccgggaaactcaaaatcaaacgtggcccactgctgtgcccccaagccagagaggagctctcggccccgccgggcagagccctggcctgactggctgcatccggaaggagaagctgactctgcctcctgcggggtgggaggaagcccctcccagaaggttgaagagcgtgggtgtggacggcctggacacccgggaggacggaagacgctgcacgagagtgtgggagatgttttattggctttcactttcctcagggagccagcggctcccccagcaggtccccacggtggagccgagtgagctgggagggatgggtgcttrcttcgtttcaaagagatctacatatctacagagaggatggagaccagaaaggaattgggaaatggaatcatgagggcygggycctcatccccaccccacccagcccaccccccaygccaacgcatcagaaacagacttcacaggatgcacagaggaagccagaggtgtgggcgggcccrgggggccggggctgcgagggacctcaagggcgaatgccactggcctgtccaaacsaggcaggagasaaagtaagaggaggaaaacaattgagaacataacgattgtgwcttcgtcagccgttcccccgacgcctctggaaactggcsatttcgtttttgagtaagggcaagaagtgtcctgctcaagccacccctccgctcagggaaggycactgcccggccaagccttgtctttgaggrcggtgccttccctgggcagagaggggctgccccggccctggggctccatggcagggcacaaaaggagaggcagagccccagagagggaagggggctcctggggccaggctgctgagaggaaataattgcctctttctgggtgaggaagagctgccttcctgatggctggtgtcctgggatgtggggcatttctctggggtagccattgacgtcatttccttagcagcaggagagcgggtgagaattcccaggagacctcagcctgggtgggcgcttggtggaaagtgggctcagatgaggtcttcagatggcagcagtaggctctggctgcttggggtccaccaggagctgggccaggcctcctrggtcctgctgagaagcaggtaggggaggtgacctgcarctctgtctcccttggggatctcagttcctgttgagacycacagcctgaagacctctgtcctcagggtctctcctcatcacacaagatggggagactgaggcccaggggtgggaagggccagccaagtctcayggggaactcgggggttttcaacccctgggccatggctctgcccaccctgacgagccccgggctgcctccgttcactgccgcttgctggccctgtttctggctgagcactgggtctatacatttccrcgttgcctctcccacggcagggggactgcgacatggcctctccctctccccgtgcctccctctgccaccaaaaagctggtcagggcrgagcatcccaagggccctgatgcccctgaaagtctcccttctagggggcagcyggtccatcttcagggagctcagcacgtgtctcagcctaggcagacrcttggcccttgaacccggaagagtgtgtgtgtgagagagagggagagacgggtaggggagagagagggaaaaatggagagaaagaggctggagttcaaggtggaggagcagaatccttggtytgcaattgccagggagggccttgctgcagggccctgggcctcactgaggtcatcccttccttgagcaggtgagaagggtgagacccagggagggggtgacacatggagacctcctgggaaggccaggttgttgggtctgagacagaatcatcaggagtaacggtggcctctgtgcctgagagccctggtgcatgcccagccggctgtatggtcacctggtccttctagcyccaggccccagctgtgcctccccccaggacacatttgtgttcaatgagccttatccctgccacgagcctgggggctccccaagcctgggcctcccctgaggrcagggattccaggagggctcagccaagccccacttggggcctggggccaggtgggtgtgccaaaggaatccccccattgtctcaggaccttcaaggccaggatcccgggggcgggcccaggtcacacgtcggtgytgatgctgcggctcctggcgaaggcctcccgcatggctgagaggcggttggggttgagmgcctgcaggcccccgaarscccccsggggcagctccacgtcctcctggctcacgctcttgtagagcacgcgctccccgccgttcagcacgtcctcttcctcctccggcggctcctgcaggaagaaggtggggggctcgcagtgggagcagctgcggcagagggcgcgggcctgcggggacttctggctgaaggaggtggaggcgrtggggtagagcgccggcccgttggtcagcaccaggttgcggttggagtgcagcgggggcaggtgcgagtgaacggcgaagtctggttcctcctcgtcctcctccgactcgtccttcttgcagcagtagtactgcgggcagagggacggtgaccatgcggccgcccgctcccaccccagaaccgacatgtgggaaaggctacccctgactggggaggggagataggcacggtgggagtggggtggcccaagcccaggcctgacacctcagctgtttaaccagtgctatgggtctcactcaggccaggcgcagtgctgagcrcttcamaacgatccactcatctcttccgcccagcaacgtgcaggtgtgactgttatctccattttgcaggtggggagactgaggcgtggaggggttcgcagccccacatcagcagagccgggggtcacaggcactggcagctgtgttgcctcgccctgccccgatggctccccctcatctctcagggagacatggaractctggatggccctggagtgcaggtgggaaggattgctcactgtgacactcctttygggcagctggtgcccttggctaagtcccttcccgtctctgagcctctttataagctctgggtgaggggagtcaggcgcatcttactgagccccatggtagggtcctgctgccttctgctgtgtgtcttctctgccacagggctcttccccacttcccgggccgtgacccttgtgaccttcaggcggggctccctcccgaggtaggggcaccctctgggcctccctgccctgtccccttccscgccgcccgggaatacctggagccggcagtagcacagaacagcgatgatgcagagcaaaatcacagtcgccaagatgcccccggtgatgaccacggtcccggctgtcatccgcccccttctccatcaacagcctgcaacacacgccrccagctttagagcatcacgcttcctcaccacaaaagtcactcgtgctattctagagaactgagaagacaagctgaggggaaaaaagcaccccakgatgtgcctgtgagaggcaggggctctgccggggacggggtgcagcaggagcccaggtcctgctctgcctcagctggcctctgtccctgcccctctcccagcctcagcttccacatccgtagaaggtggatgctaatagcacagggttttgtgacacttttacaagcgtgtctctccatgcttagtgtagcatgctgtcaatgaatggcrcccttccagcctggctctacaagcttgcacgtttttaaatttacccaaatgcagtcaggccgaacatatggttttgtaacctgcttccctgcattttcatctcacacagtcaccattattctgccatatccttaaattttcttctgcaacatagtctctaacccgattccattgtttcatgtaactgactccttttctttaaaatgcttrattgtggtaaagcacacataaaatgtaccatcttcaccatttgtacgtgtgcggcttagtagcatgaattatatttcacactgttgggcaactaatctccagaatttttcatcttgcaaaactgaaaaccaattcctgcctgacgtttgggcttcttacattaaagaaatatttttagcaatgttttaataagcgtctttgtagctaagtaatgggaaccacctgaacctgcttcagtggctttcaggatacattcttagaagtgggatttccaggcctagggacatgccctttgcaaactccttcttgtggaaaatgtccatcaaacacaacgcagggaggctggagtgatgctgtcagtggctgctgcattcagctcatccctgtcctgggctgtgctgataaaccagctctcaaagcaccyggctgggagcatttgctgatttttgtggtgtagattttcttaccatggccagtttcagttcaagcaaggtttgacaagcggcttacaaaattcctaaattcttcacaatcacctctcacaragcagtgggagctggcgccacttcccttcctcaatttcccaagcctcatttttatttttttttcttgctggggtatggggtggaggaagagattggagtattttaaaggaaatcacagagcatatcactttacccataaatactccagtgcagcatctgacggaggaggattttaaaaaaattacccagcct

SEQ ID NO: 10002 - DNA, 20629 bp, Homo sapiens
aaggagccagtcacctggaaaggagaggacagcgggggtgccaggggtctcccaggccaagggacaacccctgaggccagcaggtgcatccccagagcggtccccgtcctgaggcagaggccacacggacaggcctagggtgagggtcaggttggtcccaaggagtgaggactcactcagaggagcccctgctgggccagacctgctttgggggccatccttcgggacagtggttctcccagtgtgctcccccagtgtgctccccgcgcccgctgcatcagcatcccctgggcacttgggagaaaggcatgttctccgcccccctgagtccgaagctgcagggtagcgcccgcagccaggtttcagtgcattcgggggatgctggtgtaagcccaatgtgagggacgggtgctatgggggcaccagggaggactggaccagggagggctcacaytggctgtggagaaggccrggcagggtcccctgcagggacacaagccaggaggaggggcaggatgagcttgtgtgtgcacggccccaacaggaaaatgtgggtgtcatctcmgccacagttaccacccccacaggacacccaggtggccagtgccctgaggctgggcctgggtgtctcccccatccggaacagcacctggttcctggcctaagtaaatacaaagcctgctgtgatggacccaggatggagagggctgggagacaggggcccagtgccagggcatagcaggtgcctgccactgcggaagaggctgccctggccccaggaggccagctgcttggcagagggtggtcatggcagtgcaaggtagacccagaagggaggcagctgctcatgagtggggtggtccgggcttgggccttggaagacagaccaggatgccccrgtagctgggccctgccctatccagagcctgcctgcctgctgagggacccaaggagagaggctttctgccaacgcagggggcagggccaggagcttcagagctggtacctctctcaggatccccrgaagcttccttcacaaagggcaatggtagtatccagggttctttctcaacctggccccatgtgtcccatgtcctgaccgagaatgctgttctgtcggccccttgacacccagcggcccctcaggcagaggagaccttggtaagggctggaattcctggctgggggcagagtttccgggccaygctgctggctggggtctggggtgccttccatgtgtctactggctctcggggctctcctgggactccagscgtgtccccactgagcagagagtccacctgctcctgtccgtaaggctgagtcagcraggsctttactgagcatccaggagttttctcgaacattatctcaaggtgctgggccattttggtgggtaaaggcctggaagtgcatcaagcctgtgcttcctccctctttgtgcctccgtttcctcatctttgcatgaggatgctcaaagtgcctgcgccggctgtgcctatagggttcactgaagcaccggggagcccccagcccagcacgggactaagttatttgtttactaaacgagagctctggtcgttccagcaagtcctggcctggccctccctcccgtccgccttccaggccctgaactgggaccaggagctgggctcagttcgaggaagagaacgaaaagaaaagaaaaaaggaaggaaggagagagagaaggaaggaaggagagagaaggaaggaaggagagagggaaggaaaggaaaggaaagaaggaaaggaaaggaaagaaggggaggttaaggggaaggggaaggggaaggggaagggaagggaacttaagtccagcagcagagagggttttacgaacccaacttctgcacattggtatttttaagggagacaaaaagccagccccgtcggcagctgagctgggacttgcccggggttttcaggccctaccctcccaccccccatttcctgacccacggctgggagatcgggaaactgcagcccagaatgttcttggtgcakctcatctgccttttcctggcggcctgaagccctggcctggcctacagctctgtgctgctgttcccgccccctgggaaacactggggatcagctaggtgagggtgggggtcacgagggcaagaccccagctcactcagggcctgcggtgcaagtgtgggccgcggcccccactgcattgaaatcagcaccaatgccgccctactgtgtgtgtgcgstgtgtcgccccctggtggccggaggactgcagtgggaaaccaggtycttgccttcatggggcttaggtctgatgcagggaaggcggtgagtttaccccrtccctacaggcaagctgagggtgggggatggaaggaaaaggagatacatcagatttgatgtggcacaccatgttcacccctggagccctcacccctcaccatgtgaccttgtgcttttctctccccatgctagrctccttggctctcttgtttccttgtctgtaaaatgggcataataataatctttgccttggctgtcccggcaattgaaggagacattggtgaagggtgccatgccctcctggcacagagatagtggtgcttggcacaggatcctgtgcttattattattaagaggtatagggagccatgcagggtgtttgagtgaggcaggaacctgttcagacttacggttcaggaaccccagtggggcaacacaggatggcacaggcaggagccccagctcacgggatttcccagggggtattttccgggggtattgctgagcattctacttgttgaaaagcaggtttctctgctgtattgaaatcatcaatgtcaacagttgtagggcctgacagagagacggggcctgaaccacaagcttcttcagggatgtgcataaatatttcagaccacgaggtggtcagaacaggagagcaggggtttctgggagaggctgctgagctcagcatccasaaacccagtccttttcccttctcccatctcctctaccaacaacttggcgcccacgaccattcagggtgactggcctgtgtctcactctgcagcagatgtgcccggtgaccctgggcaaggtcccctctctggggagcacagccacccaactgcacaatgagtgggtcagcagcatgctagatccctcagcatgctagatctctcaatatgctagatccctcagcatgctagatccttcaacctgctagatccctcagcatgctagatccttcarcatgctagatccctcaacacactagatccttcagcatcctagatccttcagcatcctagatccctcaacatgctagatccctcagcatgctaatccctcaacatgctagatccttctgtaccattgagcccacccccaccccagagttgggatccaacctccttgggccatgcagcccaggtgtgccctcttctgggcaagcaggacctggagccaaaggtggcaactycaggcctgacagcagcggccacaactcaagctttatttttgcaagttcttccccaaatctttctgttcaaggtccttaagtagcgtggtagccttcctgacagaagggccccacaggccaggcctcccaccagcatgatctatctgagccccccatgrcactgcctgctgctctgccccagacagggccagtggttcccccatctcccacgatcyccgactcggtctcagcagaaaggggctgggactggtcagtgatttttgaacagggtctgcgattccytagtgccaaagcagggaatgctactggcttccccactgcccagcctcacagctcagggtgcggggacttctcacctttgcctctgtggctgctcctggcttcctgggcagatagcagcagtgaggtcctggtgagcactgggctcccaccctcccctcccctcccctcccaggctcgccccccgttckcccccycgttcgcccatcacctttttctcttttctctgtcccttccctatctgctccaggggctcccagggagatcccaggaaagagcttcagggaccccagcctgagaaagtggggtcagttagactgggcagaaggtgaggtttgaggcaggcctgactcttggggtgatggtctgagtgccccgcctccctcagaccacccaaagctccagcctgagagtcccagccacacccgtcggggacgcaagccactcatctccaggaggcccagggagcaaccaggcagccctcagccggggtcccctctcctcccacaccctgcctggtgggggctatctcagctccgcctgacccagcctctgactgcactgaaggctagaccctgcccactgggtcagaggaagcagtgacccctgaggaccagggagcccccaggaggctttggcacagccccatgatggaggccaggaggcctgatcctgacactccctgtcctgccctacggttcctgaggttrgcagacagtgacttcctggtggggaccaggccagggggggacaatcacctagtcctttcagcttcgtgcttcctgcttatggctccagggcttcccagccatccacagccttggcgttggctccagctcctctcctcctggtccacaacacccctcgactccccttcccagctctgcaccatgccagtagtgggccaggcagggctccagccctgggtcgccctggtcgccggtcagctgaaactggtcttgagagtggcctctgtggcttggactccagacagggatgggctttgagtttcagcaagactccttgaggagcaaggataggcatctgtccggtcggcttttccattgctcagtggatcatctcactcttctggcctcagtttactccctagaaaatatgggtcagtcatctccttgcagagatgtgtcagaccccctgcttccccgatggcctagggagtgggctctggacagtggccgaaccactcttacctcagttcacgccaccacctgggaaagccgcctacgctggggggtcccagggtgagacgagatgaatgcacagagtcccgcaaagcctggctgaggccatgctggttcttacaacccctgacatggttgggtggcagtcctgagaaaggcagggacccactgctccccatcacaccccacccctgccttactccyacccaactgcccagcagctycggctggcccaacgtggaaacagcttccattctttaagagcacagagacccctgggcaccacaatctgcacttttgtgccaaacacacactgtgtgccctgcttctgctgggcagtgaaccacagaccctaagagcccctccatggtactgaccccagggggctctccagctggggtctggggggakcttctagaaatctgtgaaaccccagaagtggccagcaaaatgccatggtccctgtgctctttctgggggcccctcaaggaatccaggcaaccacgggggcaaaccctgggcacgaacgagttttccagacaccagctccccactctgtgccaagcccggcagcaccagtccccctgctgtgggcattttctgcctcctagacagaccgcaagcccctcagaacccgtggtgggcaggggcctgattcactgccccctcttccccccgcagctgagctggggatagagctgggaaggcagacattccaggtgctgttgggaactgccctccaggccccgcagactcccttctgccagcccacccccagccgggctmtggataacatctcggagaccaaccgcggcagcacagggcagccgagcacttcctcgtctgtttattactgaasgcaggcatctgggagcccgcggagcatgaaattaggaacaaatgtgcaggaggtctagacaggaactctgcgggctgctctcctccgatcgaggacgccggggcccttgggcttccaggtaatgggagcgcctttgtaaccagacagatgtgtttgtggagaaaaggcgctctgagtctccataagccctcgacgagacgccggcatggggaggagtctgaccgtgaggcaacaagcctgggttccaggtccagctctgccctgggcccccagggttggccctctctgccctggccttggtttccccatctggaagtggagggcgcccgcctcacctggttagaggggccgcttgtgaagccatcagattgcagggcccgtgcagctgcactgccrtcgggacgtctgtgtgtttaccaggctccccgtcctggggcccggttggtttggaaggcgcggggctggatgagccagagggcacggccagtgccgaggatgtaggccttggcttctccctggctcctaccacgagcgctgggcatctcaggtgaacgaggcagacagaagccttcattaagcgtcgcctggrccctgtaccatgcaaggcagtggcgggggctggggctggggcacaaaataaataagctctggaggggtccgttcccgtgggctttacggcaagtgagggggatgtggcaagagggacagaaaactagcagagtctgaaattcagcacgggacgtgtggcccagatggtggttagcagggggtctcctgccagggaaaggtgggtgtggggagggggctccygggggaggcaggtggaggcccgtgtctggctctgctgccaggtgtttcctgccccacccccagctccacgccattcattcctcggtgccggtgccgcaggagacaactgaagcttgtaaacgcagctggctctccctgccggctacagagacgagatggggccctcagaaggggactgttgcccgcccaggcccccttgccacagactctgtggactggggtgggggacgcacaggggagccccatctcacaacctgtccctstaaaaacccggggtgggaacagggaagcaaagccatttataaagctttaaaaccatttatggtcccagggggcagataaacaattcagcgctattctcgccaaattgccttggctggcagtgcggaggcttcagggagctggaagaggggtggggctcgagtcacaagcaggyggcagagtagcctctgccaggctgttgctgggcctgacccgcatggctctgcctccgaggcttggcctgtgctgttcccagcaccaacaggccctctccttcttctcccagcccatccttcacagcccggctcagaagcttcctcctccaggaagtttccctcggttcctcccccatccgttaccaccctgagcagccaagtcctcccctgttctctcaggcactcagctttctcagagcacaagtatccttgggagccaaagtgtctgtagcccttcccgttctctgcctacccttggagggtgtcatctggctttttcgccttatcacttgatgtttgtttacattttcataatcctgactttgttgggtgtctaaatcatctggwttcctggcaggaccaattaaaaatccaagtcccccagagttgggaggaatcagcgtctaaaccctgccacacccattgtacagataagaaaactgaacccagggagaggcctctgacccaaggtcacccgcaagagtagagcaggacagaggccccgcagactcgtatcacctgggccacagctgagtagmgtcctggggtccccagggaggaggctgaaggtaagcactcagggagggcagcaggtggtccatattcttcccccattaaatgaaggggtgggacctggtccctctcagctctggcgtttgaagttttgaagttctgtggtgtgtattaaagttcaggaaggcttcctgggagaggagggcacgtgctgggctttgatggcgtggtaggtccgggggggggatgggcatcccagagggtggggcacagctagagcagaggggaggcaggagggtggaggcccagggaggccgtgtttttgggagctgctcggagtgaactgtggtctgatgtcaggctgggcgctggtggagctgccagcggagtgtgtgtctgtcggccatgcctggccctgggacctggcgccgtctcgggcrttgctgctcctcggcaggcgtgtatctgcagagcgaggctgagaggctccagctggaccagcctgggtgttggagggtggctgctgacagccctgggcacctggcctgagccggcacccttcccgtcacgccgccaggctgctctccgctggaggagacctgggcccagaggagctgcagccaggcggagccagggaccggctgcatctcagacctgagagagagctttgcggcgagcggggccagctccctcagggacccgatgaaggactcagacccagggagggacacggtcctaacatcagcacagcactgagcatggtgcagctgctgtcccacagaacccctggggttctcccattttatagaggagggaactgaggcagaggaatggaggcactgaaggcccattcttgcagctaaccagaggcaaagccaggctggcacttgggggtttagcctgggtgtcctgtatggctccccagtacctgtccctgagggagcacctcagcccagccatggccacctacagtctccatcctccctgcagtctcagcctgacagcagtgggagcccctccacccaggcccatgcttccctatgggaaagcagtggcccccattgctatcagtaagccctagcagtgggccctcagccatggcccgtagtggagggtggtgctgaattttaatccctgcatgaccacagacaacactcgggcacgagcctccacctccctcaacccctcccaagctgtgtgagtgccctcattgatgaagtggggccataattacctgggtgcaaatagcaaaaatgccctccaggtgacatacacacagtaggtgacatacacacagcaggagtcactctgcaggtgtcggggagggatcggcacctgagtcaggaccacaacagcaatctctccggcagctgtggccttcctcgctccctccggggaccagcgccttctgactctccaacatgtggctgaaaaccccacccgtggctacagcctggccacagcctgagcactcatgtctctacccaaggtcaagcgaccagcagggaccggccagtgtctcaggccttaattccatttcccaggasagaggccggctggcccagcctggggtgcacgtccatcccaaacccaataaactgtggccgaaaggacagcagcagagggctcagaagtggccaccagcctcttggctcagggcacaaagaagagggccatggctgggccagcacccccaaacctgctatcagcacagtgtgtgcttccccaaaggagctgtggcattcaaggcattcacgtggaggagacatggggttcagcagtcggggtagggtggcaggggccccaaggtggatggtagcagcggatmcagccctgacctgacccagatccctcatcttactggtgctggggcctgggcgggtcatttctctccaggcctcggtttgctccctagtgggatcatttgaacatcaaaaagaatcatgactgcagtggactgaaacgcatcaaatatattttcaaaaatcagtgagattgcactgggcaagtttccacgtagaaaggcaagctggggcagacaacaggctgggaccagtaggcacgcggggcctgcaaagggggcagggtcacttttggttcactgagaggtgtggatctgggctggcctgttctccrtcctctcggcayacacacagccacaaacctcagggcaccagctcattctgatccctgataaagggaggaatggaacctctgagccttccctctgcaggccgcatgctagggtaaccacacagatgataaaggcatgtgctttagagctttttcaagaagaactggagctcataaacgtggaaagaaggataacatttggaaagtcactactttgtaactcctagtgaagtaacagatccaggtcacgcacaggatgctgcagcaatgggctgggagaccccccggaatctggcaatggaagaactggccgagrgcagctgcagtcattagctgattgtgacgtcaagatgagggggacagcagacaycaggcccctgggagtgatgcaacaggaagccagtttagaggagaaacactgataaaggagcatgttcaatgccatgcgaggaatcccggccagctccagtgcctggaaaattctgtcagataaacaacccagtttctccaataaacaacatgggggtgcggggcgtgaatgggttttgagctgttctagagcaaaaggagccaaaagcaagtacatcctgatttgaactaaccaaccgtaaaaaaggcatttcagagacgacaggagaaagctaaacgtaggctgggtaatttttttaaaatcctcctccgtcagatgctgcactggagtatttatgggtaaagtgatatgctctgtgatttcctttaaaatactccaatctcttcctccaccccataccccagcaagaaaaaaaaataaaaatgaggcttgggaaattgaggaagggaagtggcgccagctcccactgctytgtgagaggtgattgtgaagaatttaggaattttgtaagccgcttgtcaaaccttgcttgaactgaaactggccatggtaagaaaatctacaccacaaaaatcagcaaatgctcccagccrggtgctttgagagctggtttatcagcacagcccaggacagggatgagctgaatgcagcagccactgacagcatcactccagcctccctgcgttgtgtttgatggacattttccacaagaaggagtttgcaaagggcatgtccctaggcctggaaatcccacttctaagaatgtatcctgaaagccactgaagcaggttcaggtggttcccattacttagctacaaagacgcttattaaaacattgctaaaaatatttctttaatgtaagaagcccaaacgtcaggcaggaattggttttcagttttgcaagatgaaaaattctggagattagttgcccaacagtgtgaaatataattcatgctactaagccgcacacgtacaaatggtgaagatggtacattttatgtgtgctttaccacaatyaagcattttaaagaaaaggagtcagttacatgaaacaatggaatcgggttagagactatgttgcagaagaaaatttaaggatatggcagaataatggtgactgtgtgagatgaaaatgcagggaagcaggttacaaaaccatatgttcggcctgactgcatttgggtaaatttaaaaacgtgcaagcttgtagagccaggctggaagggygccattcattgacagcatgctacactaagcatggagagacacgcttgtaaaagtgtcacaaaaccctgtgctattagcatccaccttctacggatgtggaagctgaggctgggagaggggcagggacagaggccagctgaggcagagcaggacctgggctcctgctgcaccccgtccccggcagagcccctgcctctcacaggcacatcmtggggtgcttttttcccctcagcttgtcttctcagttctctagaatagcacgagtgacttttgtggtgaggaagcgtgatgctctaaagctggyggcgtgtgttgcaggctgttgatggagaagggggcggatgacagccgggaccgtggtcatcaccgggggcatcttggcgactgtgattttgctctgcatcatcgctgttctgtgctactgccggctccaggtattcccgggcggcgsggaaggggacagggcagggaggcccagagggtgcccctacctcgggagggagccccgcctgaaggtcacaagggtcacggcccgggaagtggggaagagccctgtggcagagaagacacacagcagaaggcagcaggaccctaccatggggctcagtaagatgcgcctgactcccctcacccagagcttataaagaggctcagagacgggaagggacttagccaagggcaccagctgcccraaaggagtgtcacagtgagcaatccttcccacctgcactccagggccatccagagtytccatgtctccctgagagatgagggggagccatcggggcagggcgaggcaacacagctgccagtgcctgtgacccccggctctgctgatgtggggctgcgaacccctccacgcctcagtctccccacctgcaaaatggagataacagtcacacctgcacgttgctgggcggaagagatgagtggatcgttktgaagygctcagcactgcgcctggcctgagtgagacccatagcactggttaaacagctgaggtgtcaggcctgggcttgggccaccccactcccaccgtgcctatctcccctccccagtcaggggtagcctttcccacatgtcggttctggggtgggagcgggcggccgcatggtcaccgtccctctgcccgcagtactactgctgcaagaaggacgagtcggaggaggacgaggaggaaccagacttcgccgttcactcgcacctgcccccgctgcactccaaccgcaacctggtgctgaccaacgggccggcgctctaccccaycgcctccacctccttcagccagaagtccccgcaggcccgcgccctctgccgcagctgctcccactgcgagccccccaccttcttcctgcaggagccgccggaggaggaagaggacgtgctgaacggcggggagcgcgtgctctacaagagcgtgagccaggaggacgtggagctgccccsgggggsyttcgggggcctgcaggckctcaaccccaaccgcctctcagccatgcgggaggccttcgccaggagccgcagcatcarcaccgacgtgtgacctgggcccgcccccgggatcctggccttgaaggtcctgagacaatggggggattcctttggcacacccacctggccccaggccccaagtggggcttggctgagccctcctggaatccctgycctcaggggaggcccaggcttggggagcccccaggctcgtggcagggataaggctcattgaacacaaatgtgtcctggggggaggcacagctggggcctggrgctagaaggaccaggtgaccatacagccggctgggcatgcaccagggctctcaggcacagaggccaccgttactcctgatgattctgtctcagacccaacaacctggccttcccaggaggtctccatgtgtcaccccctccctgggtctcacccttctcacctgctcaaggaagggatgacctcagtgaggcccagggccctgcagcaaggccctccctggcaattgcaraccaaggattctgctcctccaccttgaactccagcctctttctctccatttttccctctctctcccctacccgtctctccctctctctcacacacacactcttccgggttcaagggccaagygtctgcctaggctgagacacgtgctgagctccctgaagatggaccrgctgccccctagaagggagactttcaggggcatcagggcccttgggatgctcygccctgaccagctttttggtggcagagggaggcacggggagagggagaggccatgtcgcagtccccctgccgtgggagaggcaacgyggaaatgtatagacccagtgctcagccagaaacagggccagcaagcggcagtgaacggaggcagcccggggctcgtcagggtgggcagagccatggcccaggggttgaaaacccccgagttccccrtgagacttggctggcccttcccacccctgggcctcagtctccccatcttgtgtgatgaggagagaccctgaggacagaggtcttcaggctgtgrgtctcaacaggaactgagatccccaagggagacagagytgcaggtcacctcccctacctgcttctcagcaggaccyaggaggcctggcccagctcctggtggaccccaagcagccagagcctactgctgccatctgaagacctcatctgagcccactttccaccaagcgcccacccaggctgaggtctcctgggaattctcacccgctctcctgctgctaaggaaatgacgtcaatggctaccccagagaaatgccccacatcccaggacaccagccatcaggaaggcagctcttcctcacccagaaagaggcaattatttcctctcagcagcctggccccaggagcccccttccctctctggggctctgcctctccttttgtgccctgccatggagccccagggccggggcagcccctctctgcccagggaaggcaccgycctcaaagacaaggcttggccgggcagtgrccttccctgagcggaggggtggcttgagcaggacacttcttgcccttactcaaaaacgaaatsgccagtttccagaggcgtcgggggaacggctgacgaagwcacaatcgttatgttctcaattgttttcctcctcttactttstctcctgcctsgtttggacaggccagtggcattcgcccttgaggtccctcgcagccccggcccccygggcccgcccacacctctggcttcctctgtgcatcctgtgaagtctgtttctgatgcgttggcrtggggggtgggctgggtggggtggggatgaggrcccrgccctcatgattccatttcccaattcctttctggtctccatcctctctgtagatatgtagatctctttgaaacgaagyaagcacccatccctcccagctcactcggctccaccgtggggacctgctgggggagccgctggctccctgaggaaagtgaaagccaataaaacatctcccacactctcgtgcagcgtcttccgtcctcccgggtgtccaggccgtccacacccacgctcttcaaccttctgggaggggcttcctcccaccccgcaggaggcagagtcagcttctccttccggatgcagccagtcaggccagggctctgcccggcggggccgagagctcctctctggcttgggggcacagcagtgggccacgtttgattttgagtttcccggtggctatccatcttccagcattgagaactaccagagtggactctgaacccctggacagagggttgtgggggggraaaacaggctgggtcccctgggacaagtgacagagcatctctgggcctcagttttagcctccacacaatggggtaatcgcgatgcctatatcrtggggacctttggaagataaatccaggcagcaccgaggaggtgctgggcacagaacctggcatacagtaagtgtataataaatgttggcagaaaggagaagccgggaggaaacagtaagacagraagatgtgggttgggggacacaggaggagagaagaacagcgaggtgagggcgggcamagggtgaggtgggcagagaggcctcagaccccggggtctcaggactcggttctgtccggcccaagctggtgaccttgagcaagtccatcccaggggcctcttaattcctggactttagggattgaaaggaccatcctgattgcagcscstcagtgcacacgcgtgcaggcacactcagaggcaagaacacactgggggggggggtgctgccttagtttcccyagagccccaagtccttcagaagcccccctaaagctgtgatggacgctgctgtggctcccagtctgagaacaagctggcctcacatcgaggaagcagcccggcagccactcacctcccgactgcctgcgtgctcagagacacctcctggggcctctccgggcggtacagccccgtccttcctcccatgcagcgtcctccagctgtgtcacttttcctctcctgagtgctctttgctgccctcttgtctgggaaaagccactcctgctgctgggtcaaccaagcagcccctccccagaagcccctgcgttcctgcacccacaagtccgggtcaggaagccctccatgagctccaggagcggcagtgacggtgctgtttcctgaggctcaaggtgggcccagccccgcgcccccaacacctgcctcatctcctctgttcttgcccacgcacttggaggtgggtgccstacaccttagccaaggtccctgccccctgcccccacaggtcctgtaccagttgctgatgggctcgagatgtccactcctactccagcgcctgagtcccagtgtccccagacgccctccctgcacactccccacgcctctcgttgccttttatctgcgtctgtctttctcctcagagcaggtgctgtggtcccccacrgcccacccctgcccctgaggcctcagtgagctggagggaccccacacagccaggcctgggccctccaatccccaggccacccacttctccagccagaggcaactgagaccccatgatgccgccataaataggaccactttattaacgtagatgagcactgacgctgactgcaggggcgggggccgaggtccatccccaaacgtcccgtgggcaagcgcctctgcccggggtaraaagtgcggcgggaagagagctccatgggaggggctccataagagggagcacgcctgggcctccttggctgcctgagcccctctcaccccatggcctctgagggaggaaggccccccaccacgttgggctcgcctgcaagtttccttcagaaggccctgccacccagagagggcgtgggctacgggcccggagcaagacacctccaccgctggctgtgggccctgggcccctcggctgggggctgctggggggctggggagtgggagccacaaacacaggatccacgcaggaacacggacaggttcccacggcaggggtggctctgtctgggggaggccactgggtgccggaggctctgccccaggagcacaaaggtccaygggccgtgggaagtcccctctcgacagccgaggctcagtgccacgtctcttaggccagcgtgcccygcaggaggggggtctgtggagsccccagaagctgcagcagccccaggaggggcgcttggtcttcatctggaaggggctgcagctgccgggcctaggagtgggggggcctgcaggagcggcagcacgccttgctgtagtaccagtgcccgcagaggttcactttgatggccagggcacagttggtgcctggctggtcctggcagctgtcatctggagaaggaacacagagcgaagcagggcagtttcaggaggtggccaaggggcgaaaaccccarggacccccacgtgccgttttccaggggcagtgggcctcccaccccgtggtgggtctccatctctagctctctgccccctccttcctggcccatctctgtccccaagatgtcgctgtcccagatcatgccaggtgatttgatctgtgtcccaagaggagtgatgcctaaaggagctacagatgtcacacccagaggcctaagcatccccaagggttccacaggggccccccgtccaccactcaatgtatccaaagcataactcatcacgtgccctgcacctggcaccctgtccctcctccaggtgcccaggccctgcttcagctgctcccctccctgccccctgtgtgccagcccctggccrctccagctgagtcatcctggattcaggtcttggccccacagtggccctgccatctgaagctgacccttttcccaaagtacaggtctcagcatggctccctggggccatggagccccagtcaggcctcccccattccccttccctctctcccctcccagtggggctcggccatgccgggagggagcccccactccctgcacagcttggtctctcaagctggttcccaggctcgccatcaaggtgagcaatgtctgctcacccctcaggccctgactctgtcctcgcctcccctgggaattcccagagccaccctcggcctccccgcgcctcacctgggggctccgtggggcagggctgcagatcacaggcctgtctgccaacgggcttcaccaacggatcgcaaccacggacgatgtcggtcccctggtagcacttgacgtctcgcatcctcacgccyaccccgcaggtcttggtgcactggtgtgggagagacagaaggcatggggaaagcctcctgatggggcaggggcctgggcagggggcggggaacctgcacactcccccttccccaccccacccttcccaggcggcyatgagtcccaactgacacaggacccgtggaagcccatttgaaactagacctgcggctccaaggctgagttgagatgccgacaaaagggcactggctggcattcgggaggctctgattgtctcccacccagggctgcctcagtctccccagatccacagtgaggggtggtccctcctctctcatttcccagggggtccaggcactagctggcmgtcaggaggatctgattctctccccacgcagggctgcctcagtctccccagatgcacagtgaggggtggtccctcctctcccatctccctgagggtcctctggccccagctttcctgggtctgtggtgcagactgtttgttgtgggccgatcaaatgcatctcgcgaagtcaccaccccctccagtggctccccgtccagatgttccccttggaaaaccccgmtgagctccccagaacaccagagacatctgctggccccagtcaccctgctgtcctcctgccaagatcccacaggcggtggctccctcacactccccccaatgtgggtgaccccacatcatccaggcacgtctgggacctgagccctctgtcctctgagatgggtggggtgggaggccctggccctgggacccactctccacttctgtttgcaaaggagcaaggaagaccgattaagacttggcagaaagactgctgcctgcctgcctgctccgagccagggggtgggggctggcaccgtctgcaggcgaggagaggctggcttggcgctgacggcgtgaggacaatcagcctttggcagggccctgaggagcctctggacgtgcctctggagagcagcacattcccggccagccctggtgccagctcctctgcccctggggagtggatgggactgggcagctggggcaacaaacactgactgagccgccgctatgcaccggcatcggggggcagccaccaggaagaaggagtccacgcgcccaccagccgtctgtgccagctgcacctygtctggccctgccacctcctcatcagggctagggggatgctcctccccagcaccccaggctgtccttctggggtccccgcttcatcgcttcatggctccccccgtgccatggctcatcacccagcaaggtacctgcacctagtgggtccgtgtttcctggccccacagtggcccccccatctgaagctagtgmtcttcccaaactacagacctgggctggctccctggggccctggaaccccagtcagcctccctgccccttcccactctccctcccaccgggcttagcctttccagaaggaggcttcagggcccggcacgccgtggtctctccagctgactcccggcaaaagccggctcacccttcaggccctggctctgcccaggcctcccctgggaagccccaggcccaccctcagcctttcccctcctcactcgggggtcctttggtgggcaacagggaatgagtgagtgtgtgttctccctccygaacaagcatgtgtgctacagggcaggcagaggccctggggcggggtggggggtggggggtggcggggcagggtggaggccagacaccaccaagcgtgcacgargagcctgggacctggcaagggcccggggcctggaccccaatctctgagcagggccgcactggggtccccagctcgctcctcacagactcttggactctctgccttgaactcataaggtttaggatcttgcatccacccgccacagcaaccaagacttggagccctcgggcgccagggcctgatacacacctgggcacttcaccatgaacgttccaggctctgagttccgtctgacacccccattttgtcgcctgggtattcagagttggcccatcaggaaactgagggcagaggtagctggagaccccaggtaaacagcctggctatggaagcacctgcccagtgattcccagataccctctggacacccccaggtccccctctcagaagctcatggcattgccaggtgtgaggcggctgggtctggggccagggctggcgctgctgtgaaaggggcacggatggctgatgtgtcacagctgatgtgagttactcaagctggagtctagacagggctgcctccgtggggcccagaaggcagaggggcacccactggcacatggcgaggctctggagtcacccggaggccccacaggaagtgcagcagaaggggaaaacagcaggagaggtgaaagcaacctgtttgctctgcaagacaactgggggcgagggggcacccagtttgccaccccctctgtgaaaccagggctgcccacccacctcggggctccctgcccagggccccttgggatgagctggttcaggccccccttcccttgcagatgccacaccccacctgggtttcactctagtgccatggacaggcctggcctccaatg

SEQ ID NO: 10003 - DNA, 12888 bp, Homo sapiens
atttgttaaggccttgaggttggagtgatccttgcatcttcgaggaactgaaaggaggtcattttggttggaacagaacaagagaacaatgattgaatatattcaatgtaaagttgaaaatgaagatcatattacacagtgttttacaggcaatatgagtgttcggattttatcatcatgaaaatagcatgatgraagttgwcttaatattgatgtaatatggagaatgaattagaagagggctgaataatgtggggaagtccattaagatgttattgaaatgttgatatttgggtctagagagtgactgtaggactggtaagacgtcagtraagcagaaaaatattcaggatttggatccaaaaggatataatatttttgcaagtagagttcataagtcaaacacctatttattgagcttactcctccttttatctggccatttctagtttatctttctggtctcaattaaactaattttccagattattttagttcttctccattaaagtggttcctattcctaccaccccaaacttactctctaaagcaaattaatgcatgtaattatttgtttagcctgttgtcctgatcactgtgagatttgagaaaatgcttatcctgttcactgtcatacctgagcacctccttcagcgtggttttttctctcaaagatgagtttacastaaccaacacattgaaatgtatgtgtgatgttattaatttccaatgagaaatagaattattgcattggcacaaattatcttgtcaacttgaatagtaaacactacctggggagaaacatatcatgattatatttctgggtaaacaacaaacaagaggaaaaggcttaactacaaaattcaaaaatttcgtgtcttaagtttggatagataaatatcaatctccaaaaaaaccaatttattaattggttaaattattaatttgttaaaaaacagttcattaaatcatggtacttagcaggctagtagggtcttctctatagacctgcttgattattgttgtccttcaagtctcttgtgttgttcgcctttatctcctcctgtaagtggtgattttatgtgtgtgtgttggggggagtacatctgtttataatcatgaattttaatcctggattgaaatgaaatcttttctcaaccaataattttatgatatggcaagttgtgtaatctctttgaatttcagatatttcatctacaaaaggtgaataaaaatactcataggtgctttgaatattaaataatgcatatgaagattgttgtaagtttatggtatgtgcttggtcatcaataaatagtaattattttccatggcttatatttgtaattaggttaaatcagtcaaatctcaaatgtttgggaatcattgtttcctataagggtgtctttttatgtccctcttctgatgtcttgtgatggaattactgatgaattctaagaaggcagacttatttttctcatttcctagtaactacaggtactttcccgtgcacactctctccccattctcatgcacacatttacacacacacacacacacacacacactcattttgtaatttaaaacaattaaattttttgtcctataatttaaaacagttgtaaaatttccaatgaagttctagtttttcatgaggaagtctttgatgtgttttaaggcatcaaatattacacacatatatttataaagaatttgaatactcttctgatgctctaaatgtgtatgcttatttttccattaaataattccatattgctttcaagtatgataaaatgtattcataaggttttcactgataactaaatgagctaactgtgtcaaaaaacctagcagaatcacagatacttagtaaataaatattgttctcacattaactcttcagccaagataaatgcagataatttgggtctgcatcaggataattataattatctaacactgtttgaactctgtacaatttctaactctttaaataatttgtctgtgcatatcagcaagcttcttaccccttaaagccttcatttcttcattatgaaaggttgaatgtgatacaagatggccccgacatccttttacaaaatttaagacccttacattagtttcttaaaagtcaaacacccctcagactcctccaaaactccagagtcaacaggcatttgcaccccttattcaagattttttttctggcatataaaaaattggcaagtcyttatgatagttcttgtttaataagtgtttacaatgtgatactgtttcaaatatgccaagatgtgtaggaatttgtgtatcattttacaaataaggaatttgaaacatgaacatatcaactaattttcttaatgacattcatttagacagggaaggagcttgttttgaatccaggtctggcagtagggtggcaagttgttatcagcttgccaaaactgaggagtttctcctaatgcgggactttcagtgttaaaaccagtacaggatggggcaaacaaggatggtcaccttatttgatgactctaaataattaggctcctctccgttgtgccctttgacttcttgaaatgcatttaagttgtggtatgcttactggaaagaaccctaatctgagaatcagtgagaatcagtggtctaggattcagttcagctctgttattggcttactgaatggattcttcctgggcgtcagctctcctacaaaatgaggagctgaaaatgttgatcacttcaggacaagccagycttcattctcaattcctttgaaacttctaagtgggagaaatggcagagcacagaggagtccttcactcaagattttttagaatccctgctgcccagctacctcttggagcccttggacttagcagaaccaggggactctgaagacgcagctttatagagctcagagcagggagtgggtggaggctggcagtggggctgtgtgcwgtgtgtgcagtacttggtatttctcccttcagtggacacttcaccagcctctctcctcccacccaccagagctaccctgaggaggtaagtggggacctcatctcttcccccacagaggccctcaggcacctccttcayagcttcgaaatccttwagtgattagggtacagggatttgaaggagagrcagtctgtsatttaaggtaatttttattttcctacactccatttctctccccacatgcacatcccccatctagttggtgcctgaactgccactatgctggcttcgtgcttggagcttcactgtgyggttctgagcgtgyacagctctggctcagaggtgcatcttctgaagcctttgtttggtgtgaatgcctcagtgcgattaactcatatgccaatattctcatagatggtggataaaatggtgaaacaaaagaagggaacctttgattgggaaactgaatgtgggaagacagtttggagatgggatccggaactttcagcccctcaatgtccctctttatcacaactttcctagttgccatttattcagtacatcttgtgccgggagtctgaataagcaccttcaatgtttactttgcattactctttctattctagagatgtgaaaataagacgtgaggaagctaagtaaattcacagcttgtatgtagcaaaagtgaaataaaaactcagttattagatgctaggggagctatttttacttacctaaacaattttacagtaaaaacatgtagctcttatgttaatacattcttcctgttaataaaatgttttatttgatcaattttttttttttttttgagacagagtcttgctctgtcacccaggctggagtgcaatggtgcgatctcagctcactgcaayctccacttcccgagttcaagggattctactgcctcagactcccragtaactgggattacagtcatgtgtgaccacgcctgggtagtttttatatttttagtagagacggggtttcaccatgttgtccaggctggtctcaaactcctgacctcgtgatccacctgcctcggcctcccaaagtgctgggattacaggtatgagccactgtacctggcctatttgatcaatattttaaccattaaaactagaactggtaatctctgagtcctagtctagggctctctatgccctgtcacttgcctaagcattgagaataaaatgagaagaaacacagacagttacagggagttataaatttttggggaaacaaagatactaatcaaataactaaacaagtacataataaatgcactaaaatttaagctgtgwtaagaaaagtcacaaagaagaatatgtgtgagtatgtacagcagccaaaattatgagaagaaatgaaatgaawgatcagaattattggaagacgacaagttcttakgtggtcktgcagcttctatgatccatggtaaggacttgaatttttatttcttatttcataaggtaagtgaagccattgataggtttctagtaaaagagtaacatcactttatattaaaaacaaataatttggttgctttgtgtcgaatgaattagacagaggcatgatactaagctgggtgatcctcaggaaggttctgcagatattttggttgaagatgttgagggatgagtsacagttggaagtgagatggagagaggaaaccagcgtttacgatggattaatagacttgtaaataggagagggtgagaaatattaagaatgacttccagggttttctggcatgaccacgtgaatagatggtgactggtgatgagatgataactttgaagaggataaaacatgataattgacataaagttcaattttgcacattatgtttaagatgacaatgaactcttacatttggaagtccagttggaaattggctgcgtgaatacatattgagaagagaagcctgggcagcagacatatatttgggataattgaggcacagagcagagacatggaggacattatgggtagacaataatttccaaggtattagttgtgaaagtgagtggaaaatgggtgattactcagaagaaatgagggggcaattaagaggtttgctgaagtttgtgattgtttgttttctaygatagtaactcccaaaattgatcctcggggggaagaagtgataatgggtgggacatatttgaatgctgataggagtgacctaaattcctgatactcacacttggctgcacacgggaattgcctatgagtttaaacacatgctgatttgtgagttctacttgcacagtgtcaaatttaattggtataggtttcttctgargaaaggaatattttaatgcttcttaaaataatctagcatacagcacaatttgagaatctgtggtctaaacagagattaaaacaaaatccatgttaaaatatagaaaggcaaaaccaagagagtcaggtgtggaggaatgtgacattctggacccttggtgaataagtgaggggttcaagccacaakgaaaaggcagagaactgaaataatgcttgagtataggcaagagaggagagacagcttagaatatacacaaaagatgtcatcacttgcacaagacagaatcaatcagtgggtgggaatattaaggaaagacttcatggaggacatggtgcacctcacttatggaagaaactgatggctatgacccagtagagagaaaggggaaatcatttttcaccattagagaaagacgtcaaccaatgtaaaaaactatatagacacaagaaaaataaaggataatatctaaaaattagtcaaaggtttctatggggaagaacctggagctyatgacagatctaagggtgctgccaggctatagaaggtctgaaatgtaatctggttttttttgaactttccaaatctttggcactggaatctaagcatcattgtctctcctagttttagatatcaaccactcctagtcttcacttctcccaccatctcacctcaattcacccaggttgcgtttgcctaaaagtcactcagaaaccctgatggggggctttgggactaacatctcaagtactaccagcttcactctaacaggcttccctgagatgaagggtctggagcactggctggctgcccttctgctgctgctttrtgctatttccttcytgggcaacatcctcatcctctttatcataaaggaagagcagagcttgcaccagccarygtactacttcctgtctcttttttctgttaatgacctgggtgtgtccttttctacattgcccactgtactggctgctgtgtgttttcatgccccagagamaacttttgatgcctgcctggcccagaygttcttcatccacttttcctcctggacagagtttggcatcctactggccatgagttttgaccactatgtggccatctgtaacccgctgcgctatgccacagtgctcactgatgtccgtgtggcccacaatggcatatccattgtcatccgcagcttctgcatrgtattcccacttcccttcctccygaasagactgcctttctgtaaggccagtgtggtactggcccattcctactgtctgcatgcagacctgattcggctgccctgkggagacactaccatcaacagcatgtatggcctgttcattgtcatctctgcctttggtgtagattcactgctcatcctcctctcctatgtgctcattctacattctgtgctggccattgcctccaggggtgagaggcttaagacactcaayacatgtgtgtcacatatctatgcagtgctgatcttctatgtgcctatggttagtgtgtccatggttcatcgatttgggaggcatgctcctgaatatgtgcacaagttcatgtctctttgtacctccaatgctctacccaattatctattccatcaagactaaggagattcgcaggagactacacaagatgttattgggagctaagttctgatcaaggaaaactgtcctggaaaggcttagagtttctttgttgttgctgatrtttgggtgtaccaggttagtccttcggagcctttcaatctccctccagacrtacacctataattgtgtacctgccagaagttatatgggttagccaggctacaacttgtaacgcaaaacatcaggctgccctatgttgtaattaactgtcacaggttgccacaagtgacttctctcagacccaacaagaaagagagtcttgaactgaatcctttttgtcccaatgtactaataacatctatgctttcaagtaattctcagaaacagacaaaaactaatgcatacattcgttatataatgttataatgtagattatgttacctgagatcatatcaacccagaatatttaatcattctgaatatctttaaactcaaaaactaaagatatgtaatagctgtgaccatgtttacacttctgaaataaataagaataatccagagttctgtaaaatggaacaaaaatagaaaccmtacaacacakggaattcagaagtttagtacaaagaaaaatgttttatagaaaagtcacatgctgtcatcattgggcatgactacagagaggattgaatgactagaggcagctaatcaacactscaaatcgaarcctaacagaggttgttgattgatgggctggcaagtccacttcagtggcagtggttgcttggcagcatagttggctgaaatatgggctcgtgtcctgcagtgagcaacccagacaacaagcttaagcacatgcctgagcagaagagggatagctgaaggctgtcagcaaattcacagagaaagccacaaagaaagaaatcctctgaaaaaccatgccaagaaracacaacccaggccacacaggcaggtgcacacttaacagatttaaaaagaatgatatgtggactttaactggagagtaaacagttagtggacaggccatggcataactcaactccaatggatgattagggaatgaagacatgtaagaagaaaattactttttaaaaagcaatagctaataattttttttcctcataggatcatggaataacttttttaaaataaagccatagggatcaaataacatgatcatttactaaacatagttgcagtatagacttgaatttctcccaaacaccccctgaacrtctcattaagcaacgaggagagaaaagcaaaacaaaattaaaacttacagatgacatctttggcaaaatcacatgacagaaaaatcttgcccccarttggagaggactgtatactaagcaaaaatctgggcatatggttttgagattgactggtgaaactgggaacaatacttgcaggctctaagtgctcataaacataagaggataaagaagtgctgtggtggtcctcagcatttgaaaatctcaaaaatgtccagcaaatgagctcttccaaaaggatatagcctcagcccaaaggaaagtacattaagcaaataaagatccacttgcataagagagaaagaaggctctgatcgtagaggaaagggcttagagaaagcagacacaagaaagtgatgcaacagctaaatacagcttcccaaaacctgtggcgttctggggctggaacagaaggaagcagaatgtcctcctggaccagacttcgctctgacacacagaagtggcctcaaagaaagtgctactttgagccatttgaacagcaacagagggacccctagagctgcaaagctataaaagctactctgccattgcctctcccttcagaggatcccacaagtcatcccagaaagctatacttacttatatagagagacaaaaaagagatatgtgctaattctatacacagttatgagcaaaaataaaagacatcaatgacaaagatgaatccatggcgctcagggccatgctgatgatagcaatctccctcctttttgtttcaagtcttttttttattaatgctaacatttcagtgtctgcatctaaatatcagaaaccacattactgacttcaatattttttaggcttttaaaaaatgcgtcctttcatttccacagtaaaattgggaattctcataataaggcatatgaatgggaagagygagtacttctgcaacactaaaaagtattcctatcatttatatcatcacatatatgtaaatatagatatagttttactattgtctaatgagtattgcctaattccctaattaacagacttatgaaaaaagcctcatctttatgaaataaaatatatttgttcawactggtaatataaatattttacagtgtattgtcgtctacgtaaatgataaattatcaaccttcgcccactttttgatggggttgtttgtttttgtaaatttgtttgagttcattgtagattctggatattagccctttgtcagatgagtaggttgcaaaaattttctcccattttgtaggttgcctgttcactctgatgatagtttcttttgctgtgcagaagctctttagtttaatkagatcccatttstcaattttgtcttttgttgccattgcttttggtgttttggacatgaagtccttgcccatgcctgtgtcctgaatggtgatgcctaggttttcttctagggtttttatggttttaggtctaacgtttaagtctttaatccatcttgaattgatttttgtataaggtgtaaggaagggatccagtttcagctttctacatatggctagccagttttcccagcaccatttattaaatagggaatcctttcyccattgcttgtttttctcaggtttgtcaaagatcagatagttgtagatatgcgkcgttatttctgagggctctgttctgttccattgatctatatctstgttttggtaccagtaccatgctgttttggttactgtagmcttgtagtatagtttgaagtcaggtagtgtgatgcctccagctttgttcttttggcttaggattgccttggtgatgggggctcttttttggttccatatgaactttaaagtagttttttccaattctgtgaagaaagtcattggtagcttgacacttctcaaaagaagayatttatgcagccaaaaaacacatgaaaaaatgctcaccatcactggccatcagagaaatgcaaatcaaaaccacaatgagataccatctcacaccagttagaatggcaatcattaaaaagtcaggaaacaacaggtgctggagaggatgtggagaaataggaacacttttttttttttttttttttttttttttgagacggagtctcgctctgtcgcccaggctggagtgcagtggcgggatctcggctcactgcaagctccacctcccgggttcacgccattctcctgcctcagcctcccaagtagctgggactacaggcgcccgccactacgcccggmcaattttctgtatttttagtagagacggggtttcaccgttttagccgggatggtctcgatctcctgacctcgcgatccgcccgcctcggcctcccaaagtgctgggattacaggygtgagccaccgcgcccagccaayaggaacacttttacactgttggtgggactgtaaactagttcaaccattgtggaagtcagtgtggtgattcctcagggatctagaactagaaataccatttgacccagccatcccattactgggtrtatacccaaaggaatataaatcttgctgctgtaaagacacatgcacacgtatgtttattgtggcattattcacaatagcaaagacttggaaccaacccaaatgtccaacaatgatagactgaattaagaaaatgtggcacatatacaccatggaatactatgcagccataaaaaatgatgagttcatgtcctttgtagggacatggatgaaattggaaatcatcattctcagtaaactatcgcaagaacamaaaaccaaacaccacatattctcactcataggtgggaactgaacaatgagatcacatggacacaggaaggggaatatcacactctggggactatggtggggtgggtgggggggagggatagcattgggagatatacctaacgctagatgacgagttagtgggtgcagcgcaccagcatggcacatgtatacatatgtaactaacctgcacaacgtgcacatgtaccctaaaacttaaagtataattaaaaaattatcaaccttaactttctaattctcagatttttgtgttaaaatcacccaatgcattttgtgttcacaatatatttgctttttcaaatatagaaaaacccacttggcaaatgattaagttctactctgtttaaaattcactgaataatttgtcccagtcagagacattaggtttagctattaagactaattaaaaactgactgccagtcatagttgcttattgtctgttttycatcataaaaaagcaatttccccagcttgtagttctgggktatttgccttaaatacatagcactgtggttggttctaagctgttgttctgtcctcatacagttgacatgaacattaacrcgtccaccagtaacacactgccctcacagtgcagccattcaaatcatggtgaggctttgtgagaaggaatttaaaagcattttaaaaggaatatttggttagcaaacaaatctcaggatatgttgacatatccctcctgyatctctttagacaggtttctcccataaaacctaatgactaaatcccagggtcactgagtccttcaaatgtaacactgggattggcaaatagtaggtttcaataaatattgtcttgtgaacaaaataaatgaatgagctgttatattccttataaacaaacaaacaaaaacctaaacaaagctgggaggaaaaatacataaccaccagaattatatccactccccaaaatatcttcagtgttttaaaactgggattgagtaaaagatagtgacgaaatatctctgctaggaagaatgaaggttgagaaacactttagggagagtatcttgattaacatggctggcagtaaatgatatatcaaggtggtccgatagccagtactgctgtttgcatttctattagttgagatcagtatgtcatccatacctttaataaagcctatcacacaccaatgccttggataagttacacatgcctccagaaatctgtagaaagtttggctggcaattatactttacrcttgaagagtactggaggcttgtgcaactatttatttgtgcaaatatttattgtcaactgaygcctgaattgtacatgtacaaatcaaatgaactaattaattgcctattcaatggataatttattctatttcatacatatttttggcggagaagtcttccatgcwtaatggaaacaaagaaaaatcctttatacatatraatgaaaccacacccacctacccctaatacgacaaaacaatgagaccaaatcttgatttctgacrtaagtgtcgagttactatttgcttaatagtcctcctattccctgcagagggtaattttttggaacagattcttgattagttttttgatgttaggaagatgagaattcacaaartaactgaygacttcatacactgtatgctgtttctaggaatcctgaaagcatttacgagcaaatgctctcctcagttgtctggagggcatctggttgcctgtgttcaaatgtacaagcacctacaagtagattacttcttatctgagaatgaaattaaacaacagagggtcctgagtccaaagtagtgcatcagcccaggtagaaaagtgtccagttgataatggaatattggatatcctcctgatgaggaagtgcccttgctgcacattactcaactcagaggataaactctgtgcctctgctgccatttgtcgttttttaaaacactatctgggtgaagagaacttctcatccaactgaactataac

SEQ ID NO: 10004 - DNA, 27509 bp, Homo sapiens
cccagcactttgggaggccgaggcaggtggaacacgaggtcaggagattgagaccatcctggctaacacggtgaaaccccgtctctactaaaaaatacaaaaaattagccgggcgcggtggtgggtgcctgtagtcccagctactcaggaggctgaagcaggagaatggcaggaaccggggaggcagaggttgtagtgagctgagatcgcgccattgcactccagcctgggcgacagagcgagaatccgtctcgaaaaaaaaaaaaaaatacacacacacacacaaaaactgtgttaatgcttaactacacaaaaatgataatcagataaatatgcatttatttagagaactgcatgttggtcagtccagtccctgcagagggaattcccagcatgacctcattcacttgtgaagacagagcaatccttgtgttttatttttttaagatgkatctcactctgttgcccagactggagtgcagtggcatgatctcagccctctgccacctccaccttccgggttcaagagattctcatgcctcagcctcctgagtagctgagattacaggcttgtgcctccrtgcccagctaatttttttatttttactagagatgaggtttcaccagtttgggcaggccggtctcaaactcctgacctcaagtgatccacccacctcggcctcccgaagtgctgggatgacaggtgcctggtcagcaactgttgtttagacatacacattttatctgctcgtccagcatggtcagccctccactttttaaattttattttatttatttttttgagacagagtctcactctgttgtccaggttggagtccagtggcgtgatttcggctcactgcaacctctacttcccaggttcgascaattctcctgcctcagcttcccgagtagctgggattacaggcccgcgtccccacacctagctaatttttgtatttttagtagagacagggtttcaccatgttggccaggctggtctcgaactsctgacctcaggtgatyctcctgccttggcctcccaaagtgctgagattacaggtgtgagccactgcacacggccttaaattttatttattatttatttatttatttatttagagacttagtctcactctgttgcccmsgctggagtgcagtggcatgrtctcggctcactgcactccacctcctgggttcacgccattctcctgcctcagcctcccgagtagctgggactacaggcgcccaccaccactcccggctaatttttgtatttttagtagagatggggtttcactgtgttagccaggatagtctcgatctcctgacctygtgatccgcctgcctcggcctcccaaagtgctgggattacttattttgttttttgtagagacaggttctcactgtgttgcccaggctggtcttgaactcctgatctcaagtgatcttcccacctcagtctctcaaagggctgggattacaggggtgagccactgcaccccaccttccctctactttttgacggtttccttctgctatgaatgtgcatgtccagttgtctgcttcttagaactgatatttaccttcctcatccatcagccattggaggaggactgggaccgctcagattattgatctgacccattctttcggcagggtttcctggtggctgtcttccatcaccaaaactggaatcagaagagtttccatagccctttttttttccccacatctttgctgaagcagagttttgaaaaacaaaaccacaaactaagctattccccagaagaaatctgtaatcaaagataagctctgccgggcacagtggctcacgccttttggaggccaaggcgggcggatcacctgaggtcaggagttctagacctgccaggccaacatggtaaaacctcatctctactaaaaatacaaaaattagctagatgtggtggtgggtacctgtagtctcagctacctgggaggctgaggcaagagaatcgcttgaacctgggaagtagaggttgcagtgagccgagattgcaccactgcactccagcctgggcgacggagtgagacgacctcacaaaaatttacataaataaaatraaaagtaaaataaaaatacaaaagttggccgggtgcgtttgctcacgcctgtaatcccagcactttgggagggtgaggcaggcagataatgaggtaagaagatcgagaccatcctggctaacacggtgaaaccctgtctctactaaaaatacaaaaaattagctgtgcgtggtgacacgcacctgtagtcccagctatttgggaggctgaggcaggagaatcmcttgaacctgggaggtggaggttgcagtgagccgagatsgcwccactgcamtccagcctgggccacagagtgagactccatcttgaaaaaaaaaaaaaatacaaaagttagccaggggtgttggtgggtgcctgtaatcccagctatttgggaggctaaggcagaagaatttcttgaacctaggaaacggaggttgcagtgagccgagatcacacctctgtactccagcctggacaacagagcgagactttgtctcaaaaaaaaaaaaaaaaaaaaaaactaaataggccgggagcagtggctcatgcctataatcccagccctttgggaggccaaggcaggtggatcacttgaggtcaggagtttgagaccaggctggccaacatggtgtaaccccgtctctactaaaaacacaaaaattagccgggtctggtggcgtatgtctgtaatcccagctactcgggaggctgaggcaggagaatcacttaaacctgggaggcaggggttgcagtgagctgagatcgtgccactgcactctagccagggtgacagagtgaaactctgtctcawaaaattaaaaaagaaattcagcaagtaatgagttaaggaattygaatattaaggcgagtgacaaggaacgcccaggatgtggcccaggatggagtaggggggacactcatttaggagaaagctcaggccacaagacaggaggagccagccttgttggggttgaagggaagagcattccaggctgagggaactgcaaggcgtttgcatgggacactatgggatggcttctgcccttggtgggcagcctctggtctgaggccattctttggcctgcctgactgtctggcaaccgggaggaagccctgcccttcctggagacagaaacaaaggtctaggaaatatctgcttcccttttccttgaaaaacgcttaagggaacggaggactgggaggtgccgtctctctctgccagcctgccccctaccatagccatcccactcccatctcagaaagtgacccgccatcctccaaaaggctcggaccctgatcaaggagtcatcccccttgtcccagcacctccagttggcccagcctccaaaacggatgtcaaattcagccctttctccaaggacactgcccagtccaggccccactatcattcatctggactagaacagtcacctcctctcccatctcctggctgcagctcttgaagcctcaactgggcccctgtgaacacttgagttagggcaaggtccttcctctgctcagaaccctctatacctcccacctcgctgggcataaaagccaaagtcctggccaggcacggtggctcacatctgttatcccagcactttgggaggccaaggggggcggatcactagaggtcaggagttagagaccaacatggtgaaaccccatctctactaaaaatacaaaaattagctaggcgtggtgacgcacccctgtagtaccagctactcggtaggctgaggtgggagaatcgcttgaacctgggaggcagagtttgcagtgagccgagatcacaccactgtgctccagcctgggtgacagaacgagactggggttcagaaacaaacaaacaaaacaacaaagtcctcctcaggtgacaggaacttgcacctatctgccctgtcatctccctgcccgctcctctcctcgaatctctcctttgctaagcctgctccagccacactgttctcctggctgttcctttttttttttttttttttttttttttgagtctcactctcacccaggctggagtgcagtgcctctatcttggctcactgcaacctccgcctgccgggttcaagagattctcctgcatcagcctcccaagtaggtggaattacaggtgtgcaccaccacacccggctaatttttgtattttgcatagagatgggggtctccctatgttgcccaggctggtcttgaactcctgggctcaagtgatcctcccatctcggcctcccaaaatgctgggattacaggtgggagccgcgcccaggtggatttttgtctgactctgttcattcctgtgtccccagtacctggaaggacgccaagcacacagtaggcgcttaaaaaacattgagccacatgttgagaaaagaacggcaccattgtggctgcaagtgggacttgggccgcgcgggggagctcgcgcacctcgggccggggcaagagctcagtggaacccgcccgaggaagaacccgtggcgcaggattttcccaggccttctgaggaccaggggcgtcccccgtcccaccctgtgactttgctcaggccgttccggggcgggaattcagaactcctcagccccccaagaaaaaaatatccccgtggaaattccttgggaatgaccgaggcgggggaaatatgcgtctctggatggccagtgactcgcagcccccttccccgataggaagggcctgcgcgtccggggacccttcgcttccccttctgctgcgcgacctccctggcccctcggagatctccatggcgacgccgcgcgcgccccacaacaggaaagccttaggcggcgcggcttggtgctcggagacttaagagtacccagcctcgacgtggtggatgtcgagtcttggggtcacacgcacaggcggtggccaagcaaacacccgctcatatttagtgcatgagcctgggttcgagttgccggagcctcgcgcgtagggcaggggttcgagcgccccttctccctgcctcgcctctgcgcctgggggctgctgcctcagtttcccagcgacaggcagggatttcgagcgtccccctcccctccctcgtcaagatccaagctagctgcctcagtttccccgcggagcctgggacgccagcggaggggctcggcgcgtagggatcacgcagcttccttcctttttctgggagctgtaaagacgcctccgcggccaaggccgaaaggggaagcgaggaggccgccggggtgagtgccctcgggtgtagagagaggacgccgatttccccggacgtggtgagaccgcgcttcgtcactcccacggttagcggtcgccgggaggtgcctggctctgctctggccgcttctcgagaaatgcccgtgtcagctaggtgtggacgtgacctagggggaggggcatccctcagtggagggagcccggggaggattcctgggcccccacccaggcagggggctcatccactcgattaaagaggcctgcgtaagctggagagggaggacttgagttcggaccccctcgcagcctggagtctcagtttaccgctttgtgaaatggacacaataacagtctccactctccggggaagttggcagtatttaaaagtacttaataaaccgcttagcgcggtgtagaccgtgattcaagcttagcctggccgggaaacgggaggcgtggaggccgggagcagcccccggggtcatcgccctgccaccgccgcccgattgctttagcttggaaattccggagctgaagcggccagcgagggaggatgaccctctcggcccsggcaccctgtcagtccggaaataactgcagcatttgttccggaggggaaggcgcgaggtttccgggaaagcagcaccgccccttggcycccaggtggctagcgctataaaggatcacgcgccccagtcgaygctgagctcctctgctactcagagttgcaacctcmgcctmgctatggctcccagcagcccccggcccgcgctgcccgcactcctggtcctgctcggggctctgttcccaggtgagtcggggtggggattgccgtcgggccagttctccgaagccccgggaggaccggctcccgggtcaggtcatgcatgcttaggtagctgtttatgggaaggaggggctagagacagcgattgaaaggcaacagccagtaggttcgaatccagaccctgcatacctccacgtgtggccttgggctatagattgcagctttaaaaaagggtagggggttggagatggaggggaggggcgggcctcgttttgttgcccaggccggtcttgaactccgggggtctagccttacctcctgcctcagcctcccgastagctgggatgagaggtgtgaaccaccgccttgcttggctagattgcgtctcttacagtttctcagytgtaaaacgggaaacgttatagcggccacctggcagggtatcttggcccagcgcagcacctggccccaggactcgatcatgatggtttgggaacttggctctgtgccaacccaacaaggcttaagggacccccacccccctcaagatgtatattctgttcctcatcctctctgcccctggggaagtccagggctgcttctacttgggggaattccagagctgacttatccgtggcccaaagctgagaagtgggacrccccagcacaccctcccccagctccagcccagctagggaagagggaaggggtcagagggtctttcatggtggtgtaagtttggggaaccaggagggtgggagattgacagcttggttaacagctcaacaaagcctgagatccaggccagcacggtagttcatgccagtaatcccaacactttaggagccccaggcgggcgaatcacttaaggtcaggagtttgagaccagcctggccaacatggcaacatcccgtctctactaaaaatacaaaaattagctggcatggtggtgggcgcctgtgatcscagctgctcgggaggctgagggaggaaaatcccttaagcccacsaggctgaggttgcagtgaaccaagattgtgccactgcactccagcctgggagacatagcgagattctgtctcaaaaaacaaagcrttctgatccggactcagacccagatcgcactgctttctagctgagtaaccatttctctctatgaaatgggaatggtcccagaatctcccttggagaatgtatggagccagtgtcctcacacccccatccaagatagaacaaatctgagacaggaatctttgagtgaggcagtgctgggctcagacattttttcccaccttcggaggcagcagaatytgagggacctgatccaaataagccccttctttctttcttttcttttcttttttttttttttttttttttgagacggagtctcactctgtcgcccaggctggagtgcagtggcgtgatctcggctcactgcaacctctgcctcccaggttcaaacgattctcctgcctcagcctccctgagtagctgggactacaggcatgtgccatcacacccggctaatcactgtgttagccaggatggtctcgatttcctgacctcatgatctgcccaccctgcctcccaaagtgctgggattacatgcgtgagccacagtgcccaccccgtaagccccttctttcttacctgcaaggtagccagttgctacccatcctgtgctgagttacttgtattagcaagggatggggtggctatactcacccaccttacagatggggaaattgaggcccaaagagggggaaactacgtgtctcagggagtgaggagccagtctgattcctggagggctgactgtctccacctgacttcttaggagggaggagggcaccaacttcacattaaaatctggttggacacagtggctcacacctgtaatcctggcattttgggaggcttaggcgggaggatcacttgaggccaggagtttgagaccagccttagcaacatagtgagaccccatctctacaaaaatgtttttcagggccaggcgcggtggctcacacctataatcccagcactttgggaggctgaggcgggcggattacctgaggtcaggagtttgagaccagcctgaccaacatggagaaaccccgtctctactaaaagtacaaaattacccgggcgtggtggcgcatgcctgtaatcccagctactcgggaggctgaggcaggagaatcgcttgaacctgggaggcggaggttgcggtgaactgagatcgtgccattgcactccagcctgggcaacaagagctaaactccgtctcaaaaaaaaaaaaatgtttttcaaatattagccgggtatggtggtgtcctgtagtcccagctacttgggaggctgagatgggaggatcacttgagcccaggagttcaaggttacagtgagctatgattgtgccactgtattccagcctgggtaacagagggagacccgtttaaaaaaaaaaaagtgatggctaaagtccttccatggctccctattgccctcagtataaagaacacatgtggctgggcgtggtggttcacgcctgtaatcccagcactttgggaggctgaggcgggcggatcacttgaggccaggagtttgagagcaggctggccgacgtggcgaaaccccgtctctattaaaaatacaaaaattagctgggcgtggtggtgcttgcctgtaatcccagatactctggaggctgaggcaggagaatmacttgaacccgggaggcaraggttgcagtgagctgagattgcgccactgcactccagtctgagtgacaaagcgagactccatctcaaaaaaaaaaaaaataaaagaacacatctttagcatggccttcagtgctcacgggatcttcctgaattaatctccccctcttcatccttgctcactcagctccagccaccctgccccgggacatctgtacttgcctggaacttatttcccttttctccggacagccagccctttctcgtcatttagatctctgctgaaacattaccctgtcaccaaagcactgtctattctatcaccctgttttgtttttgtcaaagctcatattaacatcagttattaattatcttgtttgctcataatttttttttttttttttttggagacagagtctcgttctgttgctcaggctggagtgcagtggcacaatcttggctcactgtaacctccacctcccaggttcaagtgattcttgtgcctcagcctcccaaatagctaggactacaggcacgtcccaccatgcccagctaatttttgtatttttagtggagacggggctttgtcatgttggccaggctgatctcaaattcctgacctcaagtgatctgcccgccttggcctcccaaagtgctgggattacaggcgtgagccaccacacccggcctgctcatgaattttctctttaacttccacatcgaaggcaaagtattgtcttgttaaggctgtgcctccagcacccagcacaggctgggcgcacattcccttgatgaacctgatttgtaatgcctgtcgcctcttccctcgtttcttctaggacctggcaatgcccagacatctgtgtccccctcaaaagtcatcctgccccggggaggctccgtgctggtgacatgcagcacctcctgtgaccagcccawgttgttgggcatagagaccccgttgcctaaaaaggagttgctcctgcctgggaacaaccggaaggtgtatgaactgagcaatgtgcaagaagatagccaaccaatgtgctattcaaactgccctgatgggcagtcaacagctaaaaccttcctcaccgtgtactgtgagtaactgagcccggagggctggactaggcagaccsggtgggagagacgtgcaggggcacctgcagaggcctgggggaatctttgccacttgctcgtagggtcaaggaggggctccttgcagggcaggtggggacatccttggaaagtccctttgtgaatttctttgggtacaattaaagtatttacaggctgggtgcggtggctcatgcctgtaatcccagcactttgagaggctgaggctggcggatcacctgagatcaggagtttaagtttcgccaacatggcgaaaccctgtctctgctgaaaatacaaaaatcagccgggcatggtgtcaagcgcctgtaatcccagctacttggaaggctgaggcaggagaacgcttgaacctgagaggcagagattgcagtgagccgcgatcgtgccagtgcactccagtctggataacagagcaagattccatctcaagaaaaaaaaaatgccatctctctatgcctcactctttgaacatatgacacggtcctgcttcagacactttaataaaagatgcaaattaagccaagtgtggtggcttgtacctataatcccaactactccagaggctgaggcagaaggatggtttgagcccaggagtttgagaccagcctgggcaacagagtgagaccctgtttctttcttttttttttttttttttttgagacggagtctcactctgtcgcccaggctggagtgcagtggtgtgatctcggctcactgcaagctccgcctcccgggttcacgccattctcctgcctcagcctcccgagtagctgggactacaggcgcctgccaccatgcccggctcatttttttgtatttttagtagagacggggtttcactgtgttagccaggatggtctcaatctcctgacctagtggtccgcccgcctcggcctcccaaagtgctgggattacaggtgtaagccactgtgcccatccaagaccctgtttctaccggaaaaaaaaagtaaataatttagctgggcatcgtggtgtgcacctgtaatcccagctgctcctgaggctgtgatgggaggattgctttaacccaggggttcgaatcctaggagttcgaatccatcctaggcaacatagcaaaaccccatttttatttaaaaaaaaaaaaaaagatatgagttaaaactagccctgggatggcatttttcacatattggtaacaaacraaagaattgatggccgggcgcagtggctcacgcctgtaatcccagcactttgggaggccgaggcgggcggatcacaaggtcaggagatcgagaccatcctggctaacatggtgaaaccccgtctctactaaaactacaaaaaattagccgggcatggtggcaggcgcctgtggtcccagctactcaggaggctgaggcaggagaatggcatgaacccgggaggcagagcttgcagtgagccaagatcgtgccactgcactccagcctgggcgacagagcaagactccatctcaaaaaaaaaaaaaaaaaaaagaattgataacagctgtgctgccaaggctattggaacgtaggaggtcctaggacagtgctgttgggagcataaataagcccaaccctgtggcgggaaattgggcatcagttctcaaaatgtcatgggctgggcacggtggctcacgcctgtaatcccascactttgggaggctgagggaggcggatcacttgaggtcaggagttcgagaccagcctgaccaccatggagaaaccccgtctctattaaaaatacaaaaaaaactagccaggcatagtggcacatacctgtaatcccagctactcgggaggctgaggcaggagaatctcttgaaactgggaggcagaggttgcggtgagctgagattgcgccactgcactccagcttgggcaacaagagcaaaactccatctcaaaaaaaaaaaaaaaagaaataaaagaaggtatgttgaatatgagtggtatgccaccctcacattagggaagggcagtttcggggaggctgtatttatgtataaaatagccctaaaaggaagtgggagaaatgacaatattagctggctatgagaagagaggctgggaggctgtgggagagggcttgggtgtggagaattctttttgttttttcctttttttgagacagagtttcactcttgttgcccaggctggagtgcaatggcacgatctcagctcaccgcaaccttcacctcctgagtttaagtgattctccggcctcagcctcccgactagctgggattacaggcatgggccactacgcctggcaaattttgtatttttagtagagacagggtttctccatgttggtcaggctggtcttgaactctgacctcaggtgatccgcccgcctcggcctcccaaagtgctgggattacaacgtgagccactttgcctggctgagaattctttttttgttgttgtctttttgagatggagttttgctgtgtccccagcctggagtgcaatggtgtaatctcagctcactgcaacctctccctcccgggttcaagcaattctcctgcctcagcctcccaagtagctggaattacaggcgcccagcaccacgccyggctaatttttgtatttttagtagagacgggatttcatcatgttggccaggctggtcttgatctcctgaccttgtgatctgcccgcctcggcctcccaaagtgctgggattacaggcgtgagccactgcccccagccgagaatttctctttgcgtccttcctactttggggacttcgaatggtgggaaagagttatcaaggccaaaataaggaattcaaatgaaaacaaaacaaaatcaaagaagaaaaaacagaagagcactgggcaggctaggcacgtggctcatgcctataatcccagtgatttagaaggccgaagtagaaggatcgcttggaggccaggagttggacaccagcctgggcaacatagcaagaccccatatctacaaaaaataaaaaacctaaccaagcgtgctggcatactagtagtcccagctactcaggaggctgaggtgggaggatcacctgagcctgggaggtccaggctgtagtgagccgtgatgacaccactgcactccagcctgggtgacagagaaagaccctgtctctaaaaaataaaaactggccaagtagctttgggattagccttgggttccagtcccagcaaggcctttaatagcttgggacatgacttctgcatttactttgcaatcaggtgagacctcctctgatggggaaaatgacacggtgagtgacaaaggatgttctcctatcattgtgtcagggcaaggaagcctctgggtaaatgatcaaatgatcagctttgcttctgatttggagggtgggtgagcagatgctgaccttcccaggtgagggaagtccccgaacattcccagcagcttctggaaaccccagggaaacctctttgaaggtcttttctgcatctctgcctgataggtctttttttttttttttttttttttytttttttgacacacagtcttgctctgtcgcccaggctggatcactgcaacctccatctcccgggttcaagcagttctcctgcctcatcctctccagtagctgggattacaggcacctggcaccacgcctggctaatttttgtatttttagtagagacagggtttcgccaagttggccaggctggtctcgaactctagacctctggtgatccacccgcctcagcctcccgaagtgctgggattacaggcttgagccaccacgcgcggctctgcctgatagctgagagcatagaactccaggtttgagacctggctctgccacatttctccctctatgactgtgggtgccccactttgccttagtttttacctctgtgaaatggagcagatggctggcacaggtagcaaaggagtaaaagttatgtgggagggtggtacctgagagagactctagcttggtcttgccccacccctggtgtaaacataaagaagcctccctggatggctcaatcttctccaaaaaggttagaggtgtaattcctagaggaggcgaccactagctgggctttgaaggatgtgtaggagttcataaggacaggcattctgggcaggaggaacagcctgggcaaaagttgggagcagggagaaatcttgatggaggcaggaggaggaggaggtaggttggtgtrggccaggygcagtggctcacacctgtaatcccagtgctttgggaggccaaagcaagaggattgtttgagcccaggagttcgagaccagcctgggcaacatagcgagaccctgtctctaagaaaaaataaaaaaattagggtacagtggcatatgcttgtattctcaactactctggaggctcaagtgggaggatcayttgaacccaggaatttttttgtttttgtttttgtttttttgagatggagtctcactctgtggcccaggctggagtgcagtggtgccatcttggctcactgcagcctcctccacctcctgggttcaaccgattctgctgcctgagcctcccgagttgctgggattaaggtgcccaccatcatgcccagctaatttttttgtatttttagtagagatagggtttaccatgttagccaggctggtcttgaacgcctgaccgcaagagatcctcctgcctcagtttcccaaagtgctgggattataggtgtgagccactgagcctggtcaagcccaggaatttgaggttacagtcagctatgattgcaccactgcattccagcccaggtgacagagagagacactgcccctaaaaaaaaaaaaaaattgattgatgggaggaagggtgaggttggcagagccttgaatgccaggtggaggagctgggactttccttcttggggtgatagggagtcatggagggtttstgagcaggccagggattagatagctgaaggctggatttactggaagccaawgagcagttggctatggtccttgtccacgcggcccatgttgtgggcagtgaccgtattcaagaagggaaggacagacaagtatttgaatacttcagtgaccaggatttggtaaaggactgcaggtcagggtcaagaagaggtgagagcaggacagacttcctccccgctgcaccaggcagctgagctgggtttcctctaggggctgaggtttgagggtacctcaagttctgcaagagtctataggaggtggtaagagagaagagctggaggtcagagttttcttgactatatatatatatatttttttgtttttgtttttaacagcttaacagctttctgttttatttttagagacagggtctcagggtctcactttgtcacccaggctggagtgcagtggtacaatcgtagctgactgcagcctcaaactcccaggctcaagaaatcctcctcccacccttagcctcctgagtagcagggactacaggtgtgagccagcaggaagcccagctggttttttttttttctttggtgttttttgtttgtttgtttgagaccggagtttcgctcttattgcccaggctgaagtgcaatggcaggatcttagctcaccacaacctccgacccccaggatcaagctattctcttgcctcagccacctgagtagctgggattacaggcatgcgacaccacacaaggctaattttgtatttttagtaaagacagggtttctccatgttggtcaggctggtctcgaactcccaacctcagatgatccacctgcctcggcctcccaaagtgctgagattacaggcatgagccaccgtgcccggcctttttttttttttttttttttgagacagagtctcactctgtcgcccaggcaggagtgcagtggtkcgatctgggctcactgcaagctccgcctcccgggttcactccatcctcctgccttagcctcctgagtagctgggactacaggcgcccaccaccacgcctggctaattttttgtatttttagtagagacggggtttcaccgtgttagccaggatggtctygatctcctgacctcgtgatccgcccgccttggcctcccaaagtgctgggattacaggcgtgagccaccatgtctggcctggccaggctggtcttgaactcctgacttccggtgatccatctgttctggcctcccaaagtgctgggattacaggcataagccaccacgccatgccgaagcccagcttgtttttaatttttttttttttttttggagaaatgaggtcttgcaatgttgcccaagctagccttgaactcctggcctcaaatgaccccgccttggcatcccaaagtactgggattacagatgtgagccaccatgccccagccttgctttcttgagatacgatttagaataccataagattcatcccttttaagcacataattcaatgacttctgtacaaacaaccatgactacaatctaattttaaaatatttcaatcactctaaamaagaaacctcctgcttatgtacagcgactctgtctacctcttaagtgaattctcctacctttaatagccctattttacagttcaggaaactgaggttcagagagacaaagtcacttacccacagcaaagaagcaaggctgggtatcaaatgcaggacccccccggtcctgatgcttttttttttttttttttttcctctgagagagactctcactctgtcactcagtctagagtacagtggcgcgatctcagttcactgcaatctctgcctcctgggctgaagtaatcctttcctcacaagtaaacctcagcctctcaagtagctgggactacaggcacacaacaccacgcctggctaatttttgtatttttaggtagagacggggtttcactatrttggccaggctggtcttsaactcctgacctcaggtgatccgcctgcctcggccccccaaagtgttgggattacaggcgtgagccaccacacgcagcctttttgttattagactctgtcattactgactttttttttttttttaatagaaacagggtctttctttcccaggstaaagtacagtggcatgatcacagttcactatagccttaaactcctgggctcaagtgatcctcctgcctcagcctcccaagtagcagggactacaggtgtgcaccaccacacccagttaaccattcattcattcattcattcatttattttgagatggagtctcgctctgtcacctaggctggagtgcagtggcacgatctcagctcactgcaacctccacctcccaggttcaagagattctcctgcctcagcctcccgagtagctgagactacaggcgtgcaccaccatgccagactaatttttgtatttttaatagagacggggtttcactctgttggtcaggcttatctcgaactcctgacttcgtggatccaccctccttggcctcccaaagtgctgggattaaaggcgtgagccaccgcgccctgccaacctttttttratttttcttagagatgggggtctccctatgttgcccaggcttgtcttgaactcctggcctcaagtgaccctcttgccttggcctcacaaagtgctaggattacagcctgagccatcacacctggccaacaggtttttttttttkttttgttttgttttttaaagaatgtctaggccaggctcatttactttcacctgtaatcccagcactttgggaggccggggtgggcagatcacttgaggtcaggaattcgagaccagcctgggcaacatgctgaaaccccgtttctactaaaaatacaaaaattagctgggtgtggtgacacgtgcctgtaatcccagctactcaggaggttgaggcaggagaattgcttgaacccaggaggcagaggttgcagtgagccaagatcatgccatcaccctccagcctgggcgacagaaggagactcagtctaaaaacttaattaattaattaattaaaaataaaaatacaaaaattaacctggtgtggtggtgtgtgcctgtaatctaagctactcaggaggctgaggcaggagaatcccctgaatcccagaggcagaggttgcagtgagccaagatcgagccactgtttgcccagtctagtgcactgggctgctgaatttatttgaccagacacctagcaatagactttgaagttcttttccacttttcactctaagatgctgctgtcatgaataaggaatattttgatccccttcacaaacactcggggccctcttaccagttttcactgaagatcttgacattcctatctgcttaggtgtctgggcgtgtttgggggagatactgaagaggtagggctcccaggcaggtgcagttcgtctgttaggcaggcagcaaggtccacttcaccagacacccccacctctgttttcctgcagggactccagaacgggtggaactggcacccctcccctcttggcagccagtgggcaagaaccttaccctacgctgccaggtggagggtggggcaccccgggccaacctcaccgtggtgctgctccgtggggagaasgagctgaaacgggagccagctgtgggggagcccgctgaggtcacgaccacggtgctggtgaggagagatcaccatggagccaatttctcgtgccgcactgaactggacctgcgsscccaagggctggagctgtttgagaacacctcggccccctaccagctccagacctttggtgaggattgaagaagccagcagggagaaggtgggggtggggtatcctgcaatgyggtgcctgtggccacaggatcttttgagatgggtgtggccccggctaaggggtgcatgtgttctaggcgtatgtgacctaggctgctgagtggccctggaagaggatctcgcaggagggggaatgaaatgccccagagaagggcttcgggacgtccatccctgtctgctcacacctttcttctctccctagtcctgccagcgactcccccacaacttgtcagcccccgggtcctagaggtggacacgcaggggacmgtggtctgttccctggacrgkctgttcccagtctcggaggcccaggtccacctggcactgggggaccagaggttgaaccccacagtcacctatggcaacgactccttctcggccaaggcctcagtcagtgtgaccgcagaggaygagggcacccagcggctgacgtgtgcagtaatactggggaaccagagccaggagacactgcagacagtgaccatctacagtaagaaggggcaggggcggagtggggcttcttgrgggtgtgacctgaacccggggcggggctcactgtgtgcctattccaggctttccggcgcccaacrtgattctgacgaagccagaggtctcagaagggaccgaggtgacagtgaagtgtgaggcccaccctagagccaaggtgacgctgaatggggttccagcccagccactgggccygagggcccagctcctgctgaaggccaccccagaggacaaygggcgcagcttctcctgctctgcaaccctggaggtggccggccagcttatacacaagaaycagacccgggagcttcgtgtcctgtgtgagtggggctgctggtcaatggcccctatcccccaaggcccaatctccctgaaggtcccataaggtcttgcctccaagtcctgcccccacccacctccatgtcatctcatcrtgtttttccagatggcccccractggacgagagggattgtccgggaaactggacgtggccagaaaattcccagcagactccaatgtgccaggcttgggggaacccattgcccgagctcaagtgtctaaaggatggcactttcccactgcccatcggggaatcagtgactgtcactcragatcttgagggcacctacctctgtcgggccaggagcactcaaggggaggtcacccgcraggtgaccgtgaatgtgctctgtgagtgagccggcgggcagarctgggtgggggcaggggccatggacctaatgcaatcctcaccgcctgttgtatcctccccacagccccccggtatgagattgtcatcatcactgtggtagcagccgcagtcataatgggcactgcaggcctcagcacgtacctctataaccgccagcggaagatcaagaaatacagactacaacaggcccaaaaagggacccccatgaaaccgaacacacaagccacgcctccctgaacctatcccrggacagggcctcttcctcggccttcccatattggtggcagtggtgccacactgaacagagtggaagacatatgccatgcagctacacctacyggccctgggacgccggaggacagggcattgtcctcagtcagatacaacagcatttggggccatggtacctgcacacctaaaacactaggccacgcatctgatctgtagtcacatgactaagccaagaggaaggagcaagactcaagacatgattgatggatgttaaagtctagcctgatgagaggggaagtggtgggggagacatagccccaccatgaggacatacaactgggaaatactgaaacttgctgcctattgggtatgctgaggycccacagacttacagaagaagtggccctccatagacatgtgtagcatcaaaacacaaaggcccacacttcctgacggatgccagcttgggcactgctgtctactgaccccaacccttgatgatatgtatttattcatttgttattttaccagctatttattgagtgtcttttatgtaggctaaatgaacataggtctctggcctcacggagctcccagtcctratcacattcaaggtcaccaggtacagttgtacaggttgtacactgcaggagagtgcctggcaaaaagatcaratggggctgggacttctcattggccaacctgcctttccccagaaggagtgatttttctaycggcacaaaagcactatatggactggtaatggttacaggttcagagattacccagtgaggccttattcctcccttccccccaaaactgacacctttgttagccacctccccacccacatacatttctgccagtgttcacaatgacactcagcggtcatgtctggacatgagtgcccagggaatatgcccaagctatgccttgtcctcttgtcctgtttgcatttcactgggagcttgcactatgcagctccagtttcctgcagtgatcagggtcctgcaagcagtggggaagggggccaaggtattggaggactccctcccagctttggaagcctcatccgcktgtgtgtgtgtgtgtatgtgtagacaagctctckctctgtcacccaggctggagtgcagtggtgcaatcatggttcactgcagtcttgaccttttgrgctcaagtgatcctcccacctcagcctcctgagtagctgggaccataggctcacaacaccacacctggcaaatttgattttttttttttttyyagagayggggtctygcaacattgcccagacttcctttgtgttagttaataaagctttctcaactgcctcagccttgtgtgagttgaggggaggtgtcacatccagctggagtcctttctaagcagccacagcctgatcctcccacttcctcccccaagaaaacattgtgggttgatggycataccctgaggttctggtccaaatcggactttctatgaccttctgggtctctagtgaaaactaaagactcctctccagaaaaaaacatttggtttctaatgaggcctggaatcttattcttgacctggggagcggaatccctttttgcagtactcccgggccctctgttggggcctccccttcctctccagggtggagtcgaggaggcggggctgcgggcctccttatctctagagccggccctggctctctggcgcggggccccttagtccgggctttttgccatggggtctctgttccctctgtcgctgctgttttttttggcggccgcctacccgggagttgggagcgcgctgggacgccggactaagcgggcgcaaagccccaagggtagccctctcgcgccctccgggacctcagtgcccttctgggtgcgcatgagcccggagttcgtggctgtgcagccggggaagtcagtgcagctcaattgcagcaacagctgtccccagccgcagaattccagcctccgcaccccgctgcggcaaggcaagacgctcagagggccgggttgggtgtcttaccrgctgctcgacgtgagggcctggagctccctcgcgcactgcctcgtgacctgcgcaggaaaaacacgctgggccacctccaggatcaccgcctacagtgagggacaggggctcggtcccggctggggtgaggggagggggctggaagaggtgggggaagggtagttgacagtcgctctatagggagcgcccgcggacctcactcagaggctcccccttgccttagaaccgccccacagcgtgattttggagcctccggtcttaaagggcaggaaatacactttgcgctgccacgtgacgcaggtgttcccggtgggctacttggtggtgaccctgaggcatggaagccgggtcatctattccgaaagcctggagcgcttcaccggcctggatctggccaacgtgaccttgacctacgagtttgctgctggaccccgcgacttctggcagcccgtgatctgccacgcgcgcctcaatctcgacggcctggtggtccgcaacagctcggcacccattacactgatgctcggtgaggcacccctgtaaccctggggactaggaggaagggggcagagagagttatgaccccgagagggcgcacagaccaagcgtgagctccacgcgggtcgacagacctccctgtgttccgttcctaattctcgccttctgctcccagcttggagccccgcgcccacagctttggcctccggttccatcgctgcccttgtagggatcctcctcactgtgggcgctgcgtacctatgcaagtgcctagctatgaagtcccaggcgtaaagggggatgttctatgccggctgagcgagaaaaagaggaatatgaaacaatctggggaaatggccatacatggtggctgacgcctgtaatcccagcactttgggaggccgaggcaggagartcgcttgagcccaggagttcgagaccagcctggacaacatagtgagaccccgtctatgcaaaaaatacacaaattagcctggtgtggtggcccgcacctgtggtcccagctacccgggaggctgagttgggaggatcctttgagccctgaaagtcgaggttgcagtgagccttgatcgtgccactgcactccagcctgggggacagagcacgaccctgtctccaaaaataaaataaaaataaaaataaatattggcgggggaaccctctggaatcaataaaggcttccttaaccagcctctgtcctgtgacctaagggtccgcattactgcccttcttcggaggaactggtttgtttttgttgttgttgttgtttttgcgatcactttctccaagttccttgtctccctragggcacctgaggtttcctcactcagggcccacctggggtcccgaagccccagactctgtgtakccccagcgggtgtcacagaaacctctccttctgctggccttatcgagtgggatcagcgcgggccggggagagccacgggcaggggcggggtggggttcatggtatggctttcctgattggcgccgccgccaccacgcggcagctctgattggatgttaagtttcctatcccagccscaccttcagaccctgtgctttcctggaggccaaacaactgtggagcgagaactcatctccaaaataacttaccacgctggagtgagaccacgaatggtggggaggggagggtcccacggacatattgagggacgtggatacgcagaagaggtatccatgtggtggcagccgggaaggggtgatcagatggtccacagggaatatcacaaactcgaattctgacgatgttctggtagtcacccagccagatgagcgcatggagttggsggtggggggtgtcaaagcttggggcccggaagcggagtcaaaagcatcaccctcggtcccttgttctcgcgtggatgtcagggccyccacccaccgagcagaaggcggactcaggggcgctccagggtggctcgagctcacacacgctgagtagacacgtgcccgctgcmccctgggtaaatacagacccggagccgagcggattctaatttagacgcccgcgaacgctgcgcgcacgcacacgtgtcctcggctcgctggcactttcgtcccgccccctccgtcgcgtgcsggagctgacccggaggggtgcttagaggtatggctccgcggggtcaaaaggagaaggatcagtgagagaggcatccccacaccctcccctagaactgtcctttccccatccagtgcctcccaaatctctcttagtccccaaatgtatccccgccctaaggggcgctggtgggaggagctaaatgtgggggcggrgctcggagtccagcttattatcatggcatctcagccagggctggggtaggggtttgggaagggcaacccagcatcccccgatcccagagtcgcggccggggatgacgcgagagagcgtggtcgcccccagaaggccctgggccatcatgccggcctccacgtagaccccaggggtcgctcactcctgccagctcgccttcaccaaggccaggagcttagcgcacgctcgcctcccgcccccccgccgcctctgccgccgccccctccttggaaaccaagttaccaacgttaaaccaatccccaagcgcaactctgyctcccccacaccccacccgccgcgccgcgcggagccgtcctctagcccagctcctcggctcgcgctctcctcgcctcctgtgctttccccgccgcggcgatgccagggccttcgccagggctgcgccgggcgctactcggcctctgggctgctctgggcctggggctcttcggcctctcaggtaagagcyccgctctggttcggggtggacagggcgggggcggagtccctggacctgagaaacggcctcctgtccctcccagctctgccctcgcctcgctsccacgcctctgcccccacctcgagcctgagtcttctccccttccccctcctccccaacacacacccgagccccagcttcctgactcctcgatagcccctacccgcttcgagatcctaggtgttcttccgcacccaacccttcgccctggagacccagtgtctctcctgtccgctccccgggtacctccttacgctstgctgtgcaccatggtccacgractggcatcttccccactcgcggtccgcgaagactccatctctccaactaccctgactcagaggcgctgttcccgctccacccagarccctggcaaccgggtccctcagctgttcccgcggttccttccatgagcccagccttgcgtcccggckccgtgttcttcaccgggtgtagggtccttcctgatccttgacccagcctcgtctctcctttgcccttgccgcaaacgcactctcctcgtatcccggcattctgccaggaccctgagaactggttcatcccccatcccccatcccgggtccccttctctcagccttgctgtgttcatccaagaacccacctttcctctcctctacgccctccccccatgctttcccgccgctccatcggcgctttggagaccatgsctctctgctaccacgtcccagagacaccctcgaggtttagactctgggagtgcgcctttaaaccggaggcctgggcasgacgcgggacgcctgggttctttccctggctgsagcctctcctcctcctccccgccctctgagaacccttgactcgacataggggcgctaagatgtcagggagttggctccccaggctcagcccgcgtttccctgggcagcggtctcgcaggagcccttctgggcggacctgcagcctcgcgtggcgttcgtggagcgcgggggctcgctgtggctgaattgcagcaccaactgccctyggccggagcgcggtggcctggagacctcgctgcgccgaaacgggacccagaggggtttgcgttggttggcgcggcagctggtggacattcgcgagccggagactcagcccgtctgcttcttccgctgcgcgcggcgcacactacaggcgcgtgggctcattcgcactttccgtgagttctgggtggccacgcgcgtactccactactctccctccctcccaggccccgccccctgggtcccagggtcctccccttcaggccccaccttctgttccaagtcccggygttcaaagagctgcggactcttcccccttgcagagcgaccagatcgcgtagagctgatgccgctgcctccctggcagccggtgggcgagaacttcaccctgagctgtagggtccccggcgccgggccccgtgcgagcctcacgctgaccctgctgcggggcgcccaggagctgatccgccgcagcttcgccggtgaaccaccccgagcgcggggcgcggtgctcacagccacggtactggctcggagggaggaccatggagccaatttctcgtgtcgcgccgagctggacctgcggccgcacggactgggactgtttgaaaacagctcggcccccagagagctccgaaccttctgtgagtgggtgtggggaggagatggggacccagtggggtcggtcggtgtttaggaggtttagaggtagatacatctgaatgctgaccccgacttcaaccctcgccggctgagctgtttccccctccgtgccttgaggrkgataatacgataagatagtgcatgtcaagtgcttaggacatattgagcgctcggagttagttcaaacttggttcttcgacccctagccctgtctccggatgccccgcgcctcgctgctccccggctcttggaagttggctcggaaaggcccgtgagctgcactctggacggactgtttccagcctcagaggccagggtctacctcgcactgggggaccagaatctgagtcctgatgtcaccctcgaaggggacgcattcgtggccactgccacagccacagctagcgcagagcaggagggtgccaggcagctgrtctgcaacgtcaccctggggggcgaaaaccgggagacccgggagaacgtgaccatctacagtaaggaaggaggcggggtctccgcggctccgaggtgggaccagaggaatgcgaaggcggggcgaagagtgggcgggacctcagtaccggaacaggcgtgkcccgagggggcggggcaggtgggggcggagacgtaatcgctggggaggaggagcctgtacagcctgagaggcggggcgccgtaccctagttcgttctcagcaccccgaggattcgggcagataaggggcgggccttgaccggagggaggggtatggtcagtatactacgaccaaatgctccgcccccaggct

SEQ ID NO: 10005 - DNA, 13557 bp, Homo sapiens
cgggttcactccatcctcctgccttagcctcctgagtagctgggactacaggcgcccaccaccacgcctggctaattttttgtatttttagtagagacggggtttcaccgtgttagccaggatggtctygatctcctgacctcgtgatccgcccgccttggcctcccaaagtgctgggattacaggcgtgagccaccatgtctggcctggccaggctggtcttgaactcctgacttccggtgatccatctgttctggcctcccaaagtgctgggattacaggcataagccaccacgccatgccgaagcccagcttgtttttaatttttttttttttttttggagaaatgaggtcttgcaatgttgcccaagctagccttgaactcctggcctcaaatgaccccgccttggcatcccaaagtactgggattacagatgtgagccaccatgccccagccttgctttcttgagatacgatttagaataccataagattcatcccttttaagcacataattcaatgacttctgtacaaacaaccatgactacaatctaattttaaaatatttcaatcactctaaamaagaaacctcctgcttatgtacagcgactctgtctacctcttaagtgaattctcctacctttaatagccctattttacagttcaggaaactgaggttcagagagacaaagtcacttacccacagcaaagaagcaaggctgggtatcaaatgcaggacccccccggtcctgatgcttttttttttttttttttttcctctgagagagactctcactctgtcactcagtctagagtacagtggcgcgatctcagttcactgcaatctctgcctcctgggctgaagtaatcctttcctcacaagtaaacctcagcctctcaagtagctgggactacaggcacacaacaccacgcctggctaatttttgtatttttaggtagagacggggtttcactatrttggccaggctggtcttsaactcctgacctcaggtgatccgcctgcctcggccccccaaagtgttgggattacaggcgtgagccaccacacgcagcctttttgttattagactctgtcattactgactttttttttttttttaatagaaacagggtctttctttcccaggstaaagtacagtggcatgatcacagttcactatagccttaaactcctgggctcaagtgatcctcctgcctcagcctcccaagtagcagggactacaggtgtgcaccaccacacccagttaaccattcattcattcattcattcatttattttgagatggagtctcgctctgtcacctaggctggagtgcagtggcacgatctcagctcactgcaacctccacctcccaggttcaagagattctcctgcctcagcctcccgagtagctgagactacaggcgtgcaccaccatgccagactaatttttgtatttttaatagagacggggtttcactctgttggtcaggcttatctcgaactcctgacttcgtggatccaccctccttggcctcccaaagtgctgggattaaaggcgtgagccaccgcgccctgccaacctttttttratttttcttagagatgggggtctccctatgttgcccaggcttgtcttgaactcctggcctcaagtgaccctcttgccttggcctcacaaagtgctaggattacagcctgagccatcacacctggccaacaggtttttttttttkttttgttttgttttttaaagaatgtctaggccaggctcatttactttcacctgtaatcccagcactttgggaggccggggtgggcagatcacttgaggtcaggaattcgagaccagcctgggcaacatgctgaaaccccgtttctactaaaaatacaaaaattagctgggtgtggtgacacgtgcctgtaatcccagctactcaggaggttgaggcaggagaattgcttgaacccaggaggcagaggttgcagtgagccaagatcatgccatcaccctccagcctgggcgacagaaggagactcagtctaaaaacttaattaattaattaattaaaaataaaaatacaaaaattaacctggtgtggtggtgtgtgcctgtaatctaagctactcaggaggctgaggcaggagaatcccctgaatcccagaggcagaggttgcagtgagccaagatcgagccactgtttgcccagtctagtgcactgggctgctgaatttatttgaccagacacctagcaatagactttgaagttcttttccacttttcactctaagatgctgctgtcatgaataaggaatattttgatccccttcacaaacactcggggccctcttaccagttttcactgaagatcttgacattcctatctgcttaggtgtctgggcgtgtttgggggagatactgaagaggtagggctcccaggcaggtgcagttcgtctgttaggcaggcagcaaggtccacttcaccagacacccccacctctgttttcctgcagggactccagaacgggtggaactggcacccctcccctcttggcagccagtgggcaagaaccttaccctacgctgccaggtggagggtggggcaccccgggccaacctcaccgtggtgctgctccgtggggagaasgagctgaaacgggagccagctgtgggggagcccgctgaggtcacgaccacggtgctggtgaggagagatcaccatggagccaatttctcgtgccgcactgaactggacctgcgsscccaagggctggagctgtttgagaacacctcggccccctaccagctccagacctttggtgaggattgaagaagccagcagggagaaggtgggggtggggtatcctgcaatgyggtgcctgtggccacaggatcttttgagatgggtgtggccccggctaaggggtgcatgtgttctaggcgtatgtgacctaggctgctgagtggccctggaagaggatctcgcaggagggggaatgaaatgccccagagaagggcttcgggacgtccatccctgtctgctcacacctttcttctctccctagtcctgccagcgactcccccacaacttgtcagcccccgggtcctagaggtggacacgcaggggacmgtggtctgttccctggacrgkctgttcccagtctcggaggcccaggtccacctggcactgggggaccagaggttgaaccccacagtcacctatggcaacgactccttctcggccaaggcctcagtcagtgtgaccgcagaggaygagggcacccagcggctgacgtgtgcagtaatactggggaaccagagccaggagacactgcagacagtgaccatctacagtaagaaggggcaggggcggagtggggcttcttgrgggtgtgacctgaacccggggcggggctcactgtgtgcctattccaggctttccggcgcccaacrtgattctgacgaagccagaggtctcagaagggaccgaggtgacagtgaagtgtgaggcccaccctagagccaaggtgacgctgaatggggttccagcccagccactgggccygagggcccagctcctgctgaaggccaccccagaggacaaygggcgcagcttctcctgctctgcaaccctggaggtggccggccagcttatacacaagaaycagacccgggagcttcgtgtcctgtgtgagtggggctgctggtcaatggcccctatcccccaaggcccaatctccctgaaggtcccataaggtcttgcctccaagtcctgcccccacccacctccatgtcatctcatcrtgtttttccagatggcccccractggacgagagggattgtccgggaaactggacgtggccagaaaattcccagcagactccaatgtgccaggcttgggggaacccattgcccgagctcaagtgtctaaaggatggcactttcccactgcccatcggggaatcagtgactgtcactcragatcttgagggcacctacctctgtcgggccaggagcactcaaggggaggtcacccgcraggtgaccgtgaatgtgctctgtgagtgagccggcgggcagarctgggtgggggcaggggccatggacctaatgcaatcctcaccgcctgttgtatcctccccacagccccccggtatgagattgtcatcatcactgtggtagcagccgcagtcataatgggcactgcaggcctcagcacgtacctctataaccgccagcggaagatcaagaaatacagactacaacaggcccaaaaagggacccccatgaaaccgaacacacaagccacgcctccctgaacctatcccrggacagggcctcttcctcggccttcccatattggtggcagtggtgccacactgaacagagtggaagacatatgccatgcagctacacctacyggccctgggacgccggaggacagggcattgtcctcagtcagatacaacagcatttggggccatggtacctgcacacctaaaacactaggccacgcatctgatctgtagtcacatgactaagccaagaggaaggagcaagactcaagacatgattgatggatgttaaagtctagcctgatgagaggggaagtggtgggggagacatagccccaccatgaggacatacaactgggaaatactgaaacttgctgcctattgggtatgctgaggycccacagacttacagaagaagtggccctccatagacatgtgtagcatcaaaacacaaaggcccacacttcctgacggatgccagcttgggcactgctgtctactgaccccaacccttgatgatatgtatttattcatttgttattttaccagctatttattgagtgtcttttatgtaggctaaatgaacataggtctctggcctcacggagctcccagtcctratcacattcaaggtcaccaggtacagttgtacaggttgtacactgcaggagagtgcctggcaaaaagatcaratggggctgggacttctcattggccaacctgcctttccccagaaggagtgatttttctaycggcacaaaagcactatatggactggtaatggttacaggttcagagattacccagtgaggccttattcctcccttccccccaaaactgacacctttgttagccacctccccacccacatacatttctgccagtgttcacaatgacactcagcggtcatgtctggacatgagtgcccagggaatatgcccaagctatgccttgtcctcttgtcctgtttgcatttcactgggagcttgcactatgcagctccagtttcctgcagtgatcagggtcctgcaagcagtggggaagggggccaaggtattggaggactccctcccagctttggaagcctcatccgcktgtgtgtgtgtgtgtatgtgtagacaagctctckctctgtcacccaggctggagtgcagtggtgcaatcatggttcactgcagtcttgaccttttgrgctcaagtgatcctcccacctcagcctcctgagtagctgggaccataggctcacaacaccacacctggcaaatttgattttttttttttttyyagagayggggtctygcaacattgcccagacttcctttgtgttagttaataaagctttctcaactgcctcagccttgtgtgagttgaggggaggtgtcacatccagctggagtcctttctaagcagccacagcctgatcctcccacttcctcccccaagaaaacattgtgggttgatggycataccctgaggttctggtccaaatcggactttctatgaccttctgggtctctagtgaaaactaaagactcctctccagaaaaaaacatttggtttctaatgaggcctggaatcttattcttgacctggggagcggaatccctttttgcagtactcccgggccctctgttggggcctccccttcctctccagggtggagtcgaggaggcggggctgcgggcctccttatctctagagccggccctggctctctggcgcggggccccttagtccgggctttttgccatggggtctctgttccctctgtcgctgctgttttttttggcggccgcctacccgggagttgggagcgcgctgggacgccggactaagcgggcgcaaagccccaagggtagccctctcgcgccctccgggacctcagtgcccttctgggtgcgcatgagcccggagttcgtggctgtgcagccggggaagtcagtgcagctcaattgcagcaacagctgtccccagccgcagaattccagcctccgcaccccgctgcggcaaggcaagacgctcagagggccgggttgggtgtcttaccrgctgctcgacgtgagggcctggagctccctcgcgcactgcctcgtgacctgcgcaggaaaaacacgctgggccacctccaggatcaccgcctacagtgagggacaggggctcggtcccggctggggtgaggggagggggctggaagaggtgggggaagggtagttgacagtcgctctatagggagcgcccgcggacctcactcagaggctcccccttgccttagaaccgccccacagcgtgattttggagcctccggtcttaaagggcaggaaatacactttgcgctgccacgtgacgcaggtgttcccggtgggctacttggtggtgaccctgaggcatggaagccgggtcatctattccgaaagcctggagcgcttcaccggcctggatctggccaacgtgaccttgacctacgagtttgctgctggaccccgcgacttctggcagcccgtgatctgccacgcgcgcctcaatctcgacggcctggtggtccgcaacagctcggcacccattacactgatgctcggtgaggcacccctgtaaccctggggactaggaggaagggggcagagagagttatgaccccgagagggcgcacagaccaagcgtgagctccacgcgggtcgacagacctccctgtgttccgttcctaattctcgccttctgctcccagcttggagccccgcgcccacagctttggcctccggttccatcgctgcccttgtagggatcctcctcactgtgggcgctgcgtacctatgcaagtgcctagctatgaagtcccaggcgtaaagggggatgttctatgccggctgagcgagaaaaagaggaatatgaaacaatctggggaaatggccatacatggtggctgacgcctgtaatcccagcactttgggaggccgaggcaggagartcgcttgagcccaggagttcgagaccagcctggacaacatagtgagaccccgtctatgcaaaaaatacacaaattagcctggtgtggtggcccgcacctgtggtcccagctacccgggaggctgagttgggaggatcctttgagccctgaaagtcgaggttgcagtgagccttgatcgtgccactgcactccagcctgggggacagagcacgaccctgtctccaaaaataaaataaaaataaaaataaatattggcgggggaaccctctggaatcaataaaggcttccttaaccagcctctgtcctgtgacctaagggtccgcattactgcccttcttcggaggaactggtttgtttttgttgttgttgttgtttttgcgatcactttctccaagttccttgtctccctragggcacctgaggtttcctcactcagggcccacctggggtcccgaagccccagactctgtgtakccccagcgggtgtcacagaaacctctccttctgctggccttatcgagtgggatcagcgcgggccggggagagccacgggcaggggcggggtggggttcatggtatggctttcctgattggcgccgccgccaccacgcggcagctctgattggatgttaagtttcctatcccagccscaccttcagaccctgtgctttcctggaggccaaacaactgtggagcgagaactcatctccaaaataacttaccacgctggagtgagaccacgaatggtggggaggggagggtcccacggacatattgagggacgtggatacgcagaagaggtatccatgtggtggcagccgggaaggggtgatcagatggtccacagggaatatcacaaactcgaattctgacgatgttctggtagtcacccagccagatgagcgcatggagttggsggtggggggtgtcaaagcttggggcccggaagcggagtcaaaagcatcaccctcggtcccttgttctcgcgtggatgtcagggccyccacccaccgagcagaaggcggactcaggggcgctccagggtggctcgagctcacacacgctgagtagacacgtgcccgctgcmccctgggtaaatacagacccggagccgagcggattctaatttagacgcccgcgaacgctgcgcgcacgcacacgtgtcctcggctcgctggcactttcgtcccgccccctccgtcgcgtgcsggagctgacccggaggggtgcttagaggtatggctccgcggggtcaaaaggagaaggatcagtgagagaggcatccccacaccctcccctagaactgtcctttccccatccagtgcctcccaaatctctcttagtccccaaatgtatccccgccctaaggggcgctggtgggaggagctaaatgtgggggcggrgctcggagtccagcttattatcatggcatctcagccagggctggggtaggggtttgggaagggcaacccagcatcccccgatcccagagtcgcggccggggatgacgcgagagagcgtggtcgcccccagaaggccctgggccatcatgccggcctccacgtagaccccaggggtcgctcactcctgccagctcgccttcaccaaggccaggagcttagcgcacgctcgcctcccgcccccccgccgcctctgccgccgccccctccttggaaaccaagttaccaacgttaaaccaatccccaagcgcaactctgyctcccccacaccccacccgccgcgccgcgcggagccgtcctctagcccagctcctcggctcgcgctctcctcgcctcctgtgctttccccgccgcggcgatgccagggccttcgccagggctgcgccgggcgctactcggcctctgggctgctctgggcctggggctcttcggcctctcaggtaagagcyccgctctggttcggggtggacagggcgggggcggagtccctggacctgagaaacggcctcctgtccctcccagctctgccctcgcctcgctsccacgcctctgcccccacctcgagcctgagtcttctccccttccccctcctccccaacacacacccgagccccagcttcctgactcctcgatagcccctacccgcttcgagatcctaggtgttcttccgcacccaacccttcgccctggagacccagtgtctctcctgtccgctccccgggtacctccttacgctstgctgtgcaccatggtccacgractggcatcttccccactcgcggtccgcgaagactccatctctccaactaccctgactcagaggcgctgttcccgctccacccagarccctggcaaccgggtccctcagctgttcccgcggttccttccatgagcccagccttgcgtcccggckccgtgttcttcaccgggtgtagggtccttcctgatccttgacccagcctcgtctctcctttgcccttgccgcaaacgcactctcctcgtatcccggcattctgccaggaccctgagaactggttcatcccccatcccccatcccgggtccccttctctcagccttgctgtgttcatccaagaacccacctttcctctcctctacgccctccccccatgctttcccgccgctccatcggcgctttggagaccatgsctctctgctaccacgtcccagagacaccctcgaggtttagactctgggagtgcgcctttaaaccggaggcctgggcasgacgcgggacgcctgggttctttccctggctgsagcctctcctcctcctccccgccctctgagaacccttgactcgacataggggcgctaagatgtcagggagttggctccccaggctcagcccgcgtttccctgggcagcggtctcgcaggagcccttctgggcggacctgcagcctcgcgtggcgttcgtggagcgcgggggctcgctgtggctgaattgcagcaccaactgccctyggccggagcgcggtggcctggagacctcgctgcgccgaaacgggacccagaggggtttgcgttggttggcgcggcagctggtggacattcgcgagccggagactcagcccgtctgcttcttccgctgcgcgcggcgcacactacaggcgcgtgggctcattcgcactttccgtgagttctgggtggccacgcgcgtactccactactctccctccctcccaggccccgccccctgggtcccagggtcctccccttcaggccccaccttctgttccaagtcccggygttcaaagagctgcggactcttcccccttgcagagcgaccagatcgcgtagagctgatgccgctgcctccctggcagccggtgggcgagaacttcaccctgagctgtagggtccccggcgccgggccccgtgcgagcctcacgctgaccctgctgcggggcgcccaggagctgatccgccgcagcttcgccggtgaaccaccccgagcgcggggcgcggtgctcacagccacggtactggctcggagggaggaccatggagccaatttctcgtgtcgcgccgagctggacctgcggccgcacggactgggactgtttgaaaacagctcggcccccagagagctccgaaccttctgtgagtgggtgtggggaggagatggggacccagtggggtcggtcggtgtttaggaggtttagaggtagatacatctgaatgctgaccccgacttcaaccctcgccggctgagctgtttccccctccgtgccttgaggrkgataatacgataagatagtgcatgtcaagtgcttaggacatattgagcgctcggagttagttcaaacttggttcttcgacccctagccctgtctccggatgccccgcgcctcgctgctccccggctcttggaagttggctcggaaaggcccgtgagctgcactctggacggactgtttccagcctcagaggccagggtctacctcgcactgggggaccagaatctgagtcctgatgtcaccctcgaaggggacgcattcgtggccactgccacagccacagctagcgcagagcaggagggtgccaggcagctgrtctgcaacgtcaccctggggggcgaaaaccgggagacccgggagaacgtgaccatctacagtaaggaaggaggcggggtctccgcggctccgaggtgggaccagaggaatgcgaaggcggggcgaagagtgggcgggacctcagtaccggaacaggcgtgkcccgagggggcggggcaggtgggggcggagacgtaatcgctggggaggaggagcctgtacagcctgagaggcggggcgccgtaccctagttcgttctcagcaccccgaggattcgggcagataaggggcgggccttgaccggagggaggggtatggtcagtatactacgaccaaatgctccgcccccaggcttcccggcaccactcctgaccctgagcgaacccagcgtctccgaggggcagatggtgacagtaacctgcgcagctgggrcccaagctctggtcacactggagggagttccagccgcggtcccggggcagcccgcccagcttcagctaaatgccaccgagaacgacgacagacgcagcttcttctgcgacgccaccctcgatgtggacggggagaccctgatcaagaacaggagcgcagagcttcgtgtcctatgtgagttggtgataacccctcgccccccaccttctggtgacttccaaggacccgcctgctccctcaccgtgtcgtggaggcggagccatttcttacgtctaagcctctgtaaccccacgccctgcccgcagacgctccccggctagacgattcggactgccccaggagttggacgtggcccgagggcccagagcagacgctgcgctgcgaggcccgcgggaacccagaaccctcagtgcactgtgcgcgctccgacggcggggccgtgctggctctgggcctgctgggtccagtcactcgggcgctctcaggcacttaccgctgcaaggcggccaatgatcaaggcgaggcggtcaaggacgtaacgctaacggtggagtgtgagtgggggtgcgcagrgtgcayttctatctggttcaaggtctggagggtggccagcctccagggaagagtaggagtagggtatgaggtgtccctttgggtgaggttttgggaaagggaagaggctggttagtggggttggagaaagatcttggaggatggaagggaccgggtgggcgtgcccctagcctagggcgtggtatttgggcggagtcgtggaaaggcgggcagtccagagtgtttaagtttttagrcgaaaaaggcgccactggtggctcaggaagctcccagacagagtgcatgsctcgactagcgtgacacctccttggatcggcgtccaagggttatgcagggacaacacttcgtggaagccttgccgcgccaaggagggtctagggacgtcagatttgcccccaaaccccaaagccaacaatacactccctcctccagacgcaccagcgctggacagcrtgggctgcccagaacgcattacttggctggagggaacagaagcctcgctgagctgtgtggcgcacggggtaccgccgcctgatgtgatctgcgtgcgctctggagaactcggggccgtcatcgargggctgttgcgtgtggcccgggagcatgcgggcacttaccgctgcgaagccaccaaccctcggggctctgcggccaaaaatgtggccgtcacrgtggaatgtgagtaggggcaccgcggagttaggcaggatctgtgggacaaccccggctggacttcctggcccccgtgtgagcccctgcaatcctgtttcccagatggccccaggtttgaggagccgagctgccccagcaattggacatgggtggaaggatctgggcgcctgttttcctgtgaggtcgatgggaagccacagccaagcgtgaagtgcgtgggctccgggggcrccactgagggggtgctgctgccgctggcacccccagaccctagtcccagagctcccagaatccctagagtcctggcacccggtatctacgtctgcaacgccaccaaccgccacggctccgtggccaaaacagtcgtcgtgagcgcggagtgtgagcgaggcccaggcgggtagggagcaggggtgccccacggtccaggcactccctgacatcccccatggctgytttgcagcgccaccggagatggatgaatctacctgcccaagtcaccagacgtggctggaaggggctgaggcttccgcgctggcctgcgccgcccggggtcgcccttccccaggagtgcgctgctctcg

SEQ ID NO: 10006 - DNA, 18849 bp, Homo sapiens
gccctggaagaggatctcgcaggagggggaatgaaatgccccagagaagggcttcgggacgtccatccctgtctgctcacacctttcttctctccctagtcctgccagcgactcccccacaacttgtcagcccccgggtcctagaggtggacacgcaggggacmgtggtctgttccctggacrgkctgttcccagtctcggaggcccaggtccacctggcactgggggaccagaggttgaaccccacagtcacctatggcaacgactccttctcggccaaggcctcagtcagtgtgaccgcagaggaygagggcacccagcggctgacgtgtgcagtaatactggggaaccagagccaggagacactgcagacagtgaccatctacagtaagaaggggcaggggcggagtggggcttcttgrgggtgtgacctgaacccggggcggggctcactgtgtgcctattccaggctttccggcgcccaacrtgattctgacgaagccagaggtctcagaagggaccgaggtgacagtgaagtgtgaggcccaccctagagccaaggtgacgctgaatggggttccagcccagccactgggccygagggcccagctcctgctgaaggccaccccagaggacaaygggcgcagcttctcctgctctgcaaccctggaggtggccggccagcttatacacaagaaycagacccgggagcttcgtgtcctgtgtgagtggggctgctggtcaatggcccctatcccccaaggcccaatctccctgaaggtcccataaggtcttgcctccaagtcctgcccccacccacctccatgtcatctcatcrtgtttttccagatggcccccractggacgagagggattgtccgggaaactggacgtggccagaaaattcccagcagactccaatgtgccaggcttgggggaacccattgcccgagctcaagtgtctaaaggatggcactttcccactgcccatcggggaatcagtgactgtcactcragatcttgagggcacctacctctgtcgggccaggagcactcaaggggaggtcacccgcraggtgaccgtgaatgtgctctgtgagtgagccggcgggcagarctgggtgggggcaggggccatggacctaatgcaatcctcaccgcctgttgtatcctccccacagccccccggtatgagattgtcatcatcactgtggtagcagccgcagtcataatgggcactgcaggcctcagcacgtacctctataaccgccagcggaagatcaagaaatacagactacaacaggcccaaaaagggacccccatgaaaccgaacacacaagccacgcctccctgaacctatcccrggacagggcctcttcctcggccttcccatattggtggcagtggtgccacactgaacagagtggaagacatatgccatgcagctacacctacyggccctgggacgccggaggacagggcattgtcctcagtcagatacaacagcatttggggccatggtacctgcacacctaaaacactaggccacgcatctgatctgtagtcacatgactaagccaagaggaaggagcaagactcaagacatgattgatggatgttaaagtctagcctgatgagaggggaagtggtgggggagacatagccccaccatgaggacatacaactgggaaatactgaaacttgctgcctattgggtatgctgaggycccacagacttacagaagaagtggccctccatagacatgtgtagcatcaaaacacaaaggcccacacttcctgacggatgccagcttgggcactgctgtctactgaccccaacccttgatgatatgtatttattcatttgttattttaccagctatttattgagtgtcttttatgtaggctaaatgaacataggtctctggcctcacggagctcccagtcctratcacattcaaggtcaccaggtacagttgtacaggttgtacactgcaggagagtgcctggcaaaaagatcaratggggctgggacttctcattggccaacctgcctttccccagaaggagtgatttttctaycggcacaaaagcactatatggactggtaatggttacaggttcagagattacccagtgaggccttattcctcccttccccccaaaactgacacctttgttagccacctccccacccacatacatttctgccagtgttcacaatgacactcagcggtcatgtctggacatgagtgcccagggaatatgcccaagctatgccttgtcctcttgtcctgtttgcatttcactgggagcttgcactatgcagctccagtttcctgcagtgatcagggtcctgcaagcagtggggaagggggccaaggtattggaggactccctcccagctttggaagcctcatccgcktgtgtgtgtgtgtgtatgtgtagacaagctctckctctgtcacccaggctggagtgcagtggtgcaatcatggttcactgcagtcttgaccttttgrgctcaagtgatcctcccacctcagcctcctgagtagctgggaccataggctcacaacaccacacctggcaaatttgattttttttttttttyyagagayggggtctygcaacattgcccagacttcctttgtgttagttaataaagctttctcaactgcctcagccttgtgtgagttgaggggaggtgtcacatccagctggagtcctttctaagcagccacagcctgatcctcccacttcctcccccaagaaaacattgtgggttgatggycataccctgaggttctggtccaaatcggactttctatgaccttctgggtctctagtgaaaactaaagactcctctccagaaaaaaacatttggtttctaatgaggcctggaatcttattcttgacctggggagcggaatccctttttgcagtactcccgggccctctgttggggcctccccttcctctccagggtggagtcgaggaggcggggctgcgggcctccttatctctagagccggccctggctctctggcgcggggccccttagtccgggctttttgccatggggtctctgttccctctgtcgctgctgttttttttggcggccgcctacccgggagttgggagcgcgctgggacgccggactaagcgggcgcaaagccccaagggtagccctctcgcgccctccgggacctcagtgcccttctgggtgcgcatgagcccggagttcgtggctgtgcagccggggaagtcagtgcagctcaattgcagcaacagctgtccccagccgcagaattccagcctccgcaccccgctgcggcaaggcaagacgctcagagggccgggttgggtgtcttaccrgctgctcgacgtgagggcctggagctccctcgcgcactgcctcgtgacctgcgcaggaaaaacacgctgggccacctccaggatcaccgcctacagtgagggacaggggctcggtcccggctggggtgaggggagggggctggaagaggtgggggaagggtagttgacagtcgctctatagggagcgcccgcggacctcactcagaggctcccccttgccttagaaccgccccacagcgtgattttggagcctccggtcttaaagggcaggaaatacactttgcgctgccacgtgacgcaggtgttcccggtgggctacttggtggtgaccctgaggcatggaagccgggtcatctattccgaaagcctggagcgcttcaccggcctggatctggccaacgtgaccttgacctacgagtttgctgctggaccccgcgacttctggcagcccgtgatctgccacgcgcgcctcaatctcgacggcctggtggtccgcaacagctcggcacccattacactgatgctcggtgaggcacccctgtaaccctggggactaggaggaagggggcagagagagttatgaccccgagagggcgcacagaccaagcgtgagctccacgcgggtcgacagacctccctgtgttccgttcctaattctcgccttctgctcccagcttggagccccgcgcccacagctttggcctccggttccatcgctgcccttgtagggatcctcctcactgtgggcgctgcgtacctatgcaagtgcctagctatgaagtcccaggcgtaaagggggatgttctatgccggctgagcgagaaaaagaggaatatgaaacaatctggggaaatggccatacatggtggctgacgcctgtaatcccagcactttgggaggccgaggcaggagartcgcttgagcccaggagttcgagaccagcctggacaacatagtgagaccccgtctatgcaaaaaatacacaaattagcctggtgtggtggcccgcacctgtggtcccagctacccgggaggctgagttgggaggatcctttgagccctgaaagtcgaggttgcagtgagccttgatcgtgccactgcactccagcctgggggacagagcacgaccctgtctccaaaaataaaataaaaataaaaataaatattggcgggggaaccctctggaatcaataaaggcttccttaaccagcctctgtcctgtgacctaagggtccgcattactgcccttcttcggaggaactggtttgtttttgttgttgttgttgtttttgcgatcactttctccaagttccttgtctccctragggcacctgaggtttcctcactcagggcccacctggggtcccgaagccccagactctgtgtakccccagcgggtgtcacagaaacctctccttctgctggccttatcgagtgggatcagcgcgggccggggagagccacgggcaggggcggggtggggttcatggtatggctttcctgattggcgccgccgccaccacgcggcagctctgattggatgttaagtttcctatcccagccscaccttcagaccctgtgctttcctggaggccaaacaactgtggagcgagaactcatctccaaaataacttaccacgctggagtgagaccacgaatggtggggaggggagggtcccacggacatattgagggacgtggatacgcagaagaggtatccatgtggtggcagccgggaaggggtgatcagatggtccacagggaatatcacaaactcgaattctgacgatgttctggtagtcacccagccagatgagcgcatggagttggsggtggggggtgtcaaagcttggggcccggaagcggagtcaaaagcatcaccctcggtcccttgttctcgcgtggatgtcagggccyccacccaccgagcagaaggcggactcaggggcgctccagggtggctcgagctcacacacgctgagtagacacgtgcccgctgcmccctgggtaaatacagacccggagccgagcggattctaatttagacgcccgcgaacgctgcgcgcacgcacacgtgtcctcggctcgctggcactttcgtcccgccccctccgtcgcgtgcsggagctgacccggaggggtgcttagaggtatggctccgcggggtcaaaaggagaaggatcagtgagagaggcatccccacaccctcccctagaactgtcctttccccatccagtgcctcccaaatctctcttagtccccaaatgtatccccgccctaaggggcgctggtgggaggagctaaatgtgggggcggrgctcggagtccagcttattatcatggcatctcagccagggctggggtaggggtttgggaagggcaacccagcatcccccgatcccagagtcgcggccggggatgacgcgagagagcgtggtcgcccccagaaggccctgggccatcatgccggcctccacgtagaccccaggggtcgctcactcctgccagctcgccttcaccaaggccaggagcttagcgcacgctcgcctcccgcccccccgccgcctctgccgccgccccctccttggaaaccaagttaccaacgttaaaccaatccccaagcgcaactctgyctcccccacaccccacccgccgcgccgcgcggagccgtcctctagcccagctcctcggctcgcgctctcctcgcctcctgtgctttccccgccgcggcgatgccagggccttcgccagggctgcgccgggcgctactcggcctctgggctgctctgggcctggggctcttcggcctctcaggtaagagcyccgctctggttcggggtggacagggcgggggcggagtccctggacctgagaaacggcctcctgtccctcccagctctgccctcgcctcgctsccacgcctctgcccccacctcgagcctgagtcttctccccttccccctcctccccaacacacacccgagccccagcttcctgactcctcgatagcccctacccgcttcgagatcctaggtgttcttccgcacccaacccttcgccctggagacccagtgtctctcctgtccgctccccgggtacctccttacgctstgctgtgcaccatggtccacgractggcatcttccccactcgcggtccgcgaagactccatctctccaactaccctgactcagaggcgctgttcccgctccacccagarccctggcaaccgggtccctcagctgttcccgcggttccttccatgagcccagccttgcgtcccggckccgtgttcttcaccgggtgtagggtccttcctgatccttgacccagcctcgtctctcctttgcccttgccgcaaacgcactctcctcgtatcccggcattctgccaggaccctgagaactggttcatcccccatcccccatcccgggtccccttctctcagccttgctgtgttcatccaagaacccacctttcctctcctctacgccctccccccatgctttcccgccgctccatcggcgctttggagaccatgsctctctgctaccacgtcccagagacaccctcgaggtttagactctgggagtgcgcctttaaaccggaggcctgggcasgacgcgggacgcctgggttctttccctggctgsagcctctcctcctcctccccgccctctgagaacccttgactcgacataggggcgctaagatgtcagggagttggctccccaggctcagcccgcgtttccctgggcagcggtctcgcaggagcccttctgggcggacctgcagcctcgcgtggcgttcgtggagcgcgggggctcgctgtggctgaattgcagcaccaactgccctyggccggagcgcggtggcctggagacctcgctgcgccgaaacgggacccagaggggtttgcgttggttggcgcggcagctggtggacattcgcgagccggagactcagcccgtctgcttcttccgctgcgcgcggcgcacactacaggcgcgtgggctcattcgcactttccgtgagttctgggtggccacgcgcgtactccactactctccctccctcccaggccccgccccctgggtcccagggtcctccccttcaggccccaccttctgttccaagtcccggygttcaaagagctgcggactcttcccccttgcagagcgaccagatcgcgtagagctgatgccgctgcctccctggcagccggtgggcgagaacttcaccctgagctgtagggtccccggcgccgggccccgtgcgagcctcacgctgaccctgctgcggggcgcccaggagctgatccgccgcagcttcgccggtgaaccaccccgagcgcggggcgcggtgctcacagccacggtactggctcggagggaggaccatggagccaatttctcgtgtcgcgccgagctggacctgcggccgcacggactgggactgtttgaaaacagctcggcccccagagagctccgaaccttctgtgagtgggtgtggggaggagatggggacccagtggggtcggtcggtgtttaggaggtttagaggtagatacatctgaatgctgaccccgacttcaaccctcgccggctgagctgtttccccctccgtgccttgaggrkgataatacgataagatagtgcatgtcaagtgcttaggacatattgagcgctcggagttagttcaaacttggttcttcgacccctagccctgtctccggatgccccgcgcctcgctgctccccggctcttggaagttggctcggaaaggcccgtgagctgcactctggacggactgtttccagcctcagaggccagggtctacctcgcactgggggaccagaatctgagtcctgatgtcaccctcgaaggggacgcattcgtggccactgccacagccacagctagcgcagagcaggagggtgccaggcagctgrtctgcaacgtcaccctggggggcgaaaaccgggagacccgggagaacgtgaccatctacagtaaggaaggaggcggggtctccgcggctccgaggtgggaccagaggaatgcgaaggcggggcgaagagtgggcgggacctcagtaccggaacaggcgtgkcccgagggggcggggcaggtgggggcggagacgtaatcgctggggaggaggagcctgtacagcctgagaggcggggcgccgtaccctagttcgttctcagcaccccgaggattcgggcagataaggggcgggccttgaccggagggaggggtatggtcagtatactacgaccaaatgctccgcccccaggcttcccggcaccactcctgaccctgagcgaacccagcgtctccgaggggcagatggtgacagtaacctgcgcagctgggrcccaagctctggtcacactggagggagttccagccgcggtcccggggcagcccgcccagcttcagctaaatgccaccgagaacgacgacagacgcagcttcttctgcgacgccaccctcgatgtggacggggagaccctgatcaagaacaggagcgcagagcttcgtgtcctatgtgagttggtgataacccctcgccccccaccttctggtgacttccaaggacccgcctgctccctcaccgtgtcgtggaggcggagccatttcttacgtctaagcctctgtaaccccacgccctgcccgcagacgctccccggctagacgattcggactgccccaggagttggacgtggcccgagggcccagagcagacgctgcgctgcgaggcccgcgggaacccagaaccctcagtgcactgtgcgcgctccgacggcggggccgtgctggctctgggcctgctgggtccagtcactcgggcgctctcaggcacttaccgctgcaaggcggccaatgatcaaggcgaggcggtcaaggacgtaacgctaacggtggagtgtgagtgggggtgcgcagrgtgcayttctatctggttcaaggtctggagggtggccagcctccagggaagagtaggagtagggtatgaggtgtccctttgggtgaggttttgggaaagggaagaggctggttagtggggttggagaaagatcttggaggatggaagggaccgggtgggcgtgcccctagcctagggcgtggtatttgggcggagtcgtggaaaggcgggcagtccagagtgtttaagtttttagrcgaaaaaggcgccactggtggctcaggaagctcccagacagagtgcatgsctcgactagcgtgacacctccttggatcggcgtccaagggttatgcagggacaacacttcgtggaagccttgccgcgccaaggagggtctagggacgtcagatttgcccccaaaccccaaagccaacaatacactccctcctccagacgcaccagcgctggacagcrtgggctgcccagaacgcattacttggctggagggaacagaagcctcgctgagctgtgtggcgcacggggtaccgccgcctgatgtgatctgcgtgcgctctggagaactcggggccgtcatcgargggctgttgcgtgtggcccgggagcatgcgggcacttaccgctgcgaagccaccaaccctcggggctctgcggccaaaaatgtggccgtcacrgtggaatgtgagtaggggcaccgcggagttaggcaggatctgtgggacaaccccggctggacttcctggcccccgtgtgagcccctgcaatcctgtttcccagatggccccaggtttgaggagccgagctgccccagcaattggacatgggtggaaggatctgggcgcctgttttcctgtgaggtcgatgggaagccacagccaagcgtgaagtgcgtgggctccgggggcrccactgagggggtgctgctgccgctggcacccccagaccctagtcccagagctcccagaatccctagagtcctggcacccggtatctacgtctgcaacgccaccaaccgccacggctccgtggccaaaacagtcgtcgtgagcgcggagtgtgagcgaggcccaggcgggtagggagcaggggtgccccacggtccaggcactccctgacatcccccatggctgytttgcagcgccaccggagatggatgaatctacctgcccaagtcaccagacgtggctggaaggggctgaggcttccgcgctggcctgcgccgcccggggtcgcccttccccaggagtgcgctgctctcgggaaggcatcccatggcctgagcagcagcgcgtgtcccgagaggacgcgggcacttaccactgtgtggccaccaatgcgcatggcacggactcccggaccgtcactgtgggcgtggaatgtgagtgggggcagcaccggatggaggggacacggtcctcggaagaatgactcgcagcggtgggagcattcaagggcacctctcccaatcccattctcggggacagggaattccagcctaaaccagggggtaatgaaaattctagccaggcgcagtggctcaggtctgtaatcccaacactttggaaggttgaggcggatgaatcacttgaggccaggagttcgagaccagcccggccaacatggcgaaaacccgtctctacaaaaattagccggtcgtggtsgtgggcgcctgtggtcccagctacttgggaggctgaggcaggagaatcgcttgagcctgggaggcagaggttgcagggagccgagatcccgccactgcactccagcctgggcaacagagtgagactctttcttagaaaaacagaaaaagaaaattatagggaataggagcacggccctcctcaaatcctggattagaacactgacctgggcttcacctccttccattcggtgaagaagggcgaggaattttagccgcaacagcagyctgattgtcggggaaggaggctctgataggaggcaggatcctcttctgcccatcagaggcgcggtggtctcccatcgatcgttgtgggccggagcagggcatttgatcagtggctgggccggcgctaagccccacttcaccttctgtgcccttcagaccggccagtggtggccgaacttgctgcctcgccccctggaggcgtgcgcccaggaggaaacttcacgttgacctgccgcgcrgaggcctggcctccagcccagatcagctggcgcgcgcccccgrgggccctcaacatcggcctgtcgagcaacaacagcacactgagcgtggcaggcgccatgggaagccacggcggcgagtacgagtgcgcasscaccaacgcgcacgggcgccacgcgcggcgcatcacggtgcgcgtggccggtmmgtggcagctggggagaggcggggcgaggtatctgagagggggcgtgacctgggtcttggggcggccggccccgcctgcctccctctcggtcccggkagactagrcggwagtgggacagartagaagtcaaaggtgcctkagcgggtggggctgttgatcgcactttgaggggtgggagatggaggtggcagggggactgaattcaaggggagggaccctccggggctgtcactgctgcaggaaaggactttaaaacttgggctggattctgcgtggyggaaacttgacccaattcacaatccactgtggggaagattggggagggaccaaagtcattggatgwtggagggagagaggggtcaagatcgccttctctcacttcctgaagctcctggggctgggttctctctggggtcgggggaacctgacctggtcctgccggtcctcattttttgggggatggggagagttgacttgtcgccagggggctaagtgtggtcacgggtttatatccccatgggctgaagtgcgatataaatcgggactcgggtcgccctggcactgggagtggccttattgcatgggttgtctcccttctcccaaggccagacagtgagctccccggggcatgaggactgacttcgtgcctgtgggagtgcggggggcggtgggagaagccccccggagcttggccaccctccgcgagggtctccaccccgcaggtccgtggctatgggtcgccgtgggcggcgcggcggggggcgcggcgctgctggccgcgggggccggcctggccttctacgtgcagtccaccgcctgcaagaagggcgagtacaacgtgcaggaggccgagagctcaggcgaggccgtgtgtctsaacggagcgggcggcggcgctggcggggcggcaggcgcggagggcggacccsaggcggcggggggcgcggccgagtcgccggcggagggcgaggtcttcgccatacagctgacatcggcgtgagcccgctcccctctccccgcgggccgggggacgccccccagactcacacgggggcttatttattgctttatttatttacttattcatttatttatgtattcaactccaagggcgtcacccccattttctasccatcccctcaataragtttttatraaggaactccctgtctccgcttctgtttctgcaaggtggracaagsccagggttccagtcgtgacctcccgagttattcattcaawaagcgatttttgagagggcctggggtggtggcttaggcctgtaatcccaggacttgtgggaggcccaggtgggaggatcccttgcacccaagagtttcagaccagcctgggcaacatagggagaccctacaaaaaatatttttcaaaaattagccaaggccggtcgcggtggctcatgcgtgtaatcccaggactttggaaggccgaggcggccagatcacgaggtcgaggtcatgagatcgagaccatcctggccaatatggtgaaaccctgtctctactaaaaatacaaaaattagctgggcatggtggtgcrcgccygtagtcccagctattcgggaggctgaggcaggagaatcgctttaaccccggaggcagaggttgcagtgagccgagatcgtgccactgaactccagcctggcgacagagcgagattccgtcttaaaaaaaaaaccaggcgtggtggctcacgcctgtaatcccagcactttgggaggccgaggcgggcggatcacgaggtcgggagatcgagaccatcctcgctaacacggtgaaaccccgtctctactaaaaatacaaaaaaaaaaaaaaaaaaaaaattagccgagcgtggtggcgggcgcctgtagtcccagctactcaggaggctgaggcaggagaatggcatgaacccggggagcagagcttgcagtgagccgagatcgcgccactgcactccaccctggcagacagcaagactccgtctcaaaaaaaaaaaaaaaaattagccagggccgagcacagtrctctcgcttgaatcccagaactttgggaaactaaggcggggggggggggtcacttgaggtcaggagttcgagaccaccctggccaacgtggtgaaacaccttctctaccaaaaatacaaaaaaattaaggccgggtgaagtggctcacgtctgtaatcccagcactttgcgaggctgaggcgggcggatcatggggttagaagatcaagactgtcctggctaacatggtgaaaccccgtcactamtaaaaacacaaaaattagccgggcgtggtggcacatgcctgtagtcccagctactcaagaggctgaggcaggagaatcgctttaaccccggaggcagaggttgcagtgagccaagatcgcaccactgcactccagcctgggcaatagagcgagactctgtctcaaaaaaaaaccaaaaacaaaaacaaaaaaatacaaaaatttagctgggctgtagtggcacacgccctgtaatcccagctactcgtgaggctgaggcaggagaattgctagaacccgggaggtagagatcttgccattgcactccagcctgggcaacagaactagactctgtctcaaaaaaaaaaaaaaaaaaaaaaaagtgttttttgagggggctgggcatggtggctcaagcctgtaatcccaggacttttgggaggcccaggtgggaggatcccttgtgcccacgagtttcagaccagcctgggcaacatagcgagaccctacaaaaaaacatgtttcaaaaaaaaatttttttttttgagatggagtctcgctctgtcgcccaggctggacagcagtggcactatctctgctcactgcaagctccgtctcccgggttcatgccattctcctgcctcagcctcccaagtagctgggattacaggcgcctgccaccacacccagctaatttttttttgtatttttagtagagatgggatttcaccgtgttcgccaggatggtctctattcctgacctcgagatccacccgcctcagcctcccaaagtgctgggattacaggcgtgagccaccgcgcccggcctcaaaaaaaaaattttttttttgagatggagtcttgctctgtcacccaggctggagtgctgtggtgtgatcttggctcactgcaacctctgcctcctgggttcaagcaattcccctgccttggcttcccaaatagctgggactataggcatgcaccaccacacccarctaatttttgtatttttagtagagacagggtttcaccatgttggccaggctggtctcgaactcctgacctaaggtgatccacctgcctcggtctcccaaagtgctgggattacagctgtaagccaccatgcctggtgtatttttcaaaaattagccagacatggtggtgcatgcctgtagtcccagctacttgggaggctgaggcaggaggatcctttgagcctaggaggtcaaagccacttccagctatgatatygtcattgtgctccagcccaggtgacagaaccagaccctgtctctaaaaacaaacaacgaaaaaatccaaaaactttttttgaacacctactatgcatcaggcacaatctaagctgtctttttctttttcttttttttwtttttgagacggagtctctctgtcgcccaggctggagtgcagtggtgtaatctcagctcactgcaagctctgcctcccacgttcaagcgattttcctgcctcagcctcctgagtagctgggattacaggcgcgcgccaccactacgcccggctaatttttgtatttttagtagagacagggtttcaccatgttggtcaggctagtctggaactactgacctcgtgattcacctgcctcggtctcccaacgtgctggaattacaagcctgagccactgtgcctggcccggctggctgtcttttctcagtgtgacctagagctcgtcctctctcagtgcctgttttctgctctcttcacacccttgggcaggggtgggggcctcactccttcctcctacttatctcttccacccagcactgccctctgatccgggtcactcttggaggtgggggctaggtgcttcccccaggcctggttaccggcagagctgaggccgccttgccagggtgggtggaggccctctccgttgtgcccctgccctgagacttcggtgagaccttcctgggcaggcactggctgatgctatgggtgtcagcccttagcatgtcctccctgttaaagggggcacccctgccccgccctcaatgcctcctttgtcctgtgtccacccacagtgcttcagtttacccccaccctgcctttccactcagcccatcatgattcagaacagacacacacagggtatccgctgcaacccccactacacggcaccttcccccctcatccccaacagcataaggcacagcagctgggcctcctccccacagcctcctcctctgcccctcctccctcaaaagcaggaacacggagccctagagaaggaagccagtcccatgcaaacatgtaatgagcaaagatgagacggggaaatggcacaagagggcaggccagtgctcggtgctggagccaggggccaggtataacacccaaaaaggcaccagccaggtgcagtccctgccactaacagcacctcaccttttctgcctgtgccctccctacttaatgatctctctccgctcctactgacctcaaggtstctttcagagccttcagatgagatatttattttagtaggttggtgcaaaagtaattgctgtttttgccattgaaagtaatggcaggcagggcatggtggctcacgcctgtaatcccagcactttgggaggccgaggtgggcagatcacgaggtcaggagttcaagaccagcctggctaacatggtgaaaccctgtctctactaacaatacaaaaaaaattagccggacatggtggcacacccctgtagtctcagctacttgggaggctgaggcaggagaactgcttgaaccctgaagcggaggctgcagtgagctgaaatcacgccactgcactccagcctgggccacagagtgagactgtctcagaggaaaaaaaaaaaaaaaaagtaatggcaaaaactgcaattactttttctttttctttctgtttttttttttgtttgtttgtttgtttgtttgtttgtttgagacggagtctcactgtgtggcccaggctggagtgcagtggcgcaatcttggcttactgcagcctccgcctcccaggttcaagtgattctctcctgcctcagcctcccaataggattacaggcacccaccactatgcctggctaatttttgtatctttagcagagatggggtttcaccatgtttgccaggctggtctcgaactcctgatccacccacctcagcttcccaaagtgctgggattacaggcaggcatgagccatggtgcccgacatttttttttttttttytttttttttttgagacagagtctcactttgtcacccaggctggagtgcaaaggcaagatctcactgcagcctctgcctcctgggttaaagcgattctcccaccttagccccctgagtaggtgagattacaggcacatgccaccamacctgcctaatttttgtatttttaatagagagggggtttcaccattttgtccacgctggtctcgaactcctgacctcaagggattcgcccacctcagcctcccaaagtgctgggattacaggcatgagccaccacgcccgacctccttaactcttttatttccttgcacactttttctctgtagcccagctcacaacttaacatcctcttagacatacacctgaggttttttttttttttttttttgagagggagtctctctctgtcacccaggatggaatgcagtggtgtgctctcagctcactgcaaccttgcaaccactgcctcccaggttcaagcaattctcctgcctcagcctcccgagtagctgggactacagacacatgccgccacacctggctgattttttgttttttagtagagacagggtttcaccgtgttgcccaggctggtctcaaactcctgagttcaggcagtccgcctgccttagccttccaaaatgctgggattacaggcatgaggcaccgcgtcctgcctctgagttttttttttttttttttttactgtctcctaraacatcagccccrgtagagcagggatctttgttctgttcaccactgagggtcctcattgggtcctagcacacacagttgctcaataaatgttgaataagtgggtaaagacagccacgagcttgcagatatgtgttcaaggtgtgtccttgcagagagcttctctatacttggcactggagaggcctgtcgtgggcaaggacatagatgtggcgacctcagacttgagaactcctggggcagtaggggagatggatgtggataatgtaaccataagccttcctttctattttagactgagtggtcaaggaaggcttccagacaatggaaattctgataggttctaagagggagaccagcaaggagctgaaccggaggctgacacagggtgagagtgggaatgtctattttattttttttttggagacagggtctcactctgttgctcaggcagcagtgcagtggcacgatcgtggctcactgcagcttcaacttcccagactcaagtgatcctcccacctcagcctcccaagcagctgggaatataggtgcatgccaccacatccggctaatttttgtatttttggtagaaacggggtttcaccatgttgcccaggctggtcttgaactcctgggttcaagtgatcttgctgccttgggctcccaaagtgcttggattacaggtgtgagcctgtgagccacatctggcctattttattttttaattagttttttgtttttgtttttgttttgagatggagtctctgtctccaaggctggagtgcagtggcacgatctcggctcactgtaacctccacctcccaagtagctgggattacaggcacatgccaccacgcctggctaatttttgtatctttagtagagacagggtttccccatgttggccaggctggtctcgaactcctgacctccggtgatccacctgcctcagtttccc

SEQ ID NO: 10007 - DNA, 55346 bp, Homo sapiens
aaagaaagaaaaacagccagttttctatgctacccacagaggggtccatatggggttgttatggattcccatcataacttaaagggaaactttcacaatgtccagagcccttgctgtcctgcaaatgaaggaggaggatgtccttaagttccttgcagtaggaacccacttagtggcaccaatcttgacttctagatggaacagtacatctataaaaggaaaagtgatggcatctacatcataaatctgaagaggacctgggagaagcttctgctggcagctcatgccattgttgccattgaaaaccctgctgatgccagtgttatatcccctaggaatactggccagagggttgtgctgaagtttgctgctgccaccagagccactccagttgctggccacttcactcctggaaccttcactaaccagatccaggctccttccgggagccacagctttttgtggttactgaccccagggctgaccaccagcctcaaacagaggcatcttatgttaacctacctaccattgctctgtgtaatacagattctcctctgcagtatgtggacattgccatcccatgcaacaacaagggagctcactcagtgggtttgatgtggtggatgctggctcaggaagttctgcacaaaggtggcaccatttcctgtgaacacctgtgggagstcatgcctgatctctacttctttttttttttttatttgagacgcagtctcgctctgtcgcccaggctggagtgcagtggcgcaatctcrgctcactgcaacctctgcctcctgggtccacrccattctcctgcctcagcctcccaggtagytgggactacaggcgcctgccaccatgcccggctaatttttttgtatttttagtagagacggggtttcaccgtgttagccaggatggtctcaatctcctgacctcatgatctgcccgccttggcctcccaaagtgctgggattacaggcgtgagatactgcgcccggcctgcctaatctctacttctacagagatcctgaagagattgaaaaagaagagcaagctgctactgaaaaggctgtgacaaaggaggaatttcagggtgaatggactgctccagctcctgagttcacygttactcagcctgaggttgcagactggtctgaagggtgcaggtatcctctgtgcctattcagcagttccctactgaagactggagcactcagcctgccacggaagactggtctgcagctcccactgttcagaccactgaatggttttaaattgttcttgcagggactcttaagcaacttggaaataaggttgatggaaaataggcatcagtttctttttttttttttttgtttgagacagtctcgctctttcgccaggctggagsgcagtggcgcaatctcggctcactgaaacctctgactccctgtttcaagcaattctcctgcctcagcctcctgagtagctgggattacaggcaggctaatttttgtatttttagtatagacggtgtttcgtcacattggccaggttggtctcgatctcctgacctcgtcatccgcccgccttggcctcccaaagtgttgggattacaggtgtgtgtgtttatggccaccgtgcctggccataaacatcagtttctaaaaaaaaaaaaaaagaaaaatatctaaacaagaacagcatcttcttccatttgaatttttttctccaagaaattctgagcagattatccctttacctttttttccttttttttttttgagacaggktctcactctgttgcctaggctggagtgcagtggcacaactttggctcactgcaacctccgcctctggggctcaagcaatcctcccgcctcagcctctygagtagctgggactacaggcacatgccagcatgcccgrctaatttktatattttttgtagagatggggttttgccatgtttcccaggctggtctcgaactcctgggcccaagcaatctgcccacctcagcctcccaaagtgctgggattacaggcatgagtcattgcacctgtcctgcctttttttcctcccctcccctccctctctctctttctctctttctttctttttgatggagtctcgctttgtcacccagtctggagygcagtggcgcaatgtcggctcaatgcaacctctgcctcccgggttcaagcgattctcctgcctcarccttcccagtaggtgggattacaggcatgcaccaccatgcctggctaatttttgtatttttagtagagacggggtttcaccatgttgaccasgcctgtcttgaactcctgacctcaagtgatctgcccgcctgggcctcccaaagtgctgtgattacaggcgtgagccaccatgcccagcctcctacatttttttttctgaagtcttacatgttacaccttcagaaatgcctttcctgcccacctaatactcagagttaacactcatattgcactcactctgtgctagacaatgtttttttgtctttgttttttgttttgagacagagtctcactgtcaccctgatgtagtacagtgacacaatcacagctcactgcagccttggcctcctgggctcaagtgatcctcccacatcagtctttagagtagctgggtctacaggtatgtgccagcaccaaacctggctaattttaatttttttttttttttggtagagatgaggtctcactatgttgcccagtctggtcttgaactccttggctcaagtgatcctcctgccttggcctctcaaagtgttggaatcacaagtatgagccactgtgcccggcccagacattgttttaagccattttcatataccaactctgttaaacctttgtacaagcctatgaggtaagtagtattcttacaatctccagaggaggtaagcattattattatctccatattggagctgagaaaactggagtacagaaaggataaataacttctccaaaccaaaatcacacaataagtggtagagcctgtatttgaactctgcccacatggtgctagaagctacatcctgtactttacctcctctgtgttatcaacctaaagtaggcctcttttttttgagacggagtctcgctctgttgtccaggctggagtgcagtggtgcgatctcggctcactgcaacctctgcctcccaggttcaagtgattctcctgcytcagtctcctgagtagctgggatcacaggcacgtgccaccacaccaggctaagtttttctttttctttctttctttttttctttttcttttttttaagacggagccttgcattgtcacccgggctggagtgcaatgacgctatctcagctcactgcaaccgcaacctccatctcccaggttcacgcaattctcctgcctcagcctcccaagtagctgagattacaggcacacaccaccatacccggctaattttttgtatttttagtagagacagggtttcactatattgaccaggctggtctcaaactcctgacctcatgatccgtccgcctcggcctcccaaagtgctgggattacmggcgtgtgccaccatgctgggcccttttttttcccccaaaggacacaagtacaggtaagaaaatgtagttttttkktttttttttttttttaracagggtctcactttctctcccaggctagagtgcagtggtgggatctcagctggtcaggaactcctgacctcaaaaagacctgcccgcctcggtctcccaaaatgctgggattacaggcgtgagccactgtgcccagccaaaggtagacctcgtctactccatttttcttgcttatagtacctcctattttcccttttgagtactaatcacaatttgcaattaaatatttgctcactgccaggtatggtggcttacacgtataatcccagcastttgggaggccaaagcagcggaatagcttgaggccaggaatttaaaaccagccwcagcaagacctcacctcaacaattttttttttttttctgttggccaggctggagtgcagtggcacgacctcagctccctgtaacccccacctcaaagcaattttcatgcctcagactccggagtagctgggattacaggcatgtgctacaatgcccagctaatttttgtatttttagtagagatcaggtttcaccatgttggccaggatggtcttgaattcctagcctcaagatatctgctcaccttggcttcactactgggattacaagtttgagccactgcacccggcctcaacaaaaacaaaaattttaattacctcaccctatgcatctcttcatttgtatcctttgtaatatcctttatattaataataaaccagtaaatgtaaataaataaataaatactgtttgtctcttcccagcagattgtaagcctgattagggcagggatcatatctgttttattcacatcataagcactgtgtaacctctggtttcttttctctttgagatggagtttcactctgtggcccaggctggagtacagtggcgccatctcagctcactgcaacctctgcctcaagcaattcaagtgatcctcctgcctcagcctccccagtattttgtatttttagtagagatggggtttcggcatgttggccaggctggtcttgaactcctgacgtcaggtgatctgcctgccttggcctcccaaagtgctgagattacaggcattagccaccgcggcctggccaataggcactatgtaactattagtttaatgaatgaagaaatgaatgcttgtgggcatcattcattctgcaacaaacttctaaaaattaattttactttgaaacaatttcatactttcagaggagttacaagaataatacaaagaagttcacccagatatctcattcagggttagccaattgtccacaaaatatactttagagagcaagaggattaattccagggtctcttgagcaacaaatatttattgagcgcctgctactattggattacataacagtctcttaactggtctcttagctataggcattgcacccccacccctagtcccatacagcagctccttttactaatttatttttgaggaggatctcgctctgtcgcccaagctggagtgcagtgccgcgatctcagctcactgcaacctccgcctcccaactcaagcggttctcctgcctcagcctccagagtagctgggaccacaagcacgcactaccgsgccaggctaattttggtactttttgtagctacagatagaatagagatctttgtctattttgttcacgaagtactgcaagcgccttgagctgtacctggcacatctttgttgctcagcaaagagtggttggataaacgaacgctgaasgtatgctagtaccaggtactgttctcggtgctggagttacagcaaaaaactccctgccctcgtgggattctcactggargcatgcttaagcttaagccatttttcaatcttgaccccaccattttgttccctgtgagatttggggtgaactgcagtttcctagcctcactttcctawcaatcgttacgaagattaaaaggaaaaatatcatttgtatcgcatttagcatcagaaatgctttaataatattcgtttcccttcctttcaggctggaagactggggcctgacatctctgccacaggcttaggcgaggttttcacagggacttggaaaggtgcaaacggttactacggccaggcttacccaattgttaagtgaagatattctggagagtgcttaaaagggttggaaaaacaaaccagtgagtggctaggaccacctactccgctgttttgcctcggaaaagcctcgccggctgccgggaggtgaaagtctggaggaacgggaggaaaagagaggggtggctgtccacaacagaaaactacacatcccagcacccccgcggcagacgactacgggtcccagcaggtttcgcggggtggaccgaagcgggmtctcttggggcctgcagtcggggttcagccagagggggcgccgggcgtaccgacgtagcggggagaaacgggtcgcgctttaacggcgctgcgcaggcgccactcacgggccggacgtgacgcagggaaagttccggcttcggcctccgccgctgccgccgccgctgctacagccgccgccgccgctgttgccgcggcttgttattcttaaaatggcgccgctagacctggacaagtatgtggaaatagcgcggctgtgcaagtacctgccagagaacgacctgaaggtgagccctatttgcgggctcgccccttccggctgtggggcgcccgccggccggcccttyctttctccaggacccccgccgggtatccagtccagtcgcggtggagggcctcccccattgccagtcgacccggtcctacccggcgtcacgccgagggtctcgcgagccgagtcgtcgaatgctgtcccggttgcctcagtggggatcccgagggatgtcgcggcctctgtcccagggtcgccccttctggccttcgggctgccccaggacccgcagctgtaacagctttatttagaaggctcggctccccaccccatccctgggtctcccgcagtcggarscgagcccccgcggcagtgccctcgggatggggtcgcctccaccggaggtgacaggagcgcggagtggccggcgtctgacaggagatgccaccggctaccggaacgcggcctcagtgtgtttaggtctctgaggaaggggaaggcggtgggcccgagtggtttggtactggcgggagcgaacgtcaggtcgtccctcttcattgccactcctccaaattgctttttaggatcgtcggttttgctaattcagaggtgaatcccgtttctgagtatgttgttgagcttactgaagtggataaagtagttggttctcaataaatacaaatactttctccttaaccccttcttaactcagtatttcattttcttcgttttctaaaggaggtgagttccttgttaytcctgagtccaagtaagagtaaatgtatgtatgggtaaaggaatgactttggtatactgcttttcttttttaaaactttttaattattattattattattattattattgtttttaactgagatagagtctcactctgtcacccaggctggagtgcagcggtgcgatcttggctcactgcaacctccacttcccgggttcaagcgattctcctgcctcagcctcccgactaggtggaattacaggcgcccgtcacgacgcccggctgttttgtatttttagtagagacggggtttcgccatgttggccaggctggtcttgaactcctgacctcaagtgatccgcccgcttcggcctaccaaagtgctggtattacaggcgtgagccaccgcgccggcctaggtatactgcttctttgaaaagtgtttctatgcatttgctgaaatcagagcttaggtttctagcagtgcttatcagctcgtgctagtatttaaccgactcagtgtattctttttttttgagacggagtctcgctctgtcgcccaggccggagtgcggtggcaccatctcggctcactgcaacctccgcctcccgggttcacgccattctcctgcctcagtctcccgagtagctgggactacaggtgcccgccaccacgcctggctaattttttgtatttttagtagagacggggtttcaccgtgttagccaggatggtctcgatctcctgaactcgtgatccgcccgcctcggcctcccaaagtgctgggattacaggcgtaagccaccgtgcccagccccgactcagtgtattcttaaggaaatatattactgtgggttttgttttatttcttctttgtacagtaagttgatacttaacatcagtcaacaagtatgcataatatttgaggccacacgtgctgttgtgaatgtgactgaattgtacttacctgttaattttatgtggcatatgataggggagtcattcttgtgcattytccygtttttaatagaataatttcaaataaggacagccttcgttagtagtaatgtagcatttgtgctcatctgagtccttcagacattccttttgtggcttctttctgctatgtggtttttttaagggaataagaatacaactagcattgggacccaattcatggaaaactaaccagacctcttagtagcattattaatcccataggtgaggttgactattgcatgtcagtgaattgacatggaattttttcttcttatttatcatgcataaagcttttttgaactttgtgtttatgatgaataaaatgttgctttttatgaaaatgtgtctagggcacagtggcgtaatctcagtacttggggaggctgaggtgggcagatcatttgagatcaggagtttgagaccagactgaccgacttggtgaaaccccctctctactaaaaayacagaaattagccgagcatggtggtaggtgcctgtaatcccagtttacttacttgggaggctgaggcagggagaatggcttgaacccgggagaattgcttgcagtgagccgggatcacaccactgtactccagcctgggagacagagcaagactctgtctcaaaaaaaaagaaaaggaaattgggcactgaaatgatttgaaagataatctggccaggtgcagtggctcacgcctgtaatcccagcactttgggtggctgaggcaggtggatcacttgaggtcaggagctcgagaccagcctggccaacatggtgaaaccccgtctgtactaaaaatacaaaaataaactggaggtggtggcaggtgcttggaatcccagctacttgggaggctgaggcaggagaatcgcttgaaccagggaggcggaggttgcagtgagccaagattgcgccactgcagtccagcctgggtgacagagggagactccgtctcmccaaaaaaaaaaaaaaaaaaaaaaagaaagaaaaatctgttggacttctttgtacctcttagtttgataaacattagatttccttcttaccttaaggaagtacaatttttagaccattttatttcttgttgaaacatagctgcattgtacttgacttgtatttgtttctttttttttcttaaaaaaatttttaatctttttwttggtgggrgagcggggacatggtctcactctcacccatgctgtagtgtggtggcacaatcatggctcattgcagcctcgacctcctgggctcaggcagtcctcccaccttagcctcctgagaagctgggaccacaggcacatgcccccatgaccagctaatttttatttatttttttggtagagacagggtcttgctatgttacccaggccagtcttgaactcctgggctcaagcgatcctcccaccttggcttcccaaaatgctgggataacagkcatgagccactatacttggcctgtatccatttcttaataaacttaaaaatatatgttttgggcaaccaagacaaaagtattctgaatttttctttataggtagagacttttttttctgtcttggaaatgcttttatcagattaatttgttgtgttgctcatctctggtgtatttaaagaaatttaatttttttctgtttcttggcatgaagtgcaacctaaaattaggccaagaaagtatgccaggagtactttttctgaggctgtaaaggcaaaataaaacattctattaagaaaagtaatcattgaggccacttaatgagcaagatggaaargatttgttctgtagaaaagaagacagaaatttacttgtgttttaaattgattagaagataaaatactaaatgcatacgatgttccagatttaatcacaatttctgtttygctaagttggaaatggtcacatcactagtactggatcaaatctacataactgtttttgtttgtttgttcgctcttgttgcycagggtggagtgcaatggcgtgagcttggctcactgcaacctctgcctcccgggttcaagcgattctcctgcctcagccttcctgagtagctgtgattacaggcatgtgccaccacgcccagttaattttgtatttttagtagagaccaggtttccccatgttgttcagkctggtctcgaactcctcacctcagatgatgcacccacctcggcctcccaaagtgctgggattataggtgtgagcctggcctgttagtttgtttttttgagacggagtcttgctctgttgcccaggctagagtgcaggtgcacgttctcagctcactgcaacctccgcctcccggattcaagckattctcctgcctcagcctcctgagtagctgggattacaggcacccaccaccactcctggctaatttttgtatttttagtagagatggggtttcaccatgttggccaggctggtctcaaactcctgacctcaggtgatccacccttctcagcctcccaaagtgctgggattacaggcgtgagccaccatgcctggcatacataacagttttgaaggaataagaatgacatatgtgggccgggaggctgaggcaggagaattgcttgagcctgggagatggaggttgcagtgagccgagatcatgccactgcactccagcctggccaacagagcgagaccctgtctcaaaaaaaaaaaaaaatgacatatgtgaaagtaaatggaccacagtgtaacctttcttataaagagctcatgtgattttatccacaagaaagatttcagagagattaataaaagatacagattccatacctggctaaatggaagaattaatgataaaggcaggtttactgaatacttatatttaagtattaatatttttggggagcaggggttctataacttggaggttgtctaatctcttggacagttcttaagggtgacatgtttacctgaggttttttttttttttttttttttgagactgaatctaactctattgcccaggctggagtacagtggtaccatctcagctcactgcagtctccacctcctgggttcaagcagttctgcctcagctgggattacaggtgcgcactaccacacccagctaatttttgtatatatatattttttggtagagatggggtttcaccatgttggccaggctggtctcgaacttctggcctcaggtgatcygcccacctcggcctcccaaagtgttgggattacagatgkgagccactgtgtttggccattccttatttgtgttttccacaattttagaacactgccctgtatgtgataatcagtaaaggtttattractcaaactgtwtactgctttatgacaaatacttgtttcttcttcttctttttttttttttctttgaggtagggtctcagtctgctgcccagggtggagtgcagtggtgcarttgtarcttgctgcaacctcaaactcctgggctcaattgatccttctgcctcagcctcaaaagtagctgggagtacaggtgtgcaataktgtgcccagctgattaattattatttttwtttttgagatggagtctcactctgtcaccaggctggagtgtaatggcgcgatctcggctcactgcaacctctgcctcctgggttcaaacaattctcctgcctcagcctcccaagtagctgggactacagatgcatgccaccatgcctggctagttttttggtatttttggtaaagatggggtttcactgtgtttgccaggatggtctcaatctcctgacctcgtgatccacccgccttggcctcccaaagtgcagggattataggcgttagccaccgcgcctggcaaaaaaaaaatttttttaagggatagcgtcttgctatgctgtccaggctggtcccaaatgcttcargtgattctcctgccttggcctcccmaaatgctgagattataggtgtgagccactgtgcccagccaacaaacacttatttacatggttccttgtgttgagtactgttccctgtgggtgccaggggcagaattggatacttgtgtctgcctttgaggggctttcaatatagtaagggaggtaaggaggtaaacaaagactgtaatagaggctgaccagggtgttggcaaacagaagaagcagtatgtaactttagagtcagagatgatttcataaaggagcagttacgaggrgcagagttcaggtagacaaaatgagaaggaaagaacatgcaaacagaataaacaccatrtgcaatagtataatgtaatttgcaagaacatggctggttcggggaacttgaagtggtttggtatggctggaggtggtactggaaagaaagatgccaaatcatagaagagtaggctgttaaacttagattgttattttttaggtggtgcatgaacactatgaaatgtttttatattttagggaaaaatcatactgtgattcgtgatactgtttaaaatgtagctaactaaaaataaaagtagattcaaagaaaattattacagggatacactgttgtatgtggtaggaatatgacaaaataatgaaaatggtatttggtgtttgggaaacactgccataaatggaggaatacgcttgaggagtttttaagaaggagaatgacagtaggcttttgaaatgtttattctggcagcattgtggaccatggattggaatgcaggaaaaatgtcatagaagcagtaggcccggtgatatgagagtctgagataaggcaatgataagtgattgttgtgttggaaaggaaatgaagaaggtatagtggcacctgttaacagatttggtctaggttatgatgaagagagtttagcataattttttagtttctggcaaggattacttagtactataactagattaaggaatacgggaagtttggtttgggccatattgagtttgagatgctgccaagctaagacattgagatagaggtgtccagaattactcttggatacttatgttacttagataacaactacttgttgattgccaaatgtgctctaaacactgttctaatagtattaaackcaggagaaagatctagaccagtcgttctcaactgggggcaattttgccccccaaagaatttttggyagtgtctggagacatttttggttgtcacagctgggkcaggggaggggtgggaagttactatgggtatctagtaggcgtagatgtcggagattttgctaaacatccacaagacagcaagcagtcmcctgcaatgaataattagtagtgccatggttgagaaactctgatctggcctgaggatacagatactaccttctggatcataagcgtgtgaatatcatggtcattccagatttctaacttctcattcccagtgatctgtattatagtagagactttatataaagactgtgtgaaatataatgttagctagatatttatttagttagttacttagctagctagttgagatgaggttttgctatgttgcccaagctagtcttgagctctgggcctccagccatcttcttgccttggcctcccaaaatgctcattttacaggtgtgagccaccacacctggcagtgagatctttttttttaaagctaagagtgttttataaataccagtatgtaaaagtagataaaggaagtagtatgttttagataacaagatcaactaaacaagtaattttaaaagtttagaacccagtgtttgtgagggcaagagggaactgggagacagaacagagaatagaatggaactgtgaacaaatgtcttgaggaaaaggtagagaagagacatagaggtctgctaagaatgatggctatgaaccccttcctgttcaaggattagaaagtagttgggcaccaaacatatgaaaaagagcactggtcattaaagaaatgcaaatcaaaaccgcaatgagataccatctcacgccagttagaatggcaatcattaaaaagttaggaaacaacaggtgctggagacgatttggagaaataggaacacttttacactgttggtgggagtgcaaattagttcaactgttgtggaagacagtgtagcgattcctcaaggatctagaactagaaatgccatttggcccagcaatcccattactgggtatatacccaaaggattataaatcattctactataaagatgcatgcacttgcatgtttactgcagcactattcacaatagcaaagacttggaactagctcaaatgcccatcratgatagactggttaaagaaaatgtggcacatatacaccatggaatactttgcagggacatggatgaagctggaaaccatcattctcagcaaactaacacaggaacagaaaaygaaacaccgcatgttctcactcgtaagcgggagttgaacaatgagaacatatgggcagaggggaggggaacatcacatgctggggcctgtcagggggtccggggtaaagggagggatatcattaggagaaataccgattgtagatgatgggttgatgggtgcaggaaaccaccatggcacgtggatacctaagtaacaaacctgcacgttctgcacatgtgtcccagaacttaagtataataaaaaataaataaatagaaaacagaacacaaaaaaagaaagaaaaaatatttgggcacgatgaggagaaaggggtatagtttaccctaaatttgggataaagctgtaargggtttgggaggagaggagcatgtgtctttactatgatgacaaggcagggctctttgaggccgctgtgagtgtagttgattgagtcacgtagcgtttatagtgagattgcatagacttcttatttttgtgtgcgcgtgatagcgatttgtaagctactgccaaactagagatgagaggcaatagctttggcttagagacatagctctctaaatcctcagttggggtcagcagaggtggcagtcgtaggacgcagctgtaattttactctagttagtgtgcctgggccctggttgaaggctgctgctaggtagtttacacgtgttctccagacactcaatctttcagattgacagagtttcacagcgatgttcttcagtttatagtccactgttattttcaggctagcacatagtgtatggggtgataaccagggatgacttcaagtttaggaggccttatggactaggagaaccagttacatgtcagcgaaaattctggcacattgaaatatgggaaccggccagacacagtggctcacgcctgtaaccccagcactttgggaggctaaggtgggtgtatcacctgaggtcaggagtttgagaccagcctggccaacatggcgaaaccctgtctctactaaaaatacaaaaattaaccaggcatggtggcgtgtgccgtaatcccagctactggggggctgaggcaggagaatcgcttgaacctgggaggcggagggtgtagtgagccaagatcacgccattgcactgcagcctgggtgacaagagcgaaactccatctcaaaaaaagaaaaaattacaggccaaacttagaatcattcatcagttcctggcatatttgttctttaatgcaaataggttgcaaactttggatgctaattattataaaaataaatatgtatcataggtctaatggattattaatagaagtaggatgctgtgcaacactgatattttgaaattgactggaaagacagccgtctatccacaaggactaactggattgagtggttrtggtcaaggttgtgattattattatttatgaggtaatacatagggctgtggggtgttggtatggggatgaggggagtgactgctaatgtgtatatggtttctttttggggtgatgaaagtgtcctaaaattgattatggtgatggttgccaccactgtgaatataatgaaaaccattgactcttacccttcaaagggatgcattttatgtaggtgaattatgttgcaatagttgttttaaaaaattrtattcgggctgggtgtgatgctcacacttgtaatcctagcactttgggaggctgaggcgggtggatcacctgaggtcaggagctcgagaccagcctggccaacgtggtgaaaccccatctctactaaaaatataaaaattagctgggtgtggtggcaggtgcctgtaatcccagatacttgggaggctgaggcaggagaatcgcttgaatctgggaggtggaggttgcagtgagccaatatcacgccattgcactccagcctgaacgacaaagcaagactttgtttccaaaaaaaaaaaaaaaaagagagagagaaaaggaaagctggatgaagagagatagccaagcccatgtctagggaaaagcattcttgactgagtgaacagaaagtacaaagcctcagaggagggagcatgcctaggtagccacccagacctggtgaggctggtgtgtggggcagcctccatggagaggagttagaacaaaactctgtctaataaataaaaataaaaaattatattcatagttccccaccctccaaaccaaacctaaacaaatcaaaacaatctgctcttgaaagaaatagttgataagccagacttcattaaaattaaaagcttttgctttgtgaaagaccctatcaagagaatgagatgatgatccatgtactgggagaaaatatttgtgaaagacgtgtctgataaagtattgttatccaaaatatgcagataattcttttttttttgagatggagtttcgctcttgttgcttaggctggagtgcagtggcgcgatctcagctcaccgcaacctctgcctcccgcattcaagcaattctcctgcctctgcctttcgagtagctgggattataggcmtgcgccaccacacccggctaattttgtattttttagtagagatggggtttctctgcgttggtcatgctggtctcgaactcctgacctcaggtgatctgacctcctcggcctcccaaagtgctgggattacagacgtgagccaccatgcctggcctgcagataactcttaaaactcaataagaaaatgaacaatctgattaaaaaatggacaaaagttgctgtcagatcatgccagtttttcagaatggttgtgctaaattacactttcaccaccagtagaaactgtctagaagaagctggctgcaggagggctaagggatttattgggcctcagtgaagcttggtgatacgtgggtggctttgcagaaatgtttcctttgttggtgcattattacaaagattcaaatggggatttgctgcatttgtggtagctgtaggagctgaatattacttggagtcccagaataaagataaacatcactgaagataatacctggaagtatcatagtggtttcttaactaagatttcctcactgtagcctacttgcctggtttgtcccttaaagaatattagtaagatataataaagtaaatacagatatgccaaaaaaatggacaaaagacacctcatcaaagaagatacagtgatgacaaataagcgtatgaaaagatgctctaccttccgtgtcattagggaaatgcaaagtgaaacaaccatgagataaccactatatacctattagaatggccaaaatccagaacaccaacagtaccaaatgctgatgaagatgtggagcaacaggaactctcattcattgctggtgggaatgcaaaatggtacagccactttggaagacggtttggcagtttcttataaaactaaacaaactcttcatataatccagcagtcctgctccttgatatttaccsaaatgagttgtaaacttatgtccatacaaaaacctgtacatagatttttatagccactttattcataattgccaaaacttggaaggaaccaagatgtccttcactaggtggatggataaacaaactgtaatacacccagacaatgaaatattatgcagtgctaagaagaaatgagctatcaagccataaaaagacatggaagaaccttaaatacatattactaaatgaaagaaaccaacctgaaaaggctacatatatatgattccaactatatgacattttgggaaaggcaaaactatagagacagtaaaaagatcagtggttttcagaggttggagggaggtgaatttgaataggtgaaactattctgtatgatactataatggtaggtacatgtcattatacaattgtcaaaacttatagaatgtgcagtaggagtgaccctaatttaaacaaactatggcctttggatgataatgatatgtcagtgtatgctcatcatctgtaacaaacgtaccactcaagtgtgagatgttgatgcggggaggctgtggggaggggcagggggtatatgggaactctgcacttttttctttttttctttttctttttttccctttatatggagaacgargtctctctatattgctgagggcggtcttgaactcctgggctcaagsgatcctcctgtctttgcctccctaagtggtgggattacaggcgcgagccactgtgcccagcaggggaactctgtactttaagattttttttkttgtttgttttgagacagagtcttgctgtcaccccaggctggagtgcagtggcgccatctctgctcactgcaagttcggcctcccgggttcacgccattctcctgcctcagcctttcaagtagctgagactacaggcgcccgccaccacgcccggctaattttttgtatttttagtagagatggggtttcaytgtgttagccaggatggtctcactctcctgacctcgtgatccgcctgcctcgaccccccaaagtgctgggattacaggcgtgagccaccgcgcccggccgggaattctctgtacttttctgctcaattttgctgtgaagctaaaactgctctaaaaaatagtctatttacaggggtaaaaaaacacaataaaaaaatctactttccctggagttgtaactgtctcagtaatgattatttccagccttctaattgtttaagccagaaatcccgcgtcatccttgattctttactttctcttaacaccctgtatccagctggtcataaatctagcagatgctacattcagataacatctggaatctattttccctattttctacttctactaccctgtccaagccagttaacttttacctagattattatagaagacacttaactgatctccctgcttactcctttgtcccaattccaaccccagcccagccacccctccaccaccatcaatccattttctcttttcttgttattttgagaaagggtctcgctctgtgacccaggctggagtgcagtggcacagtctcacctcactgcagctttgacctcccgggctcaagcgatccttgcacctcagccttccaagtatctgggacttcaggcacatgccaccacgcccagctagtttttgtattttttgtagagactgggttttgccattgttgcccaggcaggtctcgaactcctgagctcaagtgatacgctcacctcggcctcccaaagtgctgggatgataggtgtgagccaccacgcctggccagtttgttttcaaaacagctgacttaatatcatgtcagtcttctgctctagaacttctaatggcttcccgttacactcagtagaagcccaggtccttattttcaccaccagtgacctaaataattctgtgatgctctcctgtttttcttctcattcagtttactctraacacaccagcctygatgatgtttcttagacacaagcatgcttcacatcaggacttttggtctttatttctctgcctgtagtattgtgtccccatagccttacctcctttagagttttgctcaaaattcactttatcagtaaggcttccatactctccctgtttaaaataacagcacctactctccaccccagcaccccatccctcttctagtgtgtctgtttgctctatacttccttgatatyactatgtgacaaattactrttatatattttacttatttattgtctgtctcattctattagaatgtaagccccttgagagcagagcttttagtctgttttggttgttgctatttactttgtatctagaacaatacctggtaacataccaggcactccataaatatttgttgcattgaacaactaaatattcaatataatgtagtggaaagtggtaggaaacttggattctagatctgttgctaagattaagtaacatcttttattatctaagtcaagtgagaaatttggtgtaggtaatttctttttttttttttttttttgagacggagtctcgctgtgtcgaccaggctggagtgcagtggtgcgatctctgctcactgcaagctccgcctcccgggttcatgccattctcctgcctcagcctccctagtagctgggactacaggcgcctgccaccatgccccgctaatttttttgtatttttttttagtagagacggggtttcactgtgttagccaggatggtctcgatctcctgacctcgtgatccacccgcctcggcctcccaaagtgctgggattacaggcgtgagccaccgcgcccggccggcgtaggtaatttctaatgcaaaccagaattttataattctgatggaaccttcgagaacatctttcagtataaagtttaaggctcaaagttcagaaacattgtttcactcaccagcatctattttttgcttttgtttttgtttttttttgaaacagagtctcactctgtcacccaggctggagtgcaatggcgtgatcttggctcactgcaaactctgctcctgggttcaagcaattctcctgcctcagcctcccaagtacaggattaccagcgccctgccaccacgcccagctaagtatttgtatttttagtagagatgaggtttcaccatgttggccaggctgatcttgaactcctgacctcaggtgatccacctgcctcggcctcccaaagtgctgggattacagatgtgagccacacacctggcctgtttttcttttttttagataggttctcactctgtcgcccagactggagtgcagtggcgcgatctcggcacactgcaacctctgcctccaaggctcaagcgattctcctgtctcaacctcccaagtagctgagattacaggtacgtgcctctactgaccagcttatttttgtattttttagtatagacagggttttgctatgttggctaggctggtctcgaactcctgacctcaaatgatccacctgcctgagcctcctaaagtgctggaattataggtgygagccaccacggctggcctgtttttgttattttttttaatgagtgatggatgtactatatggcaggaccatggattgatttgttgaagcatataggtgtggaaaattcaacacaaacaggagctagctacccagggactcaaggccagaaggattccaggccaaaaagaagatcttgcctttgaggtgctattttaagatcaggaacttaccctaggaatgaaggcaaatcattttattttgaagttttctgattttttgtataatgtttaggaaattaacaactctatttcccctcattgtcttttgggagcccttttttcccccctcccmctcccattgagttctgttcttgctactgtgtagctattgttgtagctgtaactgttaaagtgtttctcatatattaatgagattatagcatttagaktccttaattaatgtttaagtgatttcattatgcttgttagtttaatttctcctttcttggcagacctatygtaaaatccaataagcctttggcaatagtacaaactggtctcaggtaggaaggaaggttccacctgagacctccagttccctgtatatagcagggatgtatacttccttttccagaacgttggtgtgagaatcatatgctttctatgacattttttggtttgattactttcagtggacaaatatttttgaagtgcaaacatttagagttcctttaacaaaaagaatggcttggctgggtgcggtggctcacgcctgtaatcccagcactttgggaggccgaggcgggtggatcatgaggtcaggagagcgagaccatcctggccaacatggtgaaaccttgtctctactaaaaatccaaaaatgagctgggtatgatgactcatgcctgtaatcccagctactcgggaggctgaggcaggagaatggcttgaacctgggaggcagagattgcagtgagctgagattgcgccactgcactccagcctggcaacagagcgagattctgtctcaaaaaaataaaattaaaaaaggctcatcttttttkttgttgttgttgtttgtttgttttgagaaagagtctcaccctgtttcccaagctggagtgcagtggcgcgacctcggttttcggcaacctctgtctcctgggttcaagcgattctcttgcctcatcctcccgagtagctgggattacagctgtgcaccccacgcctggctactttttttttttttttttttttttttgagagggagtctctctgctgcccaggctggagkgcaatgggtgcaatctcggctcactgcaacctttgcctcccagattcaagtgattctcctgcctcagcctcagctgaggattacaggcacctgccaccacgcccagctaatttttgtatttttaatagagacggggtttcactacgttggccaggctggtcctgaactcctgaccttgtgatccacccacctcagcctcccaaagttctgggattacaggcgtgattcaccatgcccagcctaatttttatatttagtagagatagggggttttgccatgttggycaggctggtcttgaactcctgacctcaaatgatccacccactttggcctcccaaaatgctgggattacaggcgagagccrccgtgcccagctggctcctcagttttagatttgaattttataattaattatagttagcctttttatttcaaaataacccagttttccccagtggtaacattttgtagaactatrgtgtaatgccacaaccaatacaacatcagccaacattgacactgatacaactcatgatctttaggtacaacccaagatcatcacctcatgatgttcagatttcttcagttttacttgwgtttgtgtgtgtgtgtktgtgkktgtgtgtgtgtgtgtgtgtgtgtgtgtgtttgtgtgtattcagttctttgcagttttattgggtaagggctcatgtatccaactctatagtcaaaatacagaacaggtccatcatcacaagaattcctcatgttgcccttttatagccacacccacttccttcctgcaactgctggacccctgacaacaactaatccgttctccatttctttaattttgtcatttcaagaatgtgtaaacacggccgagtgcagtggctcaatgcctgtaatcccaccactttgggaggccgaagcgggcagatcacctgaggttgggagtttgagaccagcctgaccaacatggtgaaactactaagaatacaaaaattagctgggcatgatggtgtgtgcctgtaatcccaggtacttgtgagactgaggcaagggaatcacttgaactgggaggcagtttgcagtgaactgaaattgtgctactggactccagcctgggcaacagaccaagactctgtctcaaaaaaaaagggraaaaaagaaggttatataaatggaattatacagtatataaccttttgggacagttttctgttgtttcatttttttcactcaacataaatgccttgagatgaatccaggttgttgtgtggcagtattcgtttctttttattgctgagtagtaktacatggtgtggatgtaccaaaatgtgtttaaccattcactcattgaaggatatctgatttgtttttagttttgggctatkatgcattaggcttctgcgagtatttatatacagattttgaacatgtttttattgccaagactacagttgctgggtcaaatggtaagtgtgtggtttgcaatttattttttaaattaccagataaaaatcttttactggctgggcacggtggctgacgcctgtaatcccagcactttgggaggctgaggtgggtggatcacctgaggtcaggagttcaagaccagcctggccaacatggtaaaaccctgtgtctactaaaaatacaaaaattagccgggtgtggtggcacatgcctgtaaccccagctacttgggaggctgaggcaggaaaattgcttgaatctgggagatggaggtagaagtgagccgagatcrtgtcactgcatttcagcctgggagacagagtgagactccgtttaaaaaaaaaaaaaacaaaaaaacccaaaaaccttttactgttaaaattatttcttcatatatatatatatatatatatatatatatatatatrtrtatatgtgtgtrtrtgtgtgtatatgtgtgtgtgtgtttggtgaaaaacatcattttacagttcttgtaaagctgtctgtctcctagaaccttagtgtctctgtaggtagtttgcattgcattaagaattctgtgtgacagctgacagaaatccaacccccgaattatcacagggtactttcctatcaaaaagtatacttgggttttgtaagtattagacctggtatttttcttttttggtattttatctttagttttaatgttgtagtaaatgtttaccttttattttctctttttatagcggctatgtgactacgtttgtgacctcctcttagaagagtcaaatgttcagccagtatcaacaccagtaacagtgtgtggagatatccatggacaggtaaaatttcatgagcagatttttaagttttgtactgtccatgatccatgtgtgttttcacatgtgctgcaaaattaaaacaacaacaacatcaacaaacacaactggtggtaagctaggttgcctcagtctctgtgacacaaatgattcctggtttacatttttggtgaataaaagcagtggtcaaattagtgatggaatttgttgataattacatttgtgaagtgaataatgcagcattagttttctgtggaatggtggggttgggggtaggtagaagatataaagtacaaacacatactgctcataataactatgattaacaggagatgttttggtgttaggcacttttttcattcagttcatttctgttctcctgtcatatattgttgaaaatttatcatttctttagtgggaatgagaatagcaaaggtacagaaaaataaaattgttggtccatgatgtcacagcaaatcactgatgaatgagctagaaaatatttagctcaatttttcatctgctgggtgtttgtaagaatttcaaagcagtgccgggcgtggtggctcacacctgtagtcccagcactttgggtggctgaggcgggtggatcgtgaggtcaggagtttgagaccagcctgaccaacatggtgaaaccccgtctctactgaaaatacaaaaaaattagctgggcatggtggtgcgtgcctgtaatcccagctactcaggaggctgaggcaggagaatctcttgaacccgggaggtgaaggttgcagtgagccgagaccgcaccactgcactccagcctgggcaacagagcaagactctgtytaaaaaaaaaaaaaagaatttcaaagcagtaacaggaggggcatacctcatatttagattctgttgtcagtgtttagtctcatgtatatttgtagaattttttcactgggaaatgaaagctgaacagattactyatagagtgctatatgcatacagtgtagttggggccataagacttaataatacattgcaaacaatgtagtctttaaaggatgccaacaggacttactgtcacctgtgcaatttccctgctttaaatatgactgtgtaaatgagcagaaatgtgtgtaaattgactctgattaggggctgctccatgagtaaagtcttgttttggctacttacttacaggctgattttcttttggtttttcaaggtgttttctggattttttagattataaaaaaatctgacacttgcatgtcatcacctcctagatggaggtcccattatgtcatctttgattgttaaaattacagttctttagagtagactttaggaattgatttcctaaaatttccatgtaacttctctctcaaacatttgtattttgctaacataaaggatattaatataagcagtgtcttaagacattcctgaaaactggaataaaccaagtcatgttttcccccagtgtagtgtagaagtttctatgtaacttctctctcaaagtaaacatttgtattttgctaacataaaggatattaatataagcagtgtcttaacacattcctgaaaactggaataaaccaagtcatgttttcccccagtgtagtgtttcccccagttgtagastttttaagatgtgaagtacagccatgatcaaaggtcagaaagttagagaccaacctcgaactactaaaattggaagcataaaattgaacttttgtattatatataccttcagtcaaatgtgcagttcttgctaacatatatcttgtgttttgaggttaacaaagtactttttcacatattctgtgtcagttttttcccaaagtcctgtgagataggattaytttgtagacaatgaaagggagactgaaagattgaagagaaatagcccaaactcacacacagctactacagggcagattgagatttgaaactaatttgggtttcttttgtacatgttattttaagaccaccaccaaaccgtgaacaattgtttatgttgtatgtgttccttaaaaaacaattgttccaggtgcagtggctcacgcctgtaatcccagcactttgggaggcygaggcaggcagatcagaaggtcaggagttcaagaccagcctagccaacatggtgaaaccctgtctctacgaaaaatacaaaaattagccaggtgtggtggtgcgtgcctgtaatcccagctacttgggaggctgaggcaggagaatcgctagaacccgggaggcagaggttgcagtgaaccgagatcatgcattgcaccccagcctgggcaatagagtgagactctgtctcgaaaaaataaaaaataaaaaataagccgggtgtggtggctcatgcctgtaatcccagcactttgggaggctgaggtgggtggatcacgagggcaagagatcgagaccatcctggcaaatatggtgaaaccccgtctctactaaaaatacaaaaattagccaggtgtggtgacaggcgcctgtaatcccagctccttaggaggctgaggcaggagaattgcttgaacctgggagacggaggttgtggtgagccgagatcgcgccattgcactccagcctgggcaacaagagcgaaactccgtctcaaaaaaatgaaaaacagaagattgctaatcagaaacatgggatttgagcctctaaatagctattgactgattaaatacaatgtaaaatgtatcctttgggacttatcttcctctggggcctgttctggaattgcaggattgggttatgagtatgaataaacatgttagcaagcatgttgtgctgagaagtattgaagctgtgtaatatagtgaggagttatagatttcagtgtcagatacaacttggtttaaatcctggcttggctatatattagttgtttaagaagccatttcagctagctcacaaattcgttaagtgtggcctgtggacccttgggtctctaaggtggtacagaggcaatggagggtaaaactrctcgtgccttagcatgaaccaagggaatgacactagaatatactgattatcattgagttcttcaccaacatgcctgcacagtaaaataaaatgccagtttcacttaactctcaatcctttagaatatccattatttgaaaagtctggctgggcatgatggctcatgcctataatcccagcactttgggaggctgaggtgggaggatcgcttgaagccatgggttcaagaccagcctgggcaaccaaatgatacccccccccccccccatctcaaactcctgacctcaggtgatccacctgccttggcctcccagagtgctgggattacaggcgtgagccactgcgtccggcctgagactccccatctctaaaaaaaaaaawttttttttttttgagacagagtttctctcttgttatccaggctggagtgcaatggcmcgatcctggctcactgcaacctctgcctcccaggttcaagcgattctcctgcctcagcctcctgagtagctgagattacaggcatgtgccaccacgcctgactaactttttgtatttttagttgagatggggtttttccatgttgctgaggctggtcttgaacccctgacctcatgtgatcctcctgtctcctgtctcggcctcccaaagtgctgggattacaggcgtgagtcaccatgcccggccttttttttatttcttktttttttttttttttttggacagggtctcgctctgtcacccaagctggagtgcagtggtgtgatctcagttcawtgcagcctctgcctcccgggttcaagtgattcttgtgcctcagcatcccgagtagctgggactacaggcacgcaccaccacgcctggctgatttttgtatttttagtagggatgggattttgccctgttggccaggctggtctcgaactcctggcctcttgtgatccacctgcctcagcctcccagagtgctgggactacaggtgtgagccgctgcacctggcccccatctctaaaaatattaaaaagaaaaaaattagccaggcttggtggtgtgagtctgtaagtcctagctcctcaagaggctaaggtggaagcattgcttgagcccaggagtttgaggctatagtcagctattattgtgccactgcactccagcctgggcagcagagtgagaccccatctaaaaagaaaaagaaaaaagtctgtgtgatgaaatgggaagtatgcataaagcatatctactgcatrctgaagaaagatagtttactcaaggaaaagtagttgtgggttgggcacggtggctcacacctgtaatcccagcaccagatcacctgaggtcgggagttcaagatcagcctggccaacatggcaaaaccccatctttactaaaaaatataaaaaattgccaggtgtggtggtgggtgcctgtaatcccagctactcagggactaaggcagggaaaattacttgaacctgggaggcggatgttgcagtaagctgagatctcaccattgcactccagcctgggtgacagagtgagactctgctaaaaaaaaaaaaaaaaagaaaaagaaaaatacttgtgaaattctttgagtcatgagttaaaataactgcttttttatggaacactatttttacttgrgaatgactgacaaactgtgattatttagacttgggtatttggcaactatatttgcaaaagtgaaggaagtgggccagtcacttcaaggagaacaattgacagtatttgttgccgatgacaaaatttgaatttactaatgaaaaattggaattttggaaaatctgagtccaccactatggggctaacagtttccgacacttaaaagactttcctgagatgaaatgagcagtgatattaacaaatatggttttttgatgatataaaatgcaatgtcattttcatttttcaaattactagtttaccatttactcaaagtgtaagataacaaatgtaacagggtatgaaagatgactattataggccaggcctggtgactcacacctgcaatcccagcactttgggaggccgtggcaagcggatcgcttgagcccaggagtttgagaccagcctgagcaacatggtgaaaccctgtctctactaaaaatacaaaaattagccaggtgtggaggtacgtgcctgtaatctcggctacttaggtggctgaggcatgagaattgcttgaacctgggaggtggaggttgcactgagctgagaatgtgccactgtactccagcctggacaacagggagagatcctgtctccaaaaaaaaaaaaaaaaaagcaaaagattactgttatggtttcagatttcatattgcgattaacttttaagtgtcataaactgccacttgtcaaattttggtacagtatttaaagagtatgcacagttacctgaaaatgttattaaaatactccttccttttgtaactgcatatctttgtgaagctggattttcttcatctgctttacttagtatattcccaacagactgagtgcagaggcaagttctaagactagccatgttctatttagccagacattgaagagatttgtgaaaatgtaaaacaatgtgaattctcctctcactaaacaatttttttgttttggaaaagttaatttttcattaaaatgtgtttgtgatactttttgatgggtatgttattgatttktttttttgagatggaatttcactcttgtcacccagactgcagtgcaatggtgtgatctcagctcactgcaacctctgcctcccgggttcaagcgattcttctgcctcagcctcccaagtagctgggattacaggtgtgagtcaccgtgcctggcctatgttattaatttttaaaaattcatttaaatatttaaaacttctgagttttaatctctaatatggtaaatattgatttgtaaaacttacataaaagattttcaggacctctggtttttaagatcacaaatgaatcctgaaaccaaaaagtttgagaactactgggcagactggatgtttccttgcctctgataaaaaaaaaaattccacttccyagccgggcgcggtggctcacgcctgtaatcccagcactgtgggaggccgaggcgggcggatcacgaggtcaagagatcaagaccatcctggccaatgtggtgaaaccccgtctctactaaaaatacaaaaattagctgggcatggtggcacatgactgtagtcccagctactcgggaggctgaggcaggagaatgacgtgaacctgggaggtggaggttgcagtgagccgagatcatgccactgcactccagtctgggtgacagagcgagactccgtctcaaaaaaaaatccacttcccaggctgggtaaagtggtacatatatgtagttccagctactcaggaggctgaggtgggaggattgcttgatcccaaaagtttgagaccaacctgggcaatatagtgagcctccatctcaaaaataatgataattaaagaaaaaaatctacttcttaagattgtttttggtttaaaatgggagcagagtatctgaaatatgaaaaacagagtagctgggtgcagtggctcacgcctgtaatcctagcactttgggaggctgaggcgggcagattacctgaggtgaggggtttaagaccaacctggccaatgtggcgaaaccctttctgtacaaaaaagtacaaaaattaggcaggtgtagtggcacgtgcctgtagtcccagctacttgggaggctgaggcaggaggattgcttgaacccaggagccagaggcagcagtgagctgagattgcaccactggactccaggctgggtaacagactgagactccgtctcaaaaaaaaaaaaaaaaaaaaaaaaaaaragagtgagggagagacatagagtagatggtagatattatttgacgatgaggtaggtgtctagtaatgtaggatgaaaatagggccgtgtgctgtggctcatgcctgtaatcctagcatttgggaaaccgaagcgggtggatcacctgaggtcaggagttcaggatctgcctggccaacatggtgaaaccccgtctttaataaaaatacaaaaatcagcgggggtgcggtggcagataagctactcgggaggctgaggcaggaaaatcacttgaacccaggaggtggaggttgcagtgagctgagatmgtgccattgcactccagcctggacaacaagaacgaaactccgtctcaaaaaaaaaaaaaaaagaattgcccaagttctcgggaaatgggaacctatgtatcactgacrcagaatatttaatcgtctacctgtgtgtctggtaaatacaaactttaaaagcttttgtttaagaacagatatctggccaggcgtagtggctcacgcctgtaatcccagcactttgagaggccgaggcgggcggatcacaaggtcaggagttcaggaccagcctgaccaacatggtgaaaccccgtctctgttaaaaatacataaattagctggggctgttggcacgcgcctgtaatcccagctactcgggaggctgaggcaggagaatcacttgaacctgggaggcggaggatgcagtgagccgagatcgcaccattgcattgcagcctgggcaacagagtgagactgtctcaaaaaaacaaaacaaaacaaaaaaacatatctgtaaacatcaatagaaaagtttaaggatactcactcttctaccatatttttattaaaaaactgacttacaaaactttttaatgttcacttcctgactttgtgtatataactactcaattttttacataatagaattgtgtagttataggtatagttttgtattccattcttttccctaatgatttttgcattttgctacatggttttcgtcataatttttattcatggcctcataaggtccttgagttgctagatcttaatttaagatattcacttatgttagtcatgaaggctgtttcttttgatgttttaaatgttgtcataacacttttttttttttgagacagagtcttgctgtgtcatccaggctggaatgcagtggcaccatcctggctcactgtaacctccgtctcccaggttcaagtgattctcctgcctcagcctcctgaggtagctgggactacaggtgcccgccgccacgcctggctaatttttgtatttttagtagagactgggtttcgccatgttggccaggctggtctcgaactcctgacctcaggtgatccacccgcctcggcctcccaaagtgctgggattacaggcgtgagcctctgtgcttggcccactttttttttttttttttgagacggagtcttgctctgtcacccargctagagtgcagtggcgtgatcttggcttactgcatcctccacctctcaggttcaggtgattctcctgcctcagcctcccgagtagcagggattgattacaggtgcccaccatgatgcccagctaatttttgtatttttagtagagacagggtttcaccatgttggccagtctggtcttgatctcctgacctcatgatccacctgcctcagcctcccacaatgctgggattacaagtgtgagccactgtgcccggaccataacacttttttttttttttttttttttttttgagacagaatcttgctctgttgcccaggctggagtgcagtggcatgatcttggctcactgcaacctctacctcctgggctcaagcaattcttgtgcctcagcctcccaggtagctgggattacaggtgcaggccaccacccctggataatttttgtatttttagtagagatggggtttcaccacattggctaagctggtcttgaactcctgacctcaagtgatctgcctgcctgggactcccaaagtgctgggattacaggcgtgagctcccaaagttccaggattacaggtgtgagcagcttggcctgttagctaattttcagatacattttatattaagcttcctaaagttgtttttttttttttrtctgactttttagacttatggaacattgttataaaaggtgttactttatttctttcagtagttaacatctcactttcagttttcttcactttgactaasattcctattaagtgttaaaagtttaaatgataattttatttcaagtgtaaaagatgaatgtgttagaagttgttagttgtaattggtccaatgtattgtagtcaattcccttaatccaaaatcgtttttcttccagaaaaactgtaatgctttctttggaaattagggctagggtaataatctagtggactgaaatttgacaaatgcacaatttgccagttaccaaatttcagtaaatagaaatatgatgaaatatcmttgggtgtcatggatcacacttgtaatcccagcactttgggagactgaggtgggaggattgcctgaagccagtagtttgagaccagcttgggcaaaaaagcgagaccctgtctctataaaaatttgctgggcatggtggtgtgtaactgtggtcctagctactgaggagggcaaggtaggagggtyacttgagcccaggaatttgtggctgcagtgagttatgattgcaccactgcattccggcctgggtaacagagccaaaccctgtcttaaaacaaaaaacaaaaaatatgatgaaatatataatttttttttaactgatcattgaggagacactccatggctgtggagcctgagggtatataactctaactgtagaatgtgggaagatctctgtataacactggagtgtcatgtaagttcagtttggaagaaaaagaggtatccacttgtttctgtaatcttttgtctcattaaaatagatacagaatttgggtgggctgttagattagcttactgagaaattagacaattgataaaggatgycagaattctcaagagatagatggggagatgtatgaaagaaaatgagaaagggaatcctatgataataatctaggagtgactttatggtaactgagctttatttagtgctttttttagtcttgagaactgtgtgcttggcagtttggcttacactttatttcttaaaaatgtaaatatttggagtcctcttagctgcttctttacacatttcactctcagttttgttgctttgcttcttaacaggaatttgtaatcagcatgtattgcatttcttttatagttttatgacctttgtgaactgttcagaactggaggtcaggttcctgacacaaactacatatttatggtatgtaaacaccagtgatatcaagtgcttgtttaaaatggaaaggatctgacttattaaatgtaaattgcataataattctttaccatgtgacagtccctatttmrgtatattaaaagatgtgtattagtccgttttcacgccgctgataaagacatacctgagactgggcaatttacaaaagaggtttaatggacttaacagtttcacwtggctggagaggcctcacaatcatgcagaaggcaaggaggaccaagtcacatcttatgtggatggcggcaggcaaagagagagagactgtgcagggatctcttgtttttaaaaccatcagatctcatgagacttaytgtcatgagaacagcacaggaaagacttgcccccatgattcaattactttccatcgagtccctcccacaacatgtgggaattcaagatgagatttgggtggggacacagccaaaccatatcaaggtgattgtatacttttctacatttaactatgtcctctaattaattgccttagtaagccactgtagatagggttgggttgtagctgtcagtaatggttgggcataaaaaataacccagaacccctggtttaaggcaaaaatcttcaattgactattatttattcagacttttcgagcattcatttttatctctcgttaatctatggatggattaatatacacacatacacatttgctatagatgtttgcttttcttttggaatgtaatgttactgttgaactttttctggatccttctctcattttctttccttctgaaagtttctgggtcactttcttattttttttttttgagacggagtctctctctgttgccaggctggagtgcagtggtgcgattggcttactgcaacctctgcctcttgggttcaagtgattctcttgcctcagcctcccgagtagctggtattacaggcgtgcgccaccacgcccagctaatttttgtatttttagtagagacaggatttcactatgttggccaggatggtctggatctcttgaactcgtgatccgcccacctcggcccctgccttggcctcccaaagtgctgggattacaggggtgagccaccacgccggccactttcctattctttcagctgttttcctattggkgtaatattggcccaagtcagacattaatgggaagtgtaaatagtatattatcatatatggttgttaaatgcaaaactgagcctagaacgctgttataattatggtatttgcttttacaaaaaatttttttcttcaagtaggcaactcttccaatacagttaaaatgattcttaaaataaaaaattattttacctgggcatggtggtacatgcctgtagtcccagctacttgggaggctgaggtgggatgattgtttaagctcaggagttctagaccaacctgggcaacatagtgagaccccatctctaaaaaaaaaaaaaaattgaatttttaaaaattaaattacttggccgggcgcagtggctcacgcctgtaatcccagcactttgggaggcygaggcaggtggatcacctgaggtcaggagtttgagaccagcctgaccaacatggaraaaccccgtctctactaaaaaaaaaaaaaaaatacaaaattagccgggcttggtggtgcatgcctgtaatcccagctactcaggaagctgaggtgggagaatcacttgaatccaggaaggggaggttgcagtgagccaagatcacgccattgcactccagcctgggcaacaagagtgaaactccatctaaaaaaaaaaaaaaaaaaaacttaaaaaatactggttagcagatgaccaaatcaactaatgtaggtaatagaggattgaaaaaatggtggttttgccaggtgtggtggctcacatctataatcccagcactttgggaggccaacgtgggtggatcacaaggtcaggagtttgagaccagcctgaccaacctggtgaaacccccgtctctacaaaaaatacaaaaatcagccgggygtggtggcggcttgtacctgtaatcccagctactcaggagkctgaggcaagagaatcgcttgaacccgggaggcggaggttgcagtgaaccgagattgtgccactgcactccagcctgggtgacagagtgatactgtctcaaaaaaagaaaaaaaagaaaaaaaaatggtggttttttttttcagggaaagtttttgagagaatggcacagcagattcttgtagatttccctggaatcaaaaatcttgtttgtataaacatttaatagaaaaaatttgtttacgtgtattttatttttttgttaaaatcaaatttccaaataattcagtatgtaactctttattgtagttataaactatatgtttgtacagtttgatataatttgaaaagaatattgtggctattgtattgtttgtaactgtaaacttttacttcacagggtgattttgtagacagaggttactatagtttggagaccttcacttaccttcttgcattaaaggctaaatggcctgatcgtattacacttttgcgaggaaatcatgagagtagacagataacacaggtctatggattttatggtaagaattcctatttctctgattctgaatattattttactttcctctttggaaaacaaagctacacaagtcatacacatgctttatgtatattattttccccacatcctcactccttcactcctcccaaacaattgaaaatcttatgctcgagagaagaccactgttaactttttggtgtgcatctttctagatctgtgcctcaaagtgtagctggaatcacctgggttctcattaaaaatgtagattgccggccgggtggggtggctcacacctgtaatctcagcactttgggaggctgaggcaggcggatcacaagatcaggagatcgagaccatcctgaccmatatggtgaaaccccktctcttctaaaaatacaaaaatgagctgrgcgtggtggtgtgtgcatgtaatcccagttactcgggaggctgaggcaggagaattgcttgaaccaaggagtcagagtttgtggtgagccgagatcatgccacagcactccagcctggcgacatagggagactccgtctcaaaaaaaaaaaaaaccaaaaaaaaaaggagaatgctgggcctcaccacagatttattaatcaaaatattttggagtgggaatctagaatctgctgaaggtgaatgttctgcacaaatttgagagtccattctcatccattttgtatgtgtgtgtgtgtgtttatgtgtgtttatatatgtacaaacacgtgcacactaaaatggggacatacctgattttttcactttattaatgttattttcatggctgcttcatataccatatggatgtagcataattgatgtatcagtttttcctctatcgttggactttagagttgtttttaagctgctgttatacatccttttacatatatctctgtatgctcactccagagaatgctaggacctcagggatcagaagcagaacttagtcataaacagcaaaataggccaggcgcagtggctcacccctgtaatcccagcactttgggaggccgaggcgggcggatcacctgaggtcaggagttcgagaccagcctggccaactaaaccctgtctctactaaaaatacaaaaattagccgggcactggtagggggaggggggagggatagcgttaggagacatacctaatgtaaatgacgagttaatgggtgcagcacaccaacatgacacatgtatacatatgtaaaagaccgrcacgttgtgcacatgtaccctagaacttaaagtttaataataaaaaaaatttagccgggcatggtggtgggggcctgtaatcccagctactcaggagactgaggcagggagaattgattgaacccaggaggtggaggttgcagtgagccaagatcgctccattccactccagcctgggcaactgagccagactctgtctcaagaaaggaaaaaaagcaaactagctaattctttaaaacttttatttggttgaaagagagagagagagagagagagagagagagagcgagcttattaggaagccccttcagggaaatagaactgtcaagattatgaatttggattttccttgagcacaattaagacagatattgagagatttggaaacattaattgcagaaccctttagatttaaattttatattttgaattatcttctttcattataaagataggctgggccaggtgtggtggctcatgcctgtaatcccagtactttgggaggctgaggcaggcagatcacaaggtcaggagatcgagaccatcttggccaacatggtgaaaccccgtctctacttaaaatacaaaaattagctgggcatggtggcacttgcctgtagtcccagctattcgggaggctgaggcaggagaatcccttgaacccgggaggtggaggttgcagtgagccgagattgcaccattgcactccagcctggatgacagtgaggctgtctcaaaacgaaacaaagcaaagataatctgaactctcttactcttcagtttgtctgccattatcaattagagaaattttgagaatttattgtttttatataatttttttaatacgtgtaaagttaggtaatatttatctcctttctacaggtgactttttattttcattcacaaaataaacaccaattgaaatacaacttttggattcttttgcaaaataatcaatattttggataacatactatgatattagctcagtgaaaacagtactaaaactaatgttataaaaacacacacacctactatatatatgtaactaatgctacatgtataatatataaaatacatattgttatatatggctaatatatgacttttttttttttttttttttgagacggagtctcgctctgtcacccaggctggagtgcagtggtgcgatcttcgctcactgcaagctctgcctactgggttcacgccattctcctgcctccgcctcccaagtwgctgggactacaggcgcccgccaccatgcccggctaatttttttgtattttttagtagagacagggtttcaccgtgttagccaggatggtctcaatctcctgaccttgtgatccgcccgcctcggcctcccaaagtgctgggattacaggcatgaggcactgcgtccagccatatgacatatgttttgaataagataattttagttattataggacttatattgattttcaaggaataaaatatccctatatgactttacactgggacttcagttcacactgataaacacatactgggcagttactattgagccaagttcaagatccctgcctgcaacctgagctcattgttagggctctcttatggcaagtttacataacaatcttgcttcacgtagatatataattgagaaaatcttggggattggtcataacctgcagacttctttcctatatcattttcagcttcacttaaggcaatagtgatrtgtcaggtttttttttttctaaaattatggaagaagccaaagtacagagcttccatggtgttaacaaaagaagtgtgtaccctattaactatgtagacagtcagggtacagtggctcacatctgtattctcagcactgtgggaggctgaggtaggaggattgcttgagctcaggagttcaagaccagcctggacaacatagggagatccccatctctaccagaaataaaattagccaggtgtggtggcacttgcctgtagttccagctgttcmgaaggctgaggtggtgggatcgcttgaacccaagtggttgaggttgcagtgagytgtgatcgcgccactgctgattgtgccactgtattccaacttgggcaatagagtgagaccttgtctcaaaaacaaaaaactacgtaggcagcagaaagagtgttcaactgagaatttgtaagaacctgattggcaatctgtcctcagttttgatccactgaagctcaagtgtttagtcgcacgatttgcagaaaatctcagaagagacaacttagccctgagaagagttaggaattgctcatgctcctataactaaggatcctctaatttgtttgatctgtttatcctgctagaattgtctccttaaataaatttatctgcttaccagaattgcctaatattaacataactgttaaaacatttgcttcaggttgtgtgaaattagtatttaactcttctaatgatagcattttggctaataatttcagctgcttcttaggtccattccaggaatgaagagcagtactacatccttaggaaatacagtcatgtgccacataatgacatttcagtcgatgatggactgtatatatgacagtggtcccatagataaaacggagctgaaaaattcctattgcacaaatacttaccattgtgttactatttccttatgatatttagtacagttacatgctgcacaaatttatagcctatgagcaataggctatatcatattgcctaggtgtgtagtaggctagaccatctaggtttatgtaaggacatccgatgatgttcacacaacgatgaaatcacctaacaatgcattttttagaatgtatccccatggttaagggacatayaactgtatgtagttagtcactagcgttcttttggctctatgtggaggtcctagcaggactaaatatgtgtcatatcttgctatcctagtttaagctgaatttctgttgtactgaaggctgctctagtattggatatattgtttatttttattagcagattcattaattaaaacccttctgtttctttcacagatgagtgccaaaccaaatatggaaatgctaatgcctggagatactgtaccaaagtttttgacatgctcacagtagcagctgtaagtttctatttttaaagtctcatgtacgttcctgccaataacacattgcatatttttatctagttgtcatctcaattatattgatakctttagtattcactgatgagtttagatatgcctgaggttatatgttcaactctttgttatccttttttgctagttaatagatgagcagattttgtgtgtccatggtggtttatctcctgatatcaaaacactggatcaaattcgaacyatcgaacggaatcaggaaattcctcataaaggagcattttgtgatctggtttggtcagatcctgaagatgtggatacctgggctatcagtccccgaggagcaggttggctttttggagcaaaggtcacaaatgaggtaaagccaacatttttggaaatgtaatttgtggattgctaatgggctgcatagagaactatggtggccctagataacaaacttgtagtctagcttactcaaaatatggtggctgtggatattaaatttctagtttagttattaacgtatgtctttctttaatggttaaataagatgacacagtgaaagcacctactccagcatccatttggtaataatgtataaagtaaatgttctttccttttttttttgtttttgagatggagtcttgctctgtcgcctaggctggagtgcagtggcgtgatcttggctcactgcaacaacctctgcctcccaggttcaagccattctcctgcctcagcctcctgagtagctgggaccacaggtgtgcgccaccatgcctggctaatttttgtattcttagtagagatgggatttcaccgtgttggctaggctggtcttgaactcctgacctcaggtgatccacccgcctcagcctcccaaagtgctgggattataggtrtgagccaccgcacccggccagcccctttcctttcaagtactgtagttaagtaacaaaatggcaagaccaagataggcartacttttttttttttttctcaaagacctcaaatcacacagatacagacactttattagtttcctctacaagagacaataacatgaatctttttttttttgagacaagagtttcgctcatgttgcccaggctggagtacaatggtgcaatctcggctcactgcaacctctgcctcctggattcaagcgattctcctgtctcagcctcccgagtagctgggattacaggtgtacaccaccacgcctggctaattttgtatttttagtagagacggggtttcaccatgttggtgaggctggtcttgaactcctgacctcaggtcatctgcccaccttggtctcccaargtgctgggattacaggcgtgagccaccgcgcccagcctacgtcaaatcttttttttctttttaacagaaatctctgttcatttgaaaagccaaatagatccaaagaaagaagatgaaaattaaatacttaaattaatcaaaaggcactatgataccacctaaaacctactgccacagtggtagtaggctaaggaagatcaagctacagcaaatcatgtaatgtgaatgttagcgattacatagcaggaagcacatttgctttccagaagactacggtacagtgttcatttgggcccaagaggatctttggccaggaaaggatcaagatggatgaaggtaaagccaaatcaaaggagtaggtacaaaagagaatccaagctacatagtcaagcagatgatgatggatcaggcttcttcctcccaagaaacatttgctgcgctgtgctgcctcccccctcaaccaccccccacyccctaccccatggctgctcaagcccaactgcctactcctgccttacagggtgctcagccaccgggactaggtttggggttgcccagggctcttgccataatttagcatagaccttggggagaactgctcacacatgggttggctttgctgctggttgttctcaacaaagaaaaccctgaagcattcacatgcagagtagtctgagcttctccagtcacagtcaaacacccccacacaacatcctcaaaagtctgaaatcttgtaacagctgagctatagttaaagctgcaaggctcacagaatcatcaaggaagccagaatgagacaatgcagataggaagtcccagcagttaatctcaatccttctttcttcatttcggataagctcagatatacctgatgtgggatatasmaagctacwstggagcaagctgggtcttctgctgaattcgtcatcaaataccaagggaaaacaaggggtggggtggattttattcttaaaaagcctcagaagttactgtattataaagggacatgactgaataggtaagaaacrgattcttcattgtgaattttcctgatggcttctgcaaggctcatagagatgttgatcacctgtattttggaayggtgcttcatcttgtcctcctggggtatgttattggtgactactactgctttaaagcatgcgttgttgatgtgagaaatagctggaccagagaagattctgtgagtcaagatagcataaactttggtgactccagctgagagaagtttgtcagctgcatggcagattgtgccacaagtgtcaaccatgtcatccgcaaggatggccaccagatccttcacatctcccacaagcaccatgcggtcgacttcattggccttctttgtgaatcaaggcaaagtccacattcagcctgtctgcaatggaggtcactctcttagctccaccagcatcagatgaaacaatagtgcagttcttctgctcagagatattctcccttatccacttcaggacacctggctctgcatacagatagtccactgggttatcaaaaaagccctgaatttgagaagcatgtaggtccatggtgataatatgatctgcgcctgccacagatagcatgtttgcaacaagcttggctgagattgtcacctgactctttattatcctgctgggcataagggaagcatgggatgactgcagtaagctggctcgctgaagcagtcttgcaggtattagtcatgatcaaaggcaccattaaattgtcattgattttgccacaaccactctgaatgatgtagacatcctttccacgtacacttttgccaatttccacacaggtctcctagttgctgaatttctcaatcactgccttgccgagctccaggcccaggcgatcggcagttttytgagataagccctggtgggagctgccgctgaagattttgatattcaggatcctggccaactaccctaagcactcttcactaagtgatcactgctgctgcagagactgcaaccaaagtcggcccagagactcaatactaatctctttgcgatgctactccgccatcttcaagataggcartactttgaactttcaactgttttcagttaaaacacacacacacactttgaactttcaactgttttcaattaaaacacacacacacwcacacacacaccccttatattgggaagtgctccagcatcataatgaagtcaaaaaactagattctgatcctgcatcagtgtatcttaatttagataagttatttatctagtctgagcttttgtttccttaagttgcaaaagaataatctctttcagaattattgcaacatctacatatactaaaccttcagtaaatggtagatactgatagcaatatctttattattaaatcagaaaacacaaaattttgtttcatagtacctattgaatgctttttcttccagaaatttctaactgtttatgtagctgtacagtttccatagttgtgcacttgactcaggccaaaattgctgtttgcctaaacttattaaattgttggagataattatagagtgygttctataatcttgatgcctttagtagtaataggatttggtattttatttaaatgattatgtaggccgattgttttttaagtgctaagtacttacagtgcctttctaaattgcagtttgttcatatcaacaacttaaaactcatctgcagagcacatcaactagtgcacgaaggctataaatttatgtttgatgagaagctggtgacagtatggtctgctcctaattactgctatcgttgtggaaatattgcttcgatcatggtcttcaaagatgtaaatacaagagaaccaaagttattccgggcrgttccagattcagaacgtgttattcctcccagaacgacaacgccatatttcctttgaggccttcgcccatcctgctgacccatttttctgccctcttcttaccccaattttcttgtattaccctctacaatatactttttattgagcactttgctgctgaaatgctgcctcttgcctttttttttttaaattttaaattatctaaatttattgtttgttgtggtgtctatagcaaagtttttctatcaattttcccccatcccatccccaccctggactcatttgagaagacttgagaaatgtcttaatactcacactgctgcatgtagctcttgcttatttactggtctgggaaacaggatgtgtttcctttttttaaaagccaattgacagattacacctaaatactcctccttttgtatcattcagccttttgttttagtttggtaagttttaagaaatttcagcagcaaagttgttattcagtgggcacgatggactccaaatgcctcaagttatgtatacctgtcccagatgtaaacttcattgtcctttgttggatgatattttaaatggatataaaataaattggtctaaagggctgccctccttgttgtgtttttaaattttagttaaaaactgctacagcttatgactttgtactttaagataattgtattgatcttttttcagattccttgtattttttaataaagtaatcttaaataaaactcagataggttaagtgttagaaattttaaacagcttacattgttagcgtaaagttatcttttcttttttcctaatcagagttcttgaccctttggttattgagtttaaaacttcaattgaaattcaatagtatttatttttkaaaaaaatcactaaactgtgcctaaagaacataactgccatattaatgttttggtttatatcctctatagtaatagaaaaacatttaatacttgtaatgctgaygtgttaatttgataccagttgagtagaatgtgatcaatccagtttacaatctatcatgagtattattaactaaaatctatgtgcttttcaataggaatcattcttctcttgctgtaacacttgaccttaacttttagaaagtgttcatttttaaactgcaactggaaaggttgaaaagttaggactcttgtatttgtgaactgtaatctgaagcagattatttaaagtgtagaaaaagaaacaagttcttcttttttgcaaaggtctgtgataccatatttcagctttgtgtaagtaatttgaatatccaaagggttgtgatgatcagttctgaatatgcaactgtccacttaataaggacaagtattccagtatctcttatgactgtagtcataaatgatgttggaatgtacattttgtgaaatagttggtatccctttactatgattaatttttgttattccaggaaatacttgtgaagccagccaattaataaagcactttagcatctgttcaggtagttttgaaaaccmacttttccccttcaggataagaacttccaggttacctaaaaatgcaataaaaatctttatagtctaagcttcttggcatataatttttcatcarggttttcttttattaattgagcacaatactgttttgatttaatttttttccctcaaaccacccagctccttacatagtttttaattatatagctatmtgaaagaggtggctaagacatttgctgcacacacttgaactaatgttgggtcagtagcttcgtgttactgccctgatcccagtgtaattcaggtggaaaggtatttttatctcacagggatatgtagctatgtattttactaattgtgaaacactggaaattaatgatgcagacaacttggtgtggtctttgaacagctctctgcagtatttttttttttcctgttaccataaattgtatttaagtgcttgctttccacttaagttgtactaatagaaccggtaactcccagccctccctgtttgacactccttagcttagattgatgtagttgtttttgttatccctataatgtgacttttatttttaagtcattgtgtactgcatttgtttgtcactagttgggcacgtgccaataatattctctccattccttatctgccatctctgttttgcctgatttctcttcaactgaataatggctttttgcatggaaaaaatagtttttactattagacgtgtaaagggaagagagagctaatgtattggactttgtgagcctacaaggaatattttggatccctccaataaataagggctatgtactatatgtactatatagagttatcatgtggtggaagatacttgcaagtcatagatttatgggcaggaggatttgttactscctatatctaggctgaatgtaaaatcccttatgttgtatcaatgggggtaaaaactatttttatttgcctatgatatacttggtttctaataaagtgccctaggctctagtgagaactgkctactttgaattgccatttactccctttcctcctttggccgatatgctcttggctagctttttataagttaatgtgtttccccaaaaagtttcactactttatattcatttgagtgtgatcctaaaacacctggatcaacagtacatctcatatgcaatctgcatcagctcctattctgtctggatgtctagaactgttggaagattttgacgtcttaagccctaggttttgctttgggaaataaggtttgaaatattgttcattgcattaagatttgtgtgtgtgtgctttgtaagcccagaaccaggttttggaaaatgcctgtactgtgaaagcaaattaggactctttctgagcctctttcattgtcagaaatagaatcactttccatcagcttccaggaaattgtgtrtctggagtcgaagagatttracatcaagaatccagatttttaaatgtaattgttttttaaatgctaatgtttgtaaagcaccttcagttcttcggatgaaaggtgctatattccctcagtgtaaattaataaaaagrttacaggaagtttgtcaaaaaattcaatgcatagtctgtagtatgtcctgacaagaagttagcattttatataagaaattaaaaaatgcttattcctccacttggttgcttgactggtgaacaaaagtgaaacctttttttttttgttttgcatttgactctgagctaagtgttccaactctttaaaggcaatgtttattgttacaacctcgatccagtgcccagaactatgcttcrtgagatcatcacaactctttaaattgtatatttacagtgtgtagtgatgctgacgaaatacacggtagtaaaccaaaaagaaacatttggaaagtcccctagcatgatgccagacacactagatgcttggggaaggttggttctgcattcccctcctgttttctatttccgtatcaatttattggtgaatttgtgccctcatgagagtaggcttatgctggcttagatcattcaaatgttttcttaattcaaaaatgcatgacatttatagatttgtgttgtcaacaaaaatactacrtaagtatattccactcaatccctaggcacccactatgctcagcagcactgtgcttttgtatataaatggtgggttataaaagactgcatggaggcattatggaatagcacmggctttgggatcagatctgggtgaaaaccccagctctgtcatgcagtaatagcaactaacctgtatacagcatatgtgctaaattgttatgttctctattttgtgatgcccttgctgtatgggtctatgactatattaccttttattttttttttttcttggtagagatggggtctccctatgttgcccrggctagtcttgaactcccggctgaagagatcctcctatctcggccttccaaagcactgggattacaagcataagctactgtgcccagcccaaacttcaaaaaaattaataaatcttgttcatccttctctagaacttttctccccctagatgaggaaataggcttagagaggataggtgacttgtctaacgttgcacargagagctggaacttgaatccctagagggcacaccagagtatttctttagcgctctattttaagcaatattggttattgtagttgtgtgaccctgaacagattgaattttctgaatcttaagtttctgtgtctaaaataagagaatatcaggcagggttaatctcactattaaaaatagcacacacaaagcacccagtatctggtccaaagctgccttttattaagggctcatactcataggccatttgttcaaattcattgtagttgggaagaataatccaaggcaatgtataattgctaacatagtgtagattttgtaagtacaacacatctggacaaggaaatgtttgatgtaggatggagtaattggggaagataaagaggaagtgtgaattaagtgtggactggaatgatgggatttgtatgtcttacagagttaaaataagcagagatcacttggacacaatgtgaagactcgaggatcctttttgggaaggcgtaagaaatgaataggtcctgttttattgacaatatctgccatatatcagtgaggattggtcaattatggaagatgctaaaaagcaggcmatggatttttaataaggaatataataaatgtatttcaagattacttccctagtgagttgatgatcccccttcgtctgacacaaattattctcgagttctttcctctctctggcttgataatatgggtggaaactgttagttgagattgaggtgatttgtggttctgtgactttaggattacgtgaaatactaatttgggggaccaacagagatttgacattttttcaaagcaatttttcaattcctactacaatttaccgtcagtattacttcataaatggaaagtcattttaccattaaagatgtaggtaggaccatctcagaagaaaagacaactctttacaccaaatacatttggttttgtgaaaaactagtatcctaatttttgccgcttatggagatcaatgagagattttccccaccccaatgttgacatgtactactcgacgctgtcatattattgaggcataaaagatgttctaataaaatggaagtgacttaagagaaagttttatgcctcctcccaactctgaacagatgctgagaatataccaaacaagttcacacaggagtagagatttagagaggccttcccaccttcaagaattttataatacgttaatgagctgagtcttattttcaaggatggctttgttaaagcagaagaagggtaactatgcttatgaaaggcagttttgcatgcctgtttgtcaaaaaatacagtacaatttattttaaaattgattaattggtgtagaacttgcaatggtcacacaatcaggatggtcagcttccattcagggatcaaatttgtccaggcctttcaaaatggaacacgttgcttttagtatggcattggttctgtttgtagtgctgatttttctttcatggtaattaaaaaaaaatcttactttcttaaaagcctgcacccaagctagtgagcttttctgcagaggattgagcatccaarccatgctttattttggtggattcttagagttttctggctgggtcctttttgaggggtagctgtgagctgtgagacaatttcagcaagatgtagggacaaggatcgcattcgaggtggcttaaaaggaaacacgtttgtgagagttgcctcactgtctcacctgctagargaaattgggagatttcagggcttgttttcggtcctggcgtggtgcagaggtggaggggcgccagcaggtgtgtggtatgcaggacgcagagccaggagaacctggggcaggtgtctggagccgggggtgcagttcctacttttagacgcatggtggcgctagggtctcctccggccctgctagcaatctctaaggcacctccgccgccacctgcagtctcaaccaaacctctgggtgggcagcgcgggatgtgacgggccgagcgtccaatcgactgacagatttccgtccacactactgctctagccaatgggagccgaggagaggcgcggaggaggcgggccccgcggcaagcctggcagaggcgcgaggccctcctcccgcctctccgcctactccagcctccgccgcctcagcttcccgagcgagccctgcggccgccggagcagctcccgcggcggagcaggagccggatggtcagaggagcccggcagccccagcagccgcggagtcgcctggcccccaggtgcgggggctgggtggaggccggggttggggatggggtgggggccagggagcgggcccagggscrgcggctcggggcggtggagcattcggggcgcagagaccggaggggcggggggtgcaggctggggggaccttgggggcgcctgcaggcggcggcgcgggctgggcgcgatcgcctcctcgaggccaggtgagaggggcgtgtgagggaaggggcgccgaggggtgaggctggcggcgcggggccgggaggggcaaggcgggcgcgcccccggaggggccgtggaatgcgggggtcgccgggcccggagaggcggggcgtggagggggcagtgcacggtcgggaacgggtgggcacaggaaaggggaggctaggggggcttgcgggggtgacgaggcagacaatgagtaggtggaggtgggtgattttggggagctgggctgtgacgagcaggggtcgaggatggggtgagggaccaggaaggtttgagctcagggggaattgggggaacggtgagtcccaggaatgctaggtcttggtaaataggggaaacagggcatgaggcgtttgtaaggtcagatctgggcttggcgagcctgtggtcccagagggtggtctatttagttcttgactggcacggtagcgccgggagatgttttcttgtatgttacttttagttaccgtcttatttgtttggtctgcagactgactggcacagtggagaaaccgcctcgaaaacggagaagcaggtaaggcagtgccttcctattttgcttcatgtttttctttttgcttggctgcacctgtgccgtactgcataattgtatactgtcagtagatgaagtttcttatttatcccccttttaaaagaatataaccacatgcatgatttttcttttgaggacttcaaattactacctstacagtcgattttttttttcttggtatctaagataatgtgggaaatcttgagaaatcctacttttttactttttgatgttgtgtaaggatctcagctatttttttttttaaccttagccataatttcattttctccagcatctctgtttaaaaagctcatcttggctggggtggctcatgccttcaatcccagctctttgggaggctgaggcaggaggatcatttgagcctgggagttcaagaccagtctgggcaacagagcaagactccgtctctacaaaaaattgaaaaactagccggtcccataaatatatacacctactatgtacccacaaaaacaaaaaattaaaaaaacaaaaaccaactagctgagcgggtgttgtggacctgtagtcccagcttctcaagaggctgaggtgggaggattgcttgagcccaggaagtcaaggctgcagtgatgcagtgagcygtgatcatgccactgcactccagtgtggggaacacagcaagaccctgcctcaaaaaataaactaattttattgagcatctactatgtgccaagtactgtgtacgaatgctctatgtgtatcttctcctgtaatccycaaagaaccctaagagaatatgtagtgtcactattttacagaagagggaactgcgacacagagaggccaaatatttacccaaaatcatgcatctagtaaaagataaaaccaggatttgaatccagacagtctgactccagagcttaagctcttaactgttataccataatgctgctaataaatatgcaattgaaagtaggttttcttattgctttatcttttgtcgttggacactgtgtagttaactcgaatggttgaaccttaggaaaatagaagcaaagagtttaagtagtccacaaacaaagtgaattagtccttgagtaatggagatgaagatatatttatcacataaacatttttgactgcattccatgtgagaggtactacatagcaattctgtgtagtcattagatgattcctttttcacagatgttggcattgacctagagaaagtaagctactgtagttatgtgaccagtaggactactttcatagttaatatctggcaagttaatgatgttaatacacagaaaacctcaatagtaaatagacacgaaaygctgatggtggaagtgccaacagagtttccttgtcacactttaggcctgtactgtccaatccagtaaccatatgcagggtgagcactcaaaatgcatctagcatgactgaggaactaaatttttaattttatttaattgtaattaaattaacttgagaaactgctacttgatcasctattggaaaacgttcaagtatgttttgaacaacttgggtatgtgagtctgtatttttcatccgtcattttatgaaatctaagtatatatcaaatatttccaatgagaatttagggtctgaaatgagataagtataaaatacatgctagatttcaagttagtacaaaaattgaataaataaaatttctcagtaactttttatattgatgacatagtgagayaatattttaggtatattggagtaaatacttttttttttttttgagacagggtctggctctgtcatccaggctgtagtgcagtggtgcaatctcagcatactgcaacctccacctcctgggctcaagccacccagccaattcagcctctggagtagctgggactacargcgcctgacacctcacccagctcttttttttttttttttttttgtagagacaaggtttggccatgttgcccaggctggtctcaaactcctgggctcaaatgatccaaccaccttggcctactaaagtgctgtgattacaagtgtgagctgccatgcctggc

SEQ ID NO: 10008 - DNA, 36929 bp, Homo sapiens
gacacggttctggtgaaagaaatataaagtggaaatctcctgaggctgtctcttccctttccaaccttttcctgtttggaacatgggcatgaagtgctaactgcaaggacacaaactattttgaggatgacggagcggaaagatggaaagaatctggactcctgatggcactgctgagacgccgagaagccacaacagggctgggctgcttacctctggacttcttgtcatctgagagaaataattctccctccttttttgggcttaggcctccatatttggggtttttgatatatgtaaccacatgcattcctgatacactaagctagcacttgcctgcaaccattctctctttctcttttgtttttttagagagatggagtcttgctaagttgcccaggttggtcttgaactcctgaactcaagcaatcctcccaccttggcctcccaaagtgggattacaggcataagccaccgcgcctggccrctattctctcttaaattctttctaagcgtctagtccaacttttttttttttcttgcctttggggccataatgacagaattggagtaattttatacttattaattataataattctaccagtaattattacttactgagtgcctcctgaatgttaggaattgagctaagtgattttattctcacaacggtcccaggaaacaaatactattattttcctcattttcagatgaggaaactgaggctcagagatgacaaatgactggttcaaattcacacagctagaattgaagctgggctctgaacccaggtctgccttacgccaaaactcctgctcttcatcctcagcatggctagttcaccaagcttagttaacaggtagggaaactgaggtccaagaggaagagttactagctcaaggtcatgcagtgatttcagggggtcatgttacaagaaatcagacagactgggtccccattccagggctctttctatgatatcctgctgcttagcaaatgscagggcctgaagtccaggctgaggtctggggatgatgggagctattgaatgttctaagcagaattaggagagtgttccacatgccagacgagggttgtggaaacacttcctcttccttcaactatggtggagaaggaagtggggtgagaggacttgtattttacagccccataaacttcctgagcaacgtcccctagccagagaatggctctttcccctggtttgtccgtcacaggtggctgagtcccctgatcccaggagctgatgtctgaggctctgcggattacactgatggtgggggctggctggggaggatgccatggtgtgaccactcagccatcctgtgccaagcagatggtgctggctgtctagtggagaggtctgcgggacagggcacctgcagtggaaactccccagatgaacttggggactctccacttagagtctcctgcttgtttatcttcttggcccattcctggcaggatttgggtgtttgtttaaggattcagggtttgagatccaagataaccagcgatgagcgtaatagggagttacacttgtaaatgttgaaatcatacaggccatggctcaaatcccagctctaccacccatatatagcctgtggtataggctatagcaagtcagttaattttcctgtttataaaaatggagacaagaggaacatctacctcatggggctgttaggagttataaaggggatgatgcaccaaaaatctttagcataatgtctgccacatggtaagtgccccagaagtggttaaaactcctcccacttttcttcctctctgcataatctacggacatctttgagcctcattttcctctttgcacaatggggatcatgataccttcttcttccagcaattgtgagggtttccatgagaaagggatgtaaacgcatttggtaggccgggtgtggtagctcatgcctgtaatcccagcactttgggaggccagtgtgggaggatcacttgagcccaggagttcaagaccagcctgggctacatagtgagacccccgtctctacaaaaaaacaaataaaacaaaattagctgggcatagtgatatgcacccggtagttccagctactcaggaggctgcggtaggaggatcacctgagcccaggagatcaaggctgaagtgagccaagttcgcaccactgcagtccagcctgggcaacagagtgagaccctgacaaaaaataaccaaaaccaaaaccaaaacattattttgtgactctcagttctcagcttctcagctgaactatgttgcttaaattggatcccacacatcgctccacaagccgactaccaccctagcgagcctttctgtttccttttaacttcaaacactcgttggttatgctggggcttgggtacaggtacccggtattccagaacaaaagggttgggccttgaaacctgactcttactggttgtgcatcttggacaagctgcttcaacactgggcctcactttctttctctgtaaatggaagtgatgatactgactttataaggttgttgagaaaaatcacatgtaacagtgcatttaaaacacatagcattctaccctgcacatagtagatattcaagaaatattagccattattattattacctccaatggtcaaccctagcctggttctgagtaggtaaagaggaggaggaagggaatttttcatgcaaccctcttgctcaggtagggagtagaagcgagggccaataaagaactagcattgagctcctactgaatgctggggatgctcacagggastatcttacttcatcctcacaacaactcttgcaagagtggcattattaaccaygtttttacaggtgggggaactgaggtccacaaagggcagtttkctgcttaaggtcacactgagaggtcaggtggggtggaggactgggatttgaagagatattggattgagtccagagccttcctgcctgactgagaagctgcctacacaggtggggccgggtggggctgggtccatgagtgattcaggtaagagtcagctctggttttccaaatagtgggtggggcccagcaggagtgagacctctccaggagcattacaatccaggctgtagctagggtgagcaggagggcacgtgattggtgtggataatggggagggggctatgcagagagaratcctatcccttgttaccagtggggtatagggaaggaggtccttgctgccttagctgggaagggctcagggcctggggtgaagctgggcctgtgggacagctgggggtgctggcccatgggacaagctggagaaggcagggaaactgaggcargcagtgatacttttggtggccgtcacagcagatgggtggttggcagtcacttcgatgaggctggtgctggacctggtctgtttttttaatgcattcactactcttttagatactcattcatttctttgttcaagcaacaaacattccctggatgtcttttatccgccagatcctatgcttggccttggggctacaagagtgaccaggactcttatagcctcataatgtttgggggcagagggacaatgtgatcaggagtggcactgctgtggccagggaaggcacaggggcttcctagaggagagaagggggaggaggaggcatgttagaggaggcctaccaggggacatgggaggtggacttgccctataagtggaagctcacaatcttgaggactaggatggtgacaccagtcctaggcatttagactatagctttgcagtagggagcaggaaaaggtggccctgtgctgtggtctctttcccagggctggggcaagggctaccccagacctctcccctgtgtatccagctgcatgctggggcggttgggggtgctggcccatgggccaagctggagaaggcagggaaggtttgatcctcctcattccttgaagtggatcaaatacaagaagcccaaattcaaattccacctacccatgccagctccccttccctggatattaccaccagcattgagccagaaggctaggtgtcctcagcacctttcttcccctaagctctagtgctaatcggtcaccaagccctggcacttctgccaccatttctctcatctaccttctccccactccatgctcttggtcctgcctcatccctggagggctgcctcggcaccctgcctgctctctcagactccatcctctcctgtattgcagctgtgttgagatctgyggtgctggtcacagagcctggctgcagtgagggctcaattgctccatgctggaactggaccagtcctcagagaccatctgatctgctcattctgttgttcaaatggggaaacagaggcccagtgaggcctagcggcttgtttaaggtcacrctatggaagaagtgacttgaactcacttctgattctgaggtgaaggctcttcccatyagtgccagggccacacaagtgtttcttgttttgagtgcagatgggtggcttggaagtcagcaggaggcacaggtgtggtgacttgatgggctcagggcccaaagggagggagggcctgggagtggaagatggaacctcattcawgcccgtctctcctttcttctcaccagaaactccccctttctttggacaactggacccccacacctccaccctgtccccatcccttttgctgataatcccatctccttgccctgtaaatgctagggggcccttgatttggggaggaagggaaggctgaagccggtcccggcaccctgagagccccagggccctccaatgccccactccttctccaggtctgccctggcttgctctgtctccctagggcagctggcttttgtcccaggggagcatgggaacagcttgggtgagaatgggggaggggcttcccagcaggtttcacctctcccacctggcataatttctaccctgcacccagtgatgcccaggagccagcacaagaacctctgagctctcctgccggctttccccactgtggggcccacaggatggctgggtgtgctggggaaactgagggagatgacttgtgggtgccagcrccatgggactttgggtgatcttggacctattccttcctccttctaggwgcttcctgagctggcgaaaaggagagctggatgctgggrttctataaattcggcggtggatgtragtctagctacagcatggaccctggccagccctggaatctgagttcagagatctttgaaaaaatgccttccgataactgagcacctactacatgctggrcactgcaccaggagatttgtgtgcattccctcattgaatcttacaaccaccctctgggatggtttttgctattaagccgattttatagatgagaatactgagggctagaaaagataagtaccttgtccaaggtgacacggccagtaagctgtggagtctggatttgaactaggctctcttggagtttggagcccggtcttttcatttctggcagagacctgtggcttcagggggcggagcccagcccatgggggaagtaagtccttcctgttagatctgtctgaggagtagtgagtttctcatctaggaaaccatcagcaggccaggctggactgccccatttctagccccctttcttctctgcagactgccctgtttctagccccytttcttctctacccttttctgtagagtgcgttagacccattttacagaaggggactctgagaccctttcttctctgcggggcagggtatgtggttcagacgagccgcttccatccccagttctgtccctaagccctgggtgacctcagcattgagcatcgtctctgagcctcagtttcctgtctatatctagtgccaccaggcatcagaaacgtaagtgcttcaaggatcttgggtgaaaagccgctttagcggcgagcatacactaattaataaaatgccttggccggggctgggcagaggaagtaagcgggcagccgaggtgacagctggagggaggagcgggggtggagccgggggaagggtggggaggggatgggctggasctccgggcagtgtgcgaggcgcacgcacaggagcctgcactctgcgtcccgcaccccagcagccgcgccatgagccgtgagtgcgaccccggtgcccggtggggaattttcttggcctcctggtggagccttgaatgccaggctcagcccctcatctctctcctctgcagggagtctcttgctcyggttcttgctgttcctgctcctgctccygccgctccccgtcctgctcgcggacccaggggcgcccacgccaggtaggcggccccatccctccccaagggaatccccggtcttgcgcccctggcctggtttcaaccccctcctttcccctccagcgggcccagcttcccctttctgctcgcggtgctgagaaagactgaggctgagtcttttggtgggatgggggctccctgaagcycccccggcggtgyggccttggctaatgggctatctagttctttcaggggaaacagcagactgggatctggtgccaacttggggagaagggacagtccctatccatccccctcacctgttctgggccccagatgtctaagcagcctctgcacccaacaaccccgctgtttcctataggggcctctttgggaggaagccgcaggcaccaagggaaatgagttccctttctccagcctctaaccgtctgggaacccatcctgattcccattgccagtggagaaggtctcccctggtgaagacttcgggagaacatgggagatggaaatacatttaggagccgggatgcttcatctggggtttaagagatccccattgagcaaatgaggaaaccgaggctcagtaggtgccatgattccccaagctcacaaaatacatggtgggcccaggatctgaactcaggtctgtctgcgtccacacacttcgcaaggtctttccacagaaagctgcttctacccacaatggaccckgagccactctgggtttcatgggggaggttgatggggaaattccgcccttccctcccccatgcatgtgccaggttccaggtgaaggaattcagctcctcsctcagccaaccttcctcccccagctcgctgcttgtgtgtgtgcgtgtgtgtgagcatgtgtcccagttggatatartttcctccaccacctagctgtgtaaaatctctaaaatgaggcccagagagggcaggagggagcagagggagtccgcactttctgctgtgatgctctaaggatctggtgcgtgggggaaagaggaaagatatgtacatggattttggatcagaccaagtttcctgaaacgggctttgggtgggtggcatttaggggacccaaagagaggacggagggtgctctaggaaagggwttgcgttgaataaaagtctggtttatgggaagaggaggaggaagactcatgtggccagcactttaaagtttacaaaggttggttgtggacatccacctctttggtgctctcaacagccctgccagagagatgcgttagacccagtctacagaaggggactctgaggcccagagggagtgaagccacttgtctgaatcctcacagtgagctggtggtggggagtagaaggggctcttcaggttgcctcgctgacccatcttgtcagtccctggatcagcccagcacttcctctgaggccccatctggcctcatccaggcacycttggtatacaggtcccacccgtctgtattcttttttagtccattcactaaygcacaatgagccatggtctgtgctattttgttttttgccttttctgtttccttttgtataataaatgtttacacggaattgtttttttttatccccaagggttatttatgccagtctttggctggggcctggagacacggagctgggaggagctgacaggctgatggtggagccagaaatgccaacagactgtcatccaaggggaccagggctgtgcggagctcatgggaggragcaggggtatagggagcccagggaagggagcaggggtgtgcggagctcaggggagggagcagctgcctctcagtgcgaagaattgagggaggcttcttggatctgatgacttttggactggacctcgaaggaggtggcgggtgggggaaacactaagagactcgaccaggaaacaccgtaagggtaatgtggagcaggaggctgaggttggatgcgtaatgtggggatgagacyggaggccagaaaactggtaccgaggctcctgcaaggatctaggaaagaacraatgactggtggagtgcaggggcagaaggtctgggttgccctcatatttccaagtctgcgagtaaactgagggccaagctacttgggcatctgccccaggaagccaaagcctgtcttttrcctctagaggcaaaggagatgaagagatgagggctgcactcacctaagagggcaggcggagggagagaatgctgcttttgcctctctggkgggtgaggagatggaggccagcctggaggcaaggctgtgcygggggcgccctgaatgctcaagtacttcccctctagtctctggacttgactcagtgcccatcttctagatggggatagggcatgacctggcaaccagagctgcatgccaggcagaggagccccaggccagctgaccygggcacatggggcaagatsccagctgtgccaaggctgcccgggtgcctgcacctgctctcgccagcaccagttgggtctgtgggccgggagagggcttccccaccagcaggctcttccagctgctgggcccagttgtctggatctggtgyggtggtgcttaggtgtggggactggggcccaggccaaaccagtcagggttccccaccttttttttttttctctctggctgccaggtccccagagactctctaaatattaytctttaggggatttgggtcctgcctcttcactgggcartcttgcagcctgacrcctctgcatcctggaggacttggtgttccctggctgtgcctgtcccctagtcacgctcagtcctggacctggagccctgacttttgggctagggggtgttccttgcccaaacccttggaaaggtcctggaaccaggcagttctggacagtcctcatctgtggggatggggactagcagcttggcctttgggctgcgtgtgtctggyatgcagcgtggtgtgctgatcatctctgcctccgcgtgtcttggggactcagtgagagcaaatgggaaggttctctgctgatggggcagttgtgggagggttgtattgatacaaataatggagagggacagattggctctacccagagtagagggcctggacgtcgaaaggaaggcctcctttagcccgcctgctaaacccccttcatgggatatacagaaaaatgaggctccagaggtgggagggactcacccaagaatgcacagccagtaagagcagccaytctctaatacagctctcccaagcaactacttggtgcctggccctgtgctgagtatgggggactcaaagtgaattagacttggtacctgcatctccttggttttctttcttgatgaacaggggtgtcctccactgagcatagaactgagttggcrtgaaaacatgcaggattgaagttagaccgaaggaaggccttcctgtacgaatacttcctaaagatctggttgtggcaggagatggtgatccccctggggtcctggtttcattcgttctggattttcaaggttcactttgaaggaatgtgacaaatccaactcaactgggtcatcctcagtctgcatcaaagcgactctccctttccatcccttccccaaatccagtcctgggtacctccaggagtaggaggaggagggagattaagtcttggctccgcaacttcaaagcagtggggtctgggcaagcctcctgctttctctgggccctacattcctcattatgcaatggggagtctcacctacctctcttagggagtgctggggagataaatgagcrtgggtgtggaaggttgtggacttggtcggctggagccctggctttctggctgggctgtgatggtcaggctgtagtctagtggcacccagtctcctctccgcccaccctgacaccttggggcaccagcggcaggmccactgttgtccttcctgggagaacttttcctgccccagagcagtggtgtttatggaaagaacgtggcgggggaggcgggaggggggaagctggaygggccggmctgggagggaggagcctcagctcccgcacagcctctcttggcagggagggtgtgggcagccgttccagcttcagcgtctggagcttgtggctcttctgcctgccraggcagagctctagggccayggcgggaggccttccggctccacctcaracagctgttgagggcctggaagwtgagggactccttttggtcaggctggaggtgaccaatctcctcacttcattttatttattccacaaacattcgttaagctctggctaccacatctggatcccagacctggttaagccccaactgtgtgcatagcctgtgctgggggaagagaaagccttaagggaagcgggggtcccttctcctggaagcttatggtggagaagagcaggttgaattggaacccggagccagggcaagggagagtgggaggagggagtgtggacatttggggaagacttcttggggaggcaaggcgtgggctcagctgatttggaggaaatgtattaaggaggctaacagcctggatgaaggatggagatgctgagggtttggggctaagggaggggctggcgcagaatgttggagctgcacggacctctggagttcattttgagatccctgctgtggcagggatggggaaattgagcctaggggaggcctaacccctgtgcccttagagtggtagaactagaccgtgagtcctagcggacyttgtgtgccagggttgggagctgggcagtgggtgctacaggggctcctgggcaggtgagagagccaggccagcaggaggggcaagaagaagagttctagcagggtgacaagtcctttcttgggggaaccagacctctgagccagcacgggggctgctccagaggcttcttggcctttctgggcctgtggctgggggaggcgggggctggggtactgccaggccctttccctggatcytgcctgccaggtttgcctgtggctgcctgataaagcctttttgtccagccttcttcccctgacccctccctcctacacccctgctggggccattgtggggctgtggggagttgccagggcttaagcaaaactatttgcatgattcttgtggtccttgcttgtgtgtgtgtgtgtgtgtgtgtgtgtgtgtgtgtgtgtgtgtgtatttraggtggtgttgccgtcttcgaagtggggaccaagaggactctgctgcccaggtcaagccctgtgctgtgaagtgaggagtgaggagactgagaccagggcaggggatagggggcaggtcttgcccagggtcatgctctctgatcctagcaccctgagatgacagcatttcaccctcagctgctctggcctttcactacccttttgacctgcaataaccagttgcacaaagaatccatattccctgtaacgttggctctgagcccagataaggaagtatgtttgcagaaaggagcccggcgttttctgtgtaaggtcagagatggagcctcctgccaggcgctaggagtttttggtctgcccagctctgttctgtttccttggccaagttatcacctgtccctgaacctcagtttccttcactgaacagggtggtgggggtgatggtggatcctactgaacctgaggagtctgtaactttgctgctaaagaatcactgaggcagatttagcaagggggtggtggtctgagggatctgggttagatgccaagagggatttccttatagagtttctccaggaggcagcagggcggatgccagagctccatgcaccctcccaggagattttctagccctatctctcctrttcccttggtctgtgaccttcktctggatcctagagcccagaccccaccctgatgtgggccaagtctgattccatcaggaatgggggctraggcagctgagaccttggagtccccctcctcctgcacacccaccctctgtccccagggttctggaaaacttctttccttagacttggctgctgaggctgtgggggtggagtggaagtgaagggatgggcatttggtctggtgagacttgtggggtgataggtctggctttccctttttctggcttcaatttccccatctgcaatgtggacattatgatacctgctcttctctaccttctgcagaaatggaggaatggtgagggatctcgttttcctagtgttcatggggtggtggtctgggagaagtccccgtcctcgtcctcgtcccttttctgaccgcccccccaccccccgccccggcctgctcttgctactgaactctgactaggcaggaagtgaacgctctagaagcccgtggctgaggagttttatcagctctttcttaactttcagtgtcacagccggggaatcttctcctgccgccgtttggtggcaatagggagggagggggygcttcccctgggggcctgatgtgggctaggctggagttccagagcagggcctggaaatgtcaggatgggtggtttatgttcacagaggtgggaacaggggtccccttgggggaaccctgaagccctggcacccagtgattcaggacggagctgcgacttaagtccatgcctctggcccctcattcccccatcaggggctagatgggggtcaggaggccaccctagcatggtctctgacctccatttctcacccacagtgaatccctgttgttactatccatgccarcaccagggcatctgtgtccgcttcggccttgaccrctaccagtgtgactgcacccgcacgggctattccggccccaactgyaccatccgtgagctgggccttcagccctcactccttccrtcttgagcccttctgctccccgggccctttctcctagaccctaacttcctaccctcctctctgaccatggccctgttctccttccttgcctggttctgcccctctccctgacctggcttcagcatgagctctcgctcttggtccaccctcactccctgcttctgagttccatgrtgagtcttcaccacatgccctggcccctgtcctcacgcccggttctgtctctgtcatgtgtcattgctcccaaggttccatccttacccacttccccataggtgctactctgttccaccctggcccttgtcctcagtgccccatcttccaccctggctacttctggttctggtaggagggaccaactgagtgactsccattgcccctgcagctggcctgtggacctggctccggaattcactgcggcccagcccctctttcacccacttcctgctcactcacgggcgctggttctgggagtttgtcaatgccaccttcatccragagatgctcatgcgcctggtactcacaggtgggtgtggggcagggccccctgacctgggggagcaagcaagcctgctagtccttttggattcttggcatctgataagggtagtgggtggggagagtctatgatgcctgataaaataagccccaacccaggaggaggcaagaactgggatggagctgggggtggaaacacccttgtcaccgttatttttgctctctgcagtgcgctccaaccttatccccagtccccccacctacaactcagcacatgactacatcagctgggagtctttctccaacgtgagctattacactcktattctgccctctgtgcctaaagattgccccacacccatgggaaccaaaggtaaaatggggtgaggagctgggcctggggattacaggaggygctcagttcttctctttgggaaaaatcaggcgaagaacaattattgacccaattctgcagatggctagaccaaggcaagacatatgacatgtccagagcctgggctgagaacaggcaagggcagcagagggtcttgcctgaggtcacctagagtcagaccaatgtttccatagttccagggtgcctctttgcttgatccttttctaatgatcagttgggtcctgccggggtggaagtgacttagaagttgagatgtaggaaagaatagtgagctatttattgggtgctgtctctgtgtttgggtctttacagatgtaaatagttttacatgcttcaccagtgtaaggtacaaataagccacatttttttctttcgttactcaagacttcacttagccacactggcaggggtcttccttgtaagaccttcccatgccacctgtaattatccaaaaacctgggatattaytcatttcagacccatcagttcagcatcaagtacagagaggacaagagaggctcatcagtccactgctgctatacwccakttcctgccacatggtggcactgttgaatgccagtcctgtgcagcctcatggttatgtgcttttttgggttcaaaaccttgcaccatgtccctgcttgggtctcaagagcactactgtgacggttttccatcatatggttagctgcttttcccaaagcatgactattctaccaggatagctgagtcttgccaactttgctgaaatcatgcttgcccagtgtcagtgagtgatgattccaaattacggttgacagatcactccctctaacttcccttttggtggattttctttaggggtacttgatattttttcctgccagaggaacccagtcagccatcttaatccaagtaatttccattgatcttgaaccttcaacatcagggctcacatcttgatgcattgtgaagagatgcctttaccagaactcaaaaaattctattcctttctgtgagggcaattgggtgacaactcatttgacactgacataattaaggaaggcctctcaatacttattctaaggatgacttgtctttatgccagacatagaaagattggcatcatttaaaataggttsacacacctattttaaggggagcaagcaagcctgctagtccttttggactcttggcatctgataagggtagtgggtggggagagtctatgatgcctgataggtggtggtgtggtggcacacrtctgtaatcccagcactttgggaggttggggtgggtggattgcttgagctcaggagttcaagtccaacctggatgacatggtgagacaccttgtctacaaaagaatacaaaagttagctgggtgaagttgtgtgtgcctgtagtcccagctactcaggaggctaaggtgggtggatcaattgagcccaggaggtcgaggctgtagtgagccataattgcggcactgcactctggcctgggcaatagagtgagaccctgtctcaaaaatwaataaataaataaataaataaataaataaataaataaataggttggcaaactacagcctgcaggccaaattcggcccacctctccatttttgtaaataaagttttattggaacacagccacacacatttgtttatgtgtcatctgtgactgctttcccgctacaatagcaaaaactgaatagatgtgacatgtctgtatggtctgcaaagcctaaaatgtttactatctggctttttccagaaaaakcttgctgacctatgatttaaaaaattctacccactggttctctgccatgcttacattatctctygcagtcctcagattcactgtatcaaatgggtatcatttgcccctttttaaagatggagaaattgacacccagagagatgagatgayttatctgtattcacacagctagcaaatagcatagtcagttgcaaacacaggctaccttgactcagggcaaggragttcatgtttgtttttttctgtttctttatttctttttggtgaaatgtttcattayggaaaaattgcaaagatacacaaaagttgagagaaaagcagaatgaactatgtacccatctttcagtttcaacatttacccacagtttcttcatcttatttcatttstcccctctcatatttttataaagtattttaaatcaaattctaaaaatcatgccacttaaaattctaaaaatcatgccacttcacccataaatacttctagggtcttttggtagagagtgggttacttggtggtggtggggaggtggtcctgaggaggccactctgggcttcctgcttgggccagtttgcctggtgagcccagatgtccccagggcagcaagatccagataggagaagctactgctgtttcctaccccccaaccagggaagaagcagttgccagatgcccagctcctggcccgccgcttcctgctcaggaggamgttcatacctgacccccaaggcaccaacctcatgtttgccttctttgcacaacacttcacccaccagttcttcaaaacttctggmaagatgggtcctggcttcaccaaggccttgggccatggggtgagtacctaggaggggctcaggactgctctggacctaatttggcacgcrtatgtcatcgacagtgggccggcaccctggtgacctgagggaacccctctctgtccacaggtagacctcggccacatttatggagacaatmtggagcgtcagtatcaactgcggctctttaaggatgggaaactcaagtaccaggtagtgctgrgccagggggtagggcagagggaggggtctcccatggtcttccctggcaaagactgcttggggcgggggtctgggtcatgtcctgagagggccaaccacgggagtgggargcttgtgccaggagcgacagtatacgctgggaggaggcagcaggtatgagaagccagggaggagcagacgtggcctcccatgtcagccagggaggtggattttggagctcaacaggagatgaacatttgtagtctgcatttatttatttaattattccacaatattaattggacacgagaatatacctggcacaggtgattgagtagtgaccrttatagttaatgggccctgccctcaaaaaaccacaggcaaactctaggatgttcattctatgagsgcttttgtttaaatcagaacggtccaacagaaatataatgtgaaccacatacatagttaaaattttctaatgtccatattaaaagagggaaaaagaaacaggtgaaatgattttaataatacattttacttaatgcaatatgtccaggtaattagcattttagcatgtaatcaatacattattaataaaatatgtcacattcttttttcatgctgaagcttcaaaatctggtgtatatttcacactcacagggcatctcaatttggatgctctattttcactggagtgatctaatctgtattaagatttcataaaatgtacagctgaataagtagagtgacatgtccgacttgttccacgcatacttaaaggttttccaatagctgaagtatcagttttaaaattcaaatagaaattaagataaacctaaataaaataaattaagtaacattcagttcttcattcacactagccaaatttctagtgctcagtagcyacacgtggctagtggctaccayattggatcgtacaaatcttaggcaagcaccaaaacaaagtttgatgctgaatctttagggctaagaacagtacttggcatgtagtagtctcttggcatgtatttactgaatgaatgaagaagctgccatataattaggtacacttgtagctgccaccaaggagaagctgtgagtgccactagagtgtttggatgatgggtaaaacttccctaggaagttacaaataaacccagagttgcataaaggatgaggaggagttagggatgctaagaatgggagagggctttccaggtagagggtttagcaagtacaaaagcttagaggtggagaacagcttggtgacttggagggagtgtaaaaatgggagcgtttgctgagcctagtgatsgagcgtaagaatgactttacaggaaggtggagatgtctgtggggrccgtgttaaggaattctactttctgccaagagcagagagagtatttggaaaggttttaagtcagctcatgatgcaagatttgttgtttttttttttttaagttttttttttyttttttttttttytcttttttgcttgggtgcagtgcaragactggcctgtctggggataggagtggaaatagggagcccacttagggaaaggagtcagagtggaaratgagcggrggttgcttgaggtagtgrtggtagagatggagagcaggggactgattttaagagacattttggaggtggaatcaacagccttggctgaggggaactggcagctggaggcaggagtgggagggagttggttgtgggcagctgygggtgacccccaaccccaggttgccaggtggccccatcccacaggtgctggatggagaaatgtacccgccctcggtagaagaggcgcctgtgttgatgcactacccccgaggcatcccgccccagagccagatggctgtgggccaggaggtgtttgggctgcttcctgggctcatgctgtatgccacgctctggctacgtgagcacaaccgtgtgtgtgacctgctgaaggcygagcaccccacctggggygatgagcagcttttccagacgacccgcctcatcctcataggtgaggactccagacctgccctgccctggaaggtcattccctccatcctgagaagttgggggcgggggggtacttaraggtggaggctgggattagaatcctcacccttctgcttagtggctagaagaccttgagcaggcccctcaacctctgtgagcctcggtctccaaatctgtamgttggggtgaacgatgattgtaaggatttattgagatcatgaatgggaaggcaactagcacatagcaggccttcagaaaatagatgactgtgatggttgattattagctgggtgactcagcacatttgattagccaccctgagtctcggtttccccygtgtgctgcrcccggatgcatacttgtggtccccagcacgtgcagggtcaaactgtaacttgcccggccttcaggaatcttcatgttcccttccctgcatgtrtctacyttcctgcagtttggtagcttctaggtgactcagggacaggatatttttgtgttccctatgggggcgagtctgcaacctaaaatgtcagatggtttcctgcctgggagcttggcccctgacatccctgtccagaccatgttcgctctgagtcaccagtaactcccttcccccacctctggcaccactgggcatggctggtcccaattatagagcctaattcacyggagccatgaagagccaggcattgggaataggaacagtcattagagggaagaggggctggttctgaagtttcagcgttgcaaagaccttgacctgagagagctggaggctgtccagcacactggctggagatgaagctgtgaccaaaggcaggaccctagggcaccatttaactcccctacaacctcatgagcygggtatgattaccctgtgaaaatcaagattcagagaggtgaagtgaaytctccagggacactcagcagatggagacttgaggtckggttgccaccaaaatctatgctacttccactccatcacaaagggggctcttcttgaatgggaaggggttgcaaacctgagtctgatctgtgacatgtgagtattggaaagggattccccctcgcrtctacacttagtattcctacttttggctgacatatatggacaccccgtcttatgccaggcactgtgccagcagttttgctgtattcattgtctacttctctcaacaaccctaatatagtattgcattgatgttattattattattatttgagatggagtcttgttctgttgcccacacagtagtgcaatggcgtgatcttggctcactgcaacctctgcctcccgggttcgagcaattctcgtgtctcagcctcccgagtagctgggattacaggtgcccgccaccatgcctggctaatttttgtatttttagtagagacagggttttgccatgttggccaggmtgatcttgaactsctgacctcaggtgatccacccgccttggcatcccaaagttctgggtttataggcatgagccacagcgccyggccgcactgatattattataacacacattttacagttaaggaaagtgagattctgagagattaagtaactcagcccaagctcaggtggctggaaatggtaaakccaagatttgaatccaggtctgctgatcccacagtctgtagctccaggtcratttccaaaagccaatttgtctaatggctaattggcctgcatatcagtttctttcaatatctagttgcccagttttaattttgttacagaatgttcaatttgcattttccctggctttttgctttctagctggttatagctacaaatggggcagaggaaaaacttatttataagaatcctgttrtataagaacatataggaaayatgttttttgaaatatatttagggctagkctccccttctrtcctcagtattctcttttgccactgcagcagctctgagtggtctccttgaagtccccctctatcaccgagggtgtcagcatgatgacagctctcaccagtaaatcctccacttttccatcttttgtagtctctccaccttcttttaatgggcttcaggagggaggtcataagaccaattcttggacacctcctttgcatgtcctgcttagctgggcctagaacctccctctgaaatgtgggagtagctggtgctcttgtcttgagacctcagtcaaaatagaccaaaagttctattttcacatcctgttacaaagagacaaaatggaagaggccaaacaaaattaaacatcaacagcaaggccaggtgtggtggctcacacttgcaattccagggcttttgggaggctgaggtgagagaagtgcttgagacttgcagttcaagaccagcctggataacatagtgagaccccatctcttaaaaaaaaaaaaaaagaaagaaagaaagctgggtgtggtggtacacctgtggtcccagctacttgggaggctgaggtgggaggattgcttgagcccgggaaagttcaggctgaagtgagctgtaattataccattgcgctccagcttgggtgacagaccaakaccttgtctgtaaaaataaaaataracatcaacagcaacaacaacaataaagagaccaaargcaagcacctctcatgaactggcctgctttccaagctgggcatctaaatcactgtgcttggctgaccctatttccaatcctgccctgcccaggggagaccatcaagattgtcatcgaggagtacgtgcagcagctgagtggctatttcctgcagctgaratttgacccagagctgctgttcggtgtccagttccaataccgcaaccgcattgccatggagttcaaccatctctaccactggcaccccctcatgcctgactccttcaaggtgggctcccaggagtacagctacgagcagttcttgttcaacacctccatgttggtggactatggggttgaggccctggtggatgccttctctcgccagattgytggccgggtaagccccagaggagtgctggtgagggcaggtgggctgagggatccagcagacctgggtccaaattccaggttcttcttctgtaaaatggggctgatgtcacttctacagggcagttgtaagcattcctgtgtgagttcattggttcatttgtccattccacaataccagacattactccaggtactggagatgtagtgggaacaagacttttgtggttcttggctcatcttttagtgctcccaccctakaaagtgatggcagtcatacgacagctgacagcattagggcccttactgcgtgtcaggcactgttctaagagcttctcctatgttatcagaattctaagagtatgttataaaccatagtagaaaagcccaccatgctctgggagtcaggaagggacatctgacccagagttgcgggttatgggaaaagaagggatgtccaagcagaaattggaaggagggatakagattkcccagggtaagaggtggtgttagtggcaggggatggctgtgttccagatagagaggacggcatgggtgaaaggcatggaagtcagaggacatggcagtttgaggaacagaaggacattcagggcatggtaatgtatgtaacagtgcccgcctatggtgtttattaaatcataagcctccgctctgggctgaattgtggctcttttaaagttcgtatgttgaaatcctaaccgccagaaccttagtatgtgactgcatttggagacaaggtctttaaagaggtaattaagtttaattgaggtcattaggctgggccctaatccagtgtgacttataagaagaagagattaggtcacacacacagagggaaggccacatgaagatgtagggagaagaaagccatctacaagccaaggaaagaggcctcaggagataccaaccctgctgacaccttgatcttgaacctcyggtctccagacrgaggaaataatttctattgtttgagccactcaktctgtggtacattgtcatggcagccctagcaaacaaacacattctctttccctggaattcccagccaacrccttcctcaatctccccttctccacattcggaagctcccatctgcttcatcgcagtctctggctcccctgttgcctcacagtcctctgcttctctctaatccttgtccctaaaccctgtcatgaagctgtggcacacatggatttccatttccttctggtaatttgactgaaattagcatttgctgccccggtgggcagctgctggctgctttatggcctctttgtcggtttctttatggttctttgtggggacacaagacatgaacagagacaatagcctttgtgtgaggctggatggttttcagaacgttttcaaggaatgaccatgatgatgtacgtgaaaagccccggcrtcgtacctggcacaaggcagaaaggccgcagagatgtatggactgtcaagattktttttcttttttcttttttttwaaatagagatgggrttttgccatattgcccaggctggtcttgaactcctgggctcaagcgatctgcccgcctaggcctctcaaggtgctgggattataggcgactctcaggatattaagaagagtgagtgatgataagacagggcttcccctgataaccattgtccatggctaccctctcaggggttcccatgtgaccaatactgagataacagctttgcatagtttatcccatttaaattgaccacagccatatcaggtagatgctcttcccttccccatttttacatatgcgggaactcaaacttagcttgaatagctgcccaaggtccctatattagtttcctcaggctgctgcaacaaagtaccacaaactgggaagctcrgagcaacagatggaggctagaagtctgaattcaaggtgtcagcagtgccatgttctctctcaaggctctatgcctccttggcatctggtggtggccgacagtccctggcattcctcagcttgcagaggcatcgctctagtctctgcctttatcatcctgtggtgctctccctgaacttgtctttcctcattttataaagacaccagttattggattggagcccaccctaatccagtaggatctcatcttaacttgattacttttgcaaagacttcatttccaaataaggatgcattcacggatgcagagagttagggcttcaacacatatttaatattttagggaacacaattcaaccctcaacagccccacagcttgtaaagctgtaattggcaccatcctctgcttgctttgctcatattatttcatccaaccatgcctttcttttttgcccaattatagttgttgatcaaaatgactatctcttaagcatgaacgttattatttcatcctaagcaccagagctttcttttctttcctttttttttttttttttttgagatacartcttgctctcttgcctgggctggagtgcagtggtgtgatttyggctcactgtaacctctatctcctgggttcaagtgattcacctgcctcagyctcccaaatagctgggattacwggcacctgccaccacgcccagctaatttttgtatttttagtagagacgagtctttgccatgttggccaggctggtcttgaactcctggcctcaagtgatccacccgcctcggcctcctaaggtgctgggattacaggcacaagccactgtgcctggtcagcaccagagctttctttagactaatgcgccttaactgttagtaatcagaatctttttctgcagcttttttatcttgccaggttacctgggctttgagttctattttccctcccttcacagggggttacactacctcttggtgtaattcaacggwctggggagcagtgtgagccacaaaagaggtcctcttggcccattccacacttcaaagatgaggaagctgccggatgtggtggytcatgcctgtaatcccggcagtttgggaggcygtggtgggaggatcatttgagaccaggagtttgagaccagcctgggcaatatagtgagacctcacctctacaaaaataaaataaaacaaaattagccaggcatggtggcacgtgyctgtagtcctagctacttgagaagctgaggtgggaggattgcttgagcctgaggaagttgaggctacactgagtcaagatcatgccactgcactccagccagggcaacagagtgagacagtgtctwaaaaaaaacccacaaaaaaaaaatgaggaagctgagactcagaggggcttcctgagasagcatgacagcagcaggcccggggcaggtctgcagcatcacaactgctaggctgcccaacactctccatcctagctcagaagggactcccactggaagctcttgtcccaggaacttacccaggctccaggacagcctggcctggctcccagaccactgctgtgcttctctctcggcagatcggtgggggcaggaacatggaccaccacrtcctgcatgtggctgtggatgtcatcagggagtctcgggagatgcggctgcagcccttcaatgagtaccgcragaggtttggcatgaaaccctacacctcyttccaggagctcrtaggtgagcagctgtttcctggatgcagtccctgcccttgagggactggcagcaaagtcagggagacatcaaggaaatagaacgggacaatacatgcggcaatgtgtaacaaccagacttataatgggcgtggaagtgctgtgccagggtggtaaataagcctgcttggggagagaaggtgacttttcagctgggtttggagaacaaatggcattttcagtgggagaagagagggaggagtgttttaggcagagcaatagaaagtacaaaggctgccgggcaaggtggctcgcgcctgtaatcctagcactttgggaggctcaggcrggtggatcacgaggtcaggaratcgagacyatcctggctaacaygatgaaacmccgtctctactaaaaatacaaaaaattagccgggcatggaggcaggcgcctgtagtcccagctactcgggaggctgaggcaggagaatggtgtgaacctgggaggcagagcttgcagtgagctgagaytgcgccactgcactccagcctgggcgacagagcgagacwccatctcaaaaaaaagaaagtacaaaggcatagaggtcagacagcaggtatctagggaaacagtcatagatgtggctggggcaaggagcttatgttgtgggaatgattagtgatgggaggttggggccaaaccgtgtagaatcttggttttcatactaaatattttgagttttatttggtctartgctttctaagtacccacttacgggccagctgcataaaaatcatttagaaagctgattaagataccaaatcycagatgcctctcctacrgattctgattcaaccagcctgggtggtgcccaagaatctgcgtattcatatgaataaagtatatatacatatatatgaatatatatatgaatagagtatatatacatatatatcaatatatacatatacatatcaatacatatatacatatacacacacatatatatgtgtgtgtatatatatactatatatatacatatatatatatacatatatatatatacatatatatatacatatatatatacatatatatatatatatacatatatatatatatatttcccccaatatcctcagatgttgggcagccaagtttccagcccttgtcacatacaatggggagccactgaagcaggtgtgacatggcccatgagagttcccagtggaggatggatttgaggaactgggcagggaagcagggaagctccatatttgtctccccttggccacatgaacatgtggrtattgcagagtggagcagattctgtgcatgagctccttgtgatcctggaacagcatcttattctttactctcccatgacaaatggtccccgggggcagaaggaacactgccactgaatttctgtgtgagctcggacatgttacatctttgagctctagtagtaaaagggcttggcccaggctaaggtcttgaaatctgtctgtgaaggaagccagatggggagcattctcccttctgtgatgatcaggtaattagggcccagagttgctcaaggttataggctgtttggtggcagatctaggcccctgactttctctttagtagcattttccttccctagacccagtccctgaggaggggcaatttgtgcttttcctcttgacccttttccccagtgccaaccakgccaaattctagggcacatgctcagttgctcaagttagtctcctggagtccctattatccccagaaaaaggtggacctggaagggtcccgccccaggttgaccttaatggcatcatggatctgaygctagcatttccccttatctccttgtaggagagaaggagatggcagcagagttggaggaattgtatggagacattgatgcrttggagttctacccyggactgcttcttgaaaagtgccatccaaactctatctttggggagagtatgatagagattggggctcccttttccctcaagggtctcctagggaatcccatctgttctccggagtactggaagccgagcacatttggcggcgaggtgggctttaacattgtcaagacggccacactgaagaagctggtctgcctcaacaccaagacctgtccctacgtttccttccgtgtgccggatgccagtcaggatgatgggcctgctgtggagcgaccatccacagagctctgaggggcaggaaagcagcattctggaggggagagctttgtgcttgtcattccagagtgctgaggccagggctgatggtcttaaatgctmattttctggtttggcatggtgagtgttggggytgacatttagaactttaagtctcacccattatctggaatatygtgattctgtttattcttccagaatgctgaactccttgttagcccttcagattgttaggagtggttctcatttggtctgccagaatackgggttcttagttgacaacctagaatgtcagatttctggttgatttgtaacacagtcattctaggatgtggagctactgatgaaatctgctagaaagttagggggttcttatttkgcattccagaatcttgactttctgattggtgattcaaagtgttgtgttcctggctgatgatccagaacagtggctcrtatcccaaatctgtcagcatctggctgtctagaatgtggatttgattcmttttcctgttcagtgagatatcatagagacggagatcctaaggtccaacaagaatgcattccctgaatctgtgcctgcactgagagggcaaggargtggggtgttcttcttgggacccccactaagaccctggtctgaggatgtagagagaacaggtgggctgtattcacgccattggttggaagctaccagagctctatccccatccaggtcttgactcatggcagctgtttctcatgaagctaataaaattcgctttctaaagttacctgttatatatctcttttggtcccatcctctaaagcagaggcaacactggaacatggctagcctttcttgtagccatggctgggcgtgctagaggttgcagcrtgagactttctgctgggatccttgggcccatcactgtatagacatgctaccactggtacttcctttctccctgcgggccaggcactgcccttttcaggaakctstcttaaaatacccattgccccagacctggaagatataacattcagttcccaccatctgattaaaacarcttcctcccttacagagcatacaacagagggggcacccggggaggagagcacatactgtgttccaatttcacscttttaattctcatttgttctcacaccaacagtgtgaagtgcgtggtataatctccatttcaaaaccaaggaagcagcctcagagtggtcgagtgacacacctcacgcaggctgagtccagagcttgtgctcctcttgattcctggtttgactcagttccaggcctgatcttgcctgtctggctcagggtcaaagacagaatggtggagtgtagcctccacctgatattcaggctactcattcagtcccaaatatgtattttcctaagtgtttactatgtgccagttcctgtaacaggtgtggggacacagcagtgagtaatcaatacagacaaggttctgcccttatggagctcacaytccagtggcagacaaacagaccataaataaggaaacgatgaaataagatatatacaaggtgagtgtgacttcccttctaacccyctctgctctgtcctcccctattgcgctctcaagaccagagacccaacagcagtgatctcagggcagacagccctccactccagctctgagacccttttctcaggacctctgtaggcagcagagagagaggacagaggggtaagatgaggggttgagggaaggttcttcatgatccacactttgggcttagtatttctcaggaagagctatggcccagaaacaacaggggaaactagagttcggtctgacagtccttggggttaagtctcctgtcttatggtccagaaactcctgtttctccttagttggctggaaactgctcccatcattccttctggcctctgctgaatgcagggaatgcaatccttccctgctcttgcagttgctctgacgtagaaagatccttcgggtgctggaagtctccatgaagagcttgtgtcctgtcctttcttgcagattctatttcccctcttctgctaatacctcttactttgcttgagaatcctctcctttcttattaatttcagtcttggtggttctatcaggggtgcattctggccaaggggtgggcctgtgaatcaatcctgggcaatcagacaccctctccttaaaaactggcccgtggagactgagatcactgactctgactcatccccacagctggctctgacaagatggtccatttgttcctgcttccgagatccccagggcagcctggatccctgcccttctcaagactttagcttttccttccatccggtggcctattccaggaattcctcttttgcttaaatcagttggagtttgtgtctgttgcttgtaatmaagcctttatggctgctgggctgagtgacacaagcactttaatggcctggagggacttttaatcagtgaagatgcaatcagacaagtgttttggaaagagcaccctygagaagggtgratgacagggcagagcaggaaggacaggaagctggcagaackgaggaggctgcagccgtggtccaaccaggagctgatggcagctggggctaggggaagggctttgagggtggaaggatgggatgggttccagaggtattcctctcttaaatgcaagtgcctagattaggtagactttgcttagtattgacaackgcacatgaaagttttgcaaagggaaacaggctaaatgyaccaagaaagcttcttcagagtgaagaatcttaatgcttgtaatttaaacatttgttcctggagttttgatttggtggatgtgatggttggttttatttgtcagtttggttgggctatagcacmcagttatttaatcaaacagtaatctaggtgtggctgtgaaggtatkttgtagatgtgattaacatctacaatcagttgactttaagtgaaagagattacttaaataatttgggtgagctgcacctgattagttgaaaggcctcaagaacaaacactgcagtttcctggaaaagaagaaactttgcctcaagactatagccatcgactcctgcctgagtttccagcctgctagtctgccctatggatttgaagtttgccaaccccaacaattgtgtgaattaatttctaaaaataaagctatatacagccatcctttggtatttgtgggggatttgtttcaggatctctacagataccaaaatctgtggttcctcaagtcctttatatgaagtggtatagtatttgcatataacctatgtgcaatctcctgtataacttcaatcatctctagattacttataatacctaatacagtgtaaatgctagttgttatactgtattttttctttgtattatttttattgtatttgaatattttgatctgcatttggttgaattcacagatatggaacccatggatatggaggatatgtgcacatatattcaggactgaatatatatattatacatatatatacacacagaactgaatatatatatatatatatacacacacacgactgaatatatatatatatatatatatatatayacacacaggactgaatatatatatatatatacacaggactgaatatatatatatatatacaagactgaatatatatatacatatacaagactatatatatatattcaagactgactatatatatattcaaggctgactatatatattcaagactgactatatatatattcaagactgactatatatatatattcaagactgactctctctctatatattcaagactgaatatatatatatatatwtttctatctctctaataatacaagaacagaaaaccaaatactgcatgttctcacttatgcgtgggagatgaatgatgagaatacgtggacatatggtggggaacaacacatgctgaggcctgtcggagggtgggaggtgggccatcaggaagaatagctaatgttaatacctagctgatgggatgatctgtgcagcaaactaccatggcacacgtttacctgtgtaacaaacctgcacatcctacacgtgtaaccaatatatgtatattattattcaagttccaataatcaaataatacacaaaccactgtattatttgattattggaaatcaaataataataataataataataataataataataataatatacatatattctgttggttctaattctctggagaaccccgactaatacaatgggtgattcattcaggactctcaatgcaaacaacagaacattctctagcctgtataagcaggaaggaatttattataggacattacatagctcatggagccactgggaggaccagggaattaggcttggagggtttgcacctaggaatggtggccactgtccagtggagatgcctctactactgccatggacacagcatctcaaatgacacctttgctgcccaaaccccactactgctgccttccaaaacaggctgcttctacagccacttttgctggaaaatggaatctgtgtgatacttgcttcctctcttttctctacttagaattaaaattatctttattttgtgtcggattggtggagcccagctcatgtgtctgtactgcagctacaagaaagaatggaaagtgagttttctggtttgtgccttgaaaaggaggaacccmtrataaggaaaattcctcatacataggraaggtgttcaaaggggctgggaaacgtggaaagtctgcttcagtgaatctgaattttcttagttctgttctgcctctgtgggccctatccctagaatgttacaaagaccatcacaatggccttactgttgacctggtagcagctcgatatagttgcaagcaaagagcttaagaagtgaagttatgtawttatrgaacaacagagaaacaaagactgttgggtacacacagtccactcttttagtaatttttgagttaaaaaaagtgtcagaaacgcaggaggcagagcaagaaggcagaatagaagcttctaccaattgtcttccccacaggaacaccaaatttaacaactgtctacacaaaaaatgcaccttcattagaaccaaaattcaagtgaatgattgtagtacctggttttaactttatattactgaaagaggcactgaggagggtaggaaggatggtcttgaattgccagagccatccctccccgatccctggcagcagccacatggcacagagaatctgtgtagggagagtgtagtggttgtaggactttgtgttagaactcagtgttgccttgttacactggaaagcaacaccaggcagaactcagctaatacccatgagggagaatttagatcagccctagccagaggggaascatccatcccagttgctgaatgggctaaagggctctggggttctaaataaacttgaaaggcagtatagrccacaaggattacaactcctaggaaagtctgatctgygcttggagccagtggacttgaggggcatgtgacctgctgcgatagccaagggagtgcttgtgccacccctctcccaaccctaggcagtgcaactcacagctctcaaagagactccttccttcagcttgaggagagaagagtaaagaggacttgtcttgccacttggataccagctcagccacagtagtttagggcaccgggcagagtcctgaggcacccattccaggacctaacttccagatgacatttctagacatatcctgggcttatatgggccatataaggcagaagggaacctgttgccttgaatgaaaggatctagtcctgatagtattcaccacctgctgactaaagtgcccttgggccctgaataatcagcagcagtagccaggtagtacacactatggcccttgagtgagattctgagatgtgctgacttcaggtgtgacccagcacattcccagctgtggtggctatggggagagactccttctacttgagaaaagcagggggaaaagtaaaggggatttcatcttgcagcttaggtactagctcggccacagtggggcagagcaccaagtgggctctcagtatccctgattccaggccttggctctcgcacagcatttctggacctgacctgggccagaggggagaccactgccctgatacrtgagtcctaggtctggcagcattcaccacaagcttcctgaagagctcttggccttgtgtgaacattggtggtagccaggcagtactccccatgggcctgtggtggtgctggccatggggagagactcctctgcctgtgggaaggggagggatgagtgggaaagacttgacttgtagctttgtctgcagctcagctgcagtagaatagaacacaaggcagattcttaagattttcaactccaggctctggtccccaaacagcatctacggacctgcttgggggaactcgctgccctgaagggaaggacacaagcttggctgacttactgcctgctaactgcaaagccctaaagccttgagtaaacaaaggtggtggtagccaggtagtggttataatgggccttgggtaagaaacagtgctgtgctggcttcaggtctgacctagtgcagtcccagtggtggtggccacaggggtgcttgtgccacccctcccccagttgtaggcagctcagcacagagacagagagactctgtctgtttgggagaaagtaagggaagagaacaagaatatctgcctggtaatccagacaattcttccagatcttatccaagaccatcaagtggtacctctacaagtctgcaagagccacagcattactgggcttggggtgcctcctaatgctgatatgactatggtgaccaaaaacttagatgacaacacccaagtcccttcgaatacctggaaagccttcccaagaaggctttcccaagaagcccagactgcaaagactaccacaaatatctaacttttcaatgtccagacaccagtgaacatccacaagcatcaataccactcaagaaaacatgaccttactaaacaaactaaataagtcatcagggatttatcytagagagatagaaatatgtgatctttctctatctctcagagagaggtcatatatctacacctctaggcttttcagacagagaatttgaaatagctattttgaggaaactcagtgaaatacaagataatacagagaaggaattcagaatcctatcagatcaatttaaccaagatattgaaataattaaaaagaatcaagccgaaattctgaagctgaaaaatgcaactgactactaaagaatgcatcagagtctcttaatagcagaattgatcaaagagaagaaagaattagtaacatttctatgtgaaaacagtgaaaattctgaaaatagtaatcccatttacgatagctacaaataaaattaagtacctggaaattaatcaaagaagtgaaagatcttgacaatggaaaataaaayactatgaaagaaattggagaggacacacgaaaaacagaaaaatattccatattcatagattggaagaatcaacaytgttaaaatgtccatacaacccaaagcagtctatagattcaatacaatccttatcaaaataccaatgacattctccatataaacagaaaaaacaatcctagaatttatagagaaccacgaaagacccagaatagccaaagctatcctaagcaaaaagaacaaaactggaggaatcgcattacctgacttaaaattatactacagagatatagtaaccaaaatagcattatactggcataaaaacagacacatagactaatgaaacagactactgaacccagaaatagatctatacacctacaggaactcatttttgataaagttgttaagaacatacattgggaaaaggatagttaatcttcaataaatgatgctgggaaaactgaatatccatatgcagaagaatgaaactagactcctatctcttgccatatacaaaaataaaatcaaattttgaattaaaagcttaaatctaagacctcaaactacaaaaccactatgcaaaaactctgtggaaactctctaggacattgaagtgggcaaagatttcttgagtaatacctcacaagcacaggcaaccaaagcaaaaatggataaatgggatcacatcaagttaaaaagcttctgcacagcaaaggaaacaatcaacaaagtgaagagacacctcatttgccctgacatgattattatgcattgcatgcctgtatcaaaacatctcatgtaacccataaatatacacacctgctatgtatccacacacaaaatatgtctcacacaaaaatatgttagacacgcctacaacccacttttcaactttatcatgcttttcctataaaaatggactctaaattaaaacagctatgtgtgaatgacagaaagaaatactaaaacttaaaagatacttttattgagtactattaagagaatcacagtgaagcactttcttcactatcttatctgttattcgtgtttcattcaaagttggtttccctccacacttggtcaaaatacgtcttttgctttcaatctttatcctttagtcaaaagggattttgagccatttgtacaattgcagcttgggtttcagaacgatgtggcagtacacccttgcaggtttctgtggcaggtcggtctccctcctgccttcaactggagtataacatacagcaaagagcattaatcttaagtgcataattcgacatatttttacacatgtataaacygccatagaaatcaagatatagaacattcccagcactctagaaggctcttttgtgctccttcccagtcaaaaaccactgaaaggtaaccactattttcacttttatcacttttgattaattttgtctactcacgaacttcatttgaatagcgtcataaagtatgtacttttttgtgtgtttggcttcttttgctcaacataacgtttgttgacatccatgttgctgtgtatatcagcagtttgatctttttattgctgtgtaattaacgtatatcacagttgatttatctagtcttctgttgatggacatttgggttgtttccattttttttactattatgaataaaactaccctctatggtagattttaactcttttttttttttttgagatggagtctcactctgtcgcccaggctggagtgcagcggtgcgatcttggctcactgcaagctccaccttccgggttcacgccattctcctgcctcggcctcccgagtaactgggactacaggtgcccaccaccacacctggctaatttttttgtatttttagtagagacggggtttc

SEQ ID NO: 10009 - DNA, 39243 bp, Homo sapiens
tagtcaaggataatagtctcaaaacaattatgtaatcttcctcatttttcatttaaaaacttttgttttcctttatctccctgaatatgcacatagtttactatggcacgcaaattcccattgcgatgccctacgttcaaataaatacctttttcttttagagaacctctttctgttttttagtttgacaaagcacttctaaactctttggaatttgtgtcttctcaaacagggactatttctaaactattccttccccactatcactgtcttcccttttgtttctctatgtggtgcttgttactttttagttttaaaaaaaatgtgcggtgaaatatttaaaatatacagagagtcataaagaataatacaactctccatttgcccaacatccagcttaagttataaaacattgtcaacacagtgaaatccacagtatatccctcccctatgtcttcctctgctgccccttagaggaaatcatgttcctgaatttgtttattcccaggcacttcctgtaccattactagatgtgtatttagtcctaggcaatacgttatgtcattctgcatatttttaagctttgcaaaaatggtattgtgctatgtgtattcttctgcaacttgtaatttttttcatttctattatgagatttatccctgttggaatagtagctctggttcattcatttttacttatgtatagtagtccactcaatgaaaataacacaatctatctattttcctacggttggacattaaggctttatccttttttcttcttttattttttttgccattcaaaccatgtctgttatatatgtctcatggagtgcagacacaataaccctctaggatatatacttagcagtggatcccaggatgtactctcttcaacttcattagatactgccaaattactttccaaagtgtgtccaccagcaagtgtttatgcatttcagctgttctacatccacaccaacacttgatattgacaggtttttaattttttaatttctgtcaatctcaagagcataaaagaaaactcatttctatattaaattgcatttacctatttaccagaaaattggagcratttttttttcttttactttttttgagacagagtctcactctgtcacccaggctggagtgcagtggcgtgatctcagctcactgcaacctctgcctcccgggttcaagtgattctcctgcctcagcctcctaagtagttgggattacaggcacawgccaccacacctggttaatttttgtatttttagtasagacggggtttcaccatgttggtcaggctggtctcaaactccygacctygtgatcctcctgcctcagcctcccaaactgctgggattacaggcgtgagcccccactcccggactctctctctytctttctttctttctttctttctttctttcyttctttctttctttcttcctttctttctttctcyctctctytcttccttccttccttccytccctccytccctccctccytccttccttccttcctctttctttctttcctcccttcctttcctttctttcctcccttcctttcctttctttcctcccttcctttcctttctttcctttttttgagacagggtctcattctgtcgcccaagtaacgtgatctcacctcactgcaacctccacctcccaggttcaagtgattctcctaccttagcctcctaagtagctgggattacaggcatgtgccaccacacctggctaatttttgtacttttagtagaggkggggtttcactacgtagggcagacttggagcaatttttcatatgaatatatgctatttctattctctcttttgtaaattgcctattcttctttttggccatttttttctatcgagttatgtgtctctttctcattgatttctaacagtttttacatattctggatactgaacctttgttggctatgtgtgttgcccatactttctcctggtctatggtttaactttttaccttttagggtgtgttttagctttcttttatacttcgtgcttttatatctcattaagaaacttctttctttctttctttctttttttttggagatggagtcttgctctgtcacccaggctggagtgcagtgrcacgatctcggctcactgcaacccctgcctcccaggttcaaacaattctcctgcctcagcctcccgagtagctgggactacaagcacacgccaccacgcctggctaattttttgaattttagcagagacgaggtttcactgtgttgcccaggctggtctcaaactcctgaactcaggcaatccacctgtctcagccttccaaagtgctagtgagccaccgcgcccagccttcattaagaaatttctaccatgaattcacaaaggcattttctaatattttattcttcaaggttttaagttttgccttttcacatttatgtctataatcctcttggayttacgttttcctttatggtatgaaatagagatctttttttatcacatacataatcaattgtccttaccccattcattgaaaaaataatcttttccccactagcagtaagataacacataccaaatttatatatatatacacacacacagagacacaaacatggtatgtgtgtatattggttgcctattaatgcacaacaacttattccaaaacttagcagctgaaaacaataaacatttattatctcacagtttctgtggtttaagaatctgggaatggtccagctaggtagttctggatcagggtctctcacaagacagtgactaagaggttggccaaagcagcagtcattttgaagctctactgaaaaaggacccacttgcaattttactgtgtagctgatggsaggtgtctggccttcactggctgttgaccagagacattggttccttgccacatgcatctctccttagagttgctcacaacgtgacaasttgcttaccctccaagtgagagatcaaagaaagtgacagagctcccaagataagaatcacaacatttcattctctaatctcagaaatgacatgaagtgacactttatcatgtctatcatgctctttgtatcagaagtgagccaccaaatccagcccatactcaaggttagggaagcagacaagactgtgaagacccggaggtggggatcattggggttatcttagagtggtctactacagtttccatttgttgatctatgccagcctccctaccatactgtcttttttttttttttcatcctgtcttaattactgtagcttgtacaaagtcttgttatccggtagagaatgttcccctacttaattattattcagtatatctttcctatttggggccctaaaaatagaatgtagaatctgcttgttcattttaattgaaaacccctgggccaggcacagtggttcatacctgtaatcacactttggggaggccaaagtgcgaggatcacttgagctcaggagttcaagaccagcctgggcaacatagtgagatgctgtctctacaaaaactaaaataaaataaattatctggttttggtggtgcatgcctatagtcttagctatttgtgaggctgaggtgggtgggtgggtggattgctggagcctgagaggttgaggctgcagtgagctgagacagcaccactgcactccacactgggcaacagagtgagaccctatcttgaaagaaagaaagaagaaagaaaagaaagaaagaagaaagaaagaaagaaataaagaaagaaacaaataaagaaagaagaaagaaagaaagaaagaaagaaagaaagaaagaaagaaagaaagaaagaaagaaagaaagaaaggactctgttgggatttttattggaatttcattacatgaacagattaattagtaaatgaattgatattttatgatattgagtcttcctattcatttacatgctttatatctcacatagtctgagaagctcaccagaaagattagtgcaaaagggctgggaacagtggctcatgcctgtaatcccagcactttgggaggycgaggtgggcggatcacctgaggtcaggagtttgagaccagcctggccaacatggtgaaaccgtgtctctactaaaaatacaaaaattagccagcatggtggcaggtgcctgtaatcccagctacttgggaggctcaggcaggagaatcgcttgaacccaggaggtggaggttgcagtgagccaagatcacaccactgcattccagcctgggcgacagaggaagactccatctaaaaaagaaaattaatgcaaaagaagacaatttgggggtcttttcaataattcagtggtaacacacagtatatggagagtttgtgtattgctccaattcccgagtttaaaaggtttaaggtctagttccatatagaagtcctgcagttctaatagactgtgttttgatgaaatatcctcagtaagttagtatgaggtatgcacaacatttctgctgaaatccttatcctgcctatcattttgcagtggacatccatggttcagtttgcctggcaatcctcccttctcataagaacatcatcgctcttcttttagggaactaacagatcctccccaaactccaatcaggtggtcctaatccaggttgccaatcgcagtgcttcaatcacaggagtaagcacaggtcctaggccaggccaatcacagctccttcttggattttccaatttgataaaatccaggctggctggataaaatccagagggagagtttactcccactcctagtgagagaacagctgccaaatttctagtcttatggagctggtgtctgacaaactgaagctgmgatgcagaaaaaagctgagatgagagacggggacatcttggtggtggccaggtggctagtgccatatacatccctgcccaacctcattttggttaggtgagcaccagtcattcccatttattcttttaacaacaggaagtatttaatgagcatctactattatgagccaatcattgaagacacagtgatgactaagccttccagtgaacacaaaatatatattaatgtaaaaagtactgcaagttatggacatttggaacctaagtaggcaaaccatgacttaaatctcatttaggctgggcacagtggctacacctgtaatcccagcactttgggaggctgaggcgggagggtcacttcagcccaggagttgagaccagcctgggcaacatggtgaaacccccatctcaaaaaaatacaaaaattaactggtcttggttttgcagcctgtagtctcagctaatcgggaggctgaggccagaggacagctagagccccggaagtcgaggcagcagtgactgcagtaagctgagagcacaccactgcactccagcmtgggcgacagagcgagacactgttaaaaaaattaaaaaaaaaaaaaaaagaaagaaagaaagaaaagaaaaaagaaaaaggaaaagaaaacttatttaattctcaacaaatcctgttaggaagctcagagagggtcagtaattattgcaagtttctagcgctaatatatagcggaaccaagacttgaacataggttttcgactcaacaattgttttaattactctgcgctgcgtaaactgagaaacctctgaatccttacaattttaaaagaacaacttacagttttcagtttccaycagattccaattttctaccaaattgcagccctgaggtatgaatggttaccaaactttagttaaacaaacaaaattagctcattaagtaacagagaaaccactytgcccagcctgcattttttttttttttttgtatgagtttgcctcctttatgcgcaaggctccttgggagttgtagtctgaggcatagtcctgtgggtggaggcgctgactcactgggacccaatcagcagagagtcaacttgctctccgcgcagcgattggctggaagtcagcggtctcccgcccgcggcgccatcgcgccattcctagttaaggcggcacagggccgagkcgtagtgtgggtgactcctccgttccttgggtcccgtcgtctgtgatactgcagygcagccatggcagaaccgcagcccccgtccggcggcctcacggacgaggccgccctcagttgctgctccgacgcggaccccagtaccaaggtgggcacaggacmgaagggaacggctcccccagctcckctgggccgggaccgggccgcattctatccaaccccatcccgccgccgctgcaggtccgccggcctcgggcggacgggagtgtgatgggaagagggataatggtgtttgatggggcgatcgtggggcccgcgaagtgtggaggggatctgttgcctcagctagtttcaaagactgcgaccctgttttgaattggcttgtttatgttgcgacggtggctggaagccaggccaacccagggtcagctttcccaaatcagtcgccaaggcccacgagaacagtagtttcagaactcccagaaataggttcaaagatgcctgtcctgtaccagtcctgcccagcctcgtttttccttaccaccctgactgcagtcttaactcctgcaaactaatttgatcgctctaagtttaaccgcgcccagaatttcacttttgcttgcttggcctttgctgtgggtcacaacagcccttcttgccttcctcatcttcgtggggcccaggagagattacagaatcatagagtttggatctgaaaggaatcttagaaattccttctcttaccctctcgttttacagtaatgacccagtaagagaaatgacctgttgcatacaaaggctttcacttaccgaacatgtctttactgrgtaagaatcagtgtaactcactcaggtgtggtgtttcggttgccttgttaagatcagacacagttggcgggcgcggtggctcacgcctgtaatcccagcactttgggaggccaaggcgggcggatcacgaggtcaagagrtagagaccatcctaacacggtgaaaccccgtctctactaaaaatacaaaaaaatgagctgggcgtggtggcgggtgcctgtagtcccagctactcgggaggctgaggcaggagaatggcatgaacccsggaggcrgagcttgcagtgagctgagatcgtgccactgcmctccagcctgggcgacagagtgagactctgtctaaaaaaaaaaaaaaaaaaaaattcagrcacagtaaccgctgtttattccagtgaagtcatcagtgtctgtaaacacctttgtatttatttatttgactacatcatttgtaaattccttgaagattgaatatgtgcttcgtgcagacctttaaaaggggtagataagtggtccatgactctggtccctgcttgttctttaccttcagggcaaagagtcagacacatctcattgctaaaacttttgactagcacctggtacttggcttaggaaaaatgttagtcattgcaaaattaagggggaaggtaaaaaaattccgtcatgcccatctcacttgtatatcccttaatattaatacctggttttttcatataatgtaaattgagtcactcagtgtaaagtattttcccagataactaggggttttatgtaatggggttttcaaataaaaaggattccagggatatctttataaaatatactaagtaaatgtccttgcagcttaatttacattccacagtatctaaatttctcttgatgattcggagtaattaattttgagatcagtaatttttggccatgatggagacataaaatggaatacataataatagctggtatatattgagtgtgccaggccctggcttggtattttaagtacattgtttaatttaatcctaacaacaaccctatgaagaaggcataattatgatcttcattttacaaataaggacactcaggcacatagaggtgttgagtgatttgcccagggaggaccccacacttccaacctccaccctgttctgcttctggggtgctgactccagcagtaattttggaatttgccataaaggaaaataaaaaacctcaatgaasgctgggtgcagtggctcatgcctgtaatcccagcactttgggagagcgaggtgggcagatcacctgaggttagcagttcgagaccagcctggccaacatggcaaaactctgctctactaaaaatacaaaaattagctgggcatggtggcgggcacctgtaatcccagctacttgggaggctgaggcaggaaaatcacttgaacccatgaggtggaggttgcagggagccgagatcatgccactgcattccagcttgggtgacagagtgagactttgtccaaaaaaaaaaaaaaaaaccctcaatgaattaaattcagtttgatcacttgatacatttatgctatatgtaaagaagatggtaagtactttggggatactgggataaacaagatgaggttccctcccttcaccaacttatatcaactctaatatacaatggacctggggttagtgtgctattgaaatataaatcaccctgagagcaccctgggaggtagaggtttttaaaggtagcattagtggaatggggtatgcacagggtatttggagcctgaagacctgcatttgaatccccacttctgttgttggctgcagtgaccttgccagggcacttgggctcagtttgtagaaggagcataaagatatctcagagagctgctatgaggataaaatgacatgtattatgttctctaaactatgaagagtgatacaattcaaggttgtatttcagctktggggatcagggcacacatcaaaaagatggtggtgatgggcctatgccttgatagatkgggtaggattccagcagagtacatgggaaggcattctgatgaaggaaacatcttagcaaaaatgtgttttgatacggggggarcccaccccaatatttcaacgtaggttctttctattttccataagtattggccagctgagaaataaagagtacaaagagaggaattttacagctgggctgccggggggtgacatcacatatcagtaggacygtgatgcccacctgagtcttagaccagcaagtttttattaagggtttcaaaaggggagggggtgtaagaacagggagtaggtacaaagatcacatgcttcaaagggcaaaaagcagaactactaataagggtctaacaaagatcacaaggcaaagggcaaaagcagaactactgataagggtccaacaaagatcacaaggcaaagggcaaaagcagaactactgataagggtctatgttcagcagtgcacgtattgtcttgataaacatcttaaacaacagaaaasagggttcgagagyagagaagcggtctgaccacaaatttactagggtgaagttttttccccaccctagtaagcctgagggtactgcaggagacgagggcgtatctcagtccttatctcaacctcataagacagacattcccagagcgggcgtttatagacctcccccmaggaatgcgttcctttcccagggtattaatattaatattccttgctaggaaaataatttagcaatatctctcctacttgcacgtccgtttataggctctctgcaagaagaaaaatatggctctttttgtccgacccctcaggcagtcagaccttatggttgtcttcccttgttccctaaaatcgctgtttttctgttgtttttcaaggtgcgccgatttcatattgttcaaacacagttttacaatcaatttgtacagttaacacaattatckcagyggtcctgaggtgatgtacatcctcagcttacgaagataacaggattaagagattaaagacaggcataagaaattataaaagtattatttgggaactgataaatgtccatattaaaatgaaatcttcacaatttatgttcctctgccacagctccagctggtccctccattcggggtccctgacttcccacaacagttttaggatggtagaattgcaatgcagggcaggtactggagagttagttaaatgttattggttgcagttcaggttatctaagcagtggtggaagaggctaacatggtaggttggggccagattgtggagacagctttgagtgtcacatctaaggaagttagattttatatacatagtggggaatgagtcagggttttgaagtattctataaagtagattggagggatccaagtctggaggtgattaggccacttaaaaagctcttccagaaggtgagataagtgatatgagggtctcgtttgtaaagaagacagcagcaatggcacaaagtcgacttgttttttgatcatttgcatcttcattataaaggaagtccagagaatgtatggctatgtcacattttgggcaatctctctgggctaactttctttaaaaggtcagattctcctggcaacagagagagactccgtctcaaaaaaaaaaaaaaaaaaaaggtcaggttctccttccaagtagtgatctggagatcttttcttttttactatctgtatctgtctccactaatacagtagacaatgtcctcagtgttgccattatttctaccaccactgccaatgtccattttcacatcgttccatatataaatatatgaatatataaaaatataaaaaattaatatatattaatatataaatatatctataaatatatgaatatatatatatatgatggggtccctctccaatcaggtagattggtggaattgaatgcagtagaaaggagaatagggaatggaaaggaggaaggaagaaggacaatggccagataaatggctgactattcaaggcatagagaatcataatatatataaaggcataatgacatcagagaactgaggcagggacctacgggtaacacagtgaatgaagttataagcagtgggacttgagggaagggtgaccaaaacaatcattagggtactcaaagaaaagatgagaattcccattatattcatttgtttttctcaccctgtaatggttgctatttaagtgataagggtatgaaatagaaaatgtttgagatgaccggtttaggggagtggtgataaccgttggtgttagagaagtatgcagctacatatgtggttgcttttgggactgtctctcaaatgtgttgaggaaccactgaagtattgatttttaagccaaaaatgacatgacagggttttctttatggaaagatcactccaaattgcatgtagataagcctatgaaaagcaaagagataattgtctaggcaggaagtagtgaggacttcttgctttcctcaagatacactgaaggcagttgaaaagctcatttttaaaagtctggtgaaaaccactttgttcacttttgttttgtgggagatgtgacacctagtaataaagagttaacaaaccctttccccttttatgaaaatttgacttttcgttaactccctagtttcccagaaaacaatgaaaaattgtgtttgttgcttatggtaaaaataacccaattggtaaattgcatctggagagggagaattgtaaatacttgaaaggaagccatagctttggacttccctgattgtagtgactcttataactgtcccttgtggaaattctagaagttctgcctatggagttgctactagagatactggctcctgtggtacatggggccttctgccctagggtgattctcattcatatccagtgtgaatcttctccctgtacctgatctgtgtcgactcctgtaaggactcccactgaagaggaacacctgatacttctttgttggcaatctgtgttttcctaacagataccgttttgagtaaactggcaccatgtatggcctatggctatggttgtcttataagtctggatgtttagttgagccttaagaagactttctgggccaggcccggtggctcacgtctgtaatcccagcactttgggagaccraggtgggtggatcatgaggtcaggagttcgagaccagcctaaccaacatggtgaaaccctgtgtctactaaaaatacaaaaaaattagccagacatggtggcgcgtgcctgtaatcccagctactcagggggctgaggcaggagaatagcctgggaggcagaggttgcagtgagccgagatcgtgccattgcactccagcctgggcaacagagtgagactccatctcaaaaaaaaaaaaaaaagaagaaggctttctgttgggggcaatataacacttttgaaagttatttgagagacaaagtagatagtctctaaagggaattggtctcagtcttattaaggtcraaagacaacattttttaaaccagagaaattttttaatttctgaaaatatggctaatgcaagtgtggaacttctcctttctgcagactgagggtaataaaggtgctatggtctgaatgtttgtgtcccctcaaaattcatgtgttgaaatcctaatccctgaggcaggtattaggaggtggggcctttcagaaagtgattaggtaggtcatgaggacaaagtcttcatgattaggattagcatcctataaaagagactgtaaagaatgatcaagcccttctgccatgtgaggtcacagtgcaaaggtaccatctatgaggacagacactaaatctccaagtgccttgatcttggacttcctagcctccaaacctgtgagaaataaatgtctgttgtttataagccacccagtttatggaatttttgttacagcagcctaaatggactaagataagaggcaatggagattttaactttaagatgtaacctcttacaaagctctctagtaatacttctagagaaataagtatcttcatcactagaagcaaatttgagattttgtagggagaaaacacaaagtcaaacaacgttttwatcattgttgtagctttttgaccagttttgattcatcctgaaaatagacatattgtaaccaaatacactcatatcccattgtgggaggcagttgtataaaattcatttagagactctgcttctgacaagatgaagtagacatacttttccttattcctcctgctaagtacaactaaaaactctggacatgatatataagacaaacattggaagactctgaaaggtggtgagaagaaggtagactggctagggaccttgagaccctaggaacaacaaggcaatgagtttcctaagttttctttttgcctcatattgcccagacttgaagctgaagaagctagtaacctggaaatgctgatggacacagaccaaaaaaaagcctaatgaaagcctgctctctagccacaggacctggaaatgggcagcatttcctggcaagaaagaaaacttttagacaataactgctctactccaactaaactccatagagaaaactgtggcctcagtcccacccatgccagcaaaagctgagtggggagcctagattttcacccaascagatgtaatgagctgcccagccttcccctgccaaggtgatgtgggggaaggctgggtagggagccaggactttcatcctgccaggctttcccctcttgccatatcaatggagacacatgaggaacctaaaattccaccccaacccagcagtggaaatatttaagataattataagcgggagaaggtacaggaatgtaaagagaggtgaggtttctgtaccttgttcaaactaataaaatgatgtcaccaaatgactgataagttatgtgtgtgtgtgtatacatatacatgggtatatgtatatacatatatacatgtatgtctgtatatatgtgtatgcgtatatgtatatatatgccatatgtatatacatatatagtaacacctagagccaccatttaaaaagctatacaaagagatacatgcaaaaacactacagataaatgaaaattgaattttaaaaagttccagtgacccagagaaaggcaaaaagaagacagaaaacattaaaaaaggaagaacaaacagaaaacaaacatgaataaaatggccaacttaagccctaacatttcagtacttacattagatacaaatacattaagagacaatgattgatagaatggattaaaaaacatgccccagctgtatgctgtctacatgaaactcacttccaatatgatagagacaaggtaaaagtaaaagggtagaaaagataattcatgcagatattcatcaaaagaaagcaggagtggctatcttgatatcagataaagtagactttggggcaaagaaaattaccagacataagaagtacattatacagtgataaaagagttgtgattgaccaagatgacacagtaatcataaatatatgttactaaacagcagagctagggaacacatgaagcaaaactgatataactgaaaggagaaatagaaaaatctaaaattatagttggagacctcaacactrctctttttttttttgagataggktgtcactcctgtcacccaggctggagtgcagtggtgccgtctcagctcactacaatctctgcttcccgggttcaagggctcctcctacctcagcctcccaaggagctggggctacatgtgtacactaccacacccagctaatttttctattttttgtagaaatggggtctcactatcttgcctaggctggtcttgaactctggggctcaagcaatccagccacctyggcctcccaaagtgctgggattacaagcatgagccaccaagcccagccaacgctcctctttcaacaattgatagaactagacagaaaattaacaaggaaacagaagaactcagcaataccatcaacaaataagatctaattagtatttatagaatgttctaccgaacaacaacagaattcccctttttttttccaagtgtctgtagaaaatataccaaagtagaccatgccctgggtcctaaagccaacttcagcaaatttaaaagaatggaatgatgtattcttcagcmacagtggaattaaactagaaatcagtagcagaaacataataagaacatcttcaagcactgggaaaataaacagcacacttctaaataaataatccatggattacaaaggaagtcttgggaactttttaaaaatattttgagctgaggccgggtgcagtggctcacgcctgtaatcccagyactttgggaggctgaggcaggcggatcacgaggtcaggagatcgagaccatcctggctaacatggtgaaaccccgtctctactaaaaacacaaaaaattagccaggcgtggtggcgggcacctgtagtcccagctactcgggaggctgaagcaggagaatggcgtgaacccgggaggcggagcttgcagtgagccgagatcgctccactgcactccagcctgggtgacagagctagactctgtctcaaaacaaaacaaaacaaaacaaatatatatatatatatatatakatatakakagagagagagagagagagagagagagctgaatgaaaatgaaaaagggatcatagctaaacagtgcaaagggggaaatgtatagcactgactgcatacattataaaagaggaaaagtctcaaattaataacgtaagcttcctcctaagaaactagaaaatgaaaagcaaagtaaacccaaaggaagcagaaggaaggaattagagaagcagaaattaatgaaattaagaacagaaaatcagtaaaacagagctggttctttgaaaagaccagtagaatagacaaacctgtagcaagactgacaatgaaaacaaagaagcacaaactaccaatatcaggaatgaaataggggatacactacagacctttctgacataagaaagataagggaatactaaaaacaactttgtatacataaatttgacaacttgaattggaccaattcctcatccaatatgaactaatatgatgagtcctataacttaaggcarttgaatttatgattaacaaacttccaaagaagatttgtccagacccaggtgatttcactggagaattctgccaaatgtaaaagaagaattaacatcaattatacacaaccccttccagaaaactgaagacgggagaacacttcccaattcatttgataaagctaatattaccctgataccaaaaacaaatgaagayagtacaagaaaactacagaccaatatctccaatgaatataaatgtaaaaacccttgacaaaatgttagtaaacagaattcaacagtatatatagaaagaattatacaccttaaccaagtgaggtttatatctaggatgcaagcctggttcagtatacaaaaatcagtcagtataatccaccatattaagagggtaaagaagaatcacatgatcatatcagttggtacagaaaaggcatttracaaaattcaacactcattcattattttttttaagttcagaaaaaaataggaatgggggcatttctttaacttgataaagagcttctcttgaaaagttagagctaatattacactcagtggtgatgctttctccctaattttggtaataagacaaggatgtctgctgttaccactcttatttgacaaagtgctgaaagttctagacagtgcagtaaagcaagaaaaggaaataagagacatataggttggaaaggaagaaatcaaactgtccttatttgaagatgacatgattgtctacatagggaataataagtaatttacagaaaactcccagaattcrtaaatgagttcagcaaggttgcagggtacaaaataaacatacagaaatcaatcgcgtttctatatactagcaaagaacacacaggcaccaaaaattaaaaaatacattaccatttacaattgcccaataaaatgaaatacttagatataaatctaataaacatttacaggacacataygctgaaaacagcaatggcgatgcaaaaagtcatagatytaaataaatggagagatttattgtgttcatgattggaagactcagcacagtaaggatatcaattmtccccaaatcaatatacatgtttaacacactccttatcaaacttttttagacagagacagggttattctagattgaaaggcaaaaaaactagaataacaaaccattttggaaaagaataaagtgggaagaatttttctacctgattttaagacttacatagctacagtaatcactactctgtggtattggcagagagatagaacattgaaacaaaatagagaaccccaaaatatacccacactagtatgcccaacagctttttgacaaagatgaaaaagcagttcaccagagggaggatagcctcaacaaatggtgctgaagcaattggacatccttaggttaaaaatgaagctctactcaattctcatcccttataccaaaaaaaaaaaaatccatttactggtgcttaaaggggccttaatcctttggttcacatccttgcctcacttttacagttttgtaaggattgtattgtaggcaggtaggacatgcactagaaacatccttgattgtacctttaaagttttcttggcggttgcggtggctcacacctgtaatcccagcactttgggaggtcaaggcgggtggaccacaagttcaggagtttgagatcagcctggccaatgtggtgaaaccctttctctactaaaaatataaaaattagctgggcgtggtggctggtgcctgtagtcccagctactcaggaggctgaggcaggagaatcgcttgaagctcgggaggcggagcttgcagtgagccaagattgcgccactgcactccagcctgggtgacagagcgagactccatcttaaaaaaaaaaaaagttttcttacagtagttttcttaattaaatttggagaatgacacttcccctccccccgaaaaaaaccttattatttctattgtccaccttttgataaggcacaggagcaaatctttgtcacccagtagccatccctgtaaaaccaaagatagtttaggcataaaagacaccttatttttattgttctaaatttaaagcatgataarggaaagacaaaattaaggactatcaggtgagacaagacatgagcatagcataagtcttactttttaaaacaggagatacatgtattttaaacgatattttagaaccataccaataaagcaataatttttaggaacttaactttttaaaacaggaactttttctcaagatcatgcaagtgttcacaagaggcacatggagttaacagactattttggtgataaaaataaaactgttatctgagcatagaataacttgatcattttcttaaaaataagcccttcttgtttttatatccatttaacaatttgtagcaaaggatttataagcctctattttatcaataaattcactaacrttgaatatatcttactttttttgccacgtatagactttttaaagtgaattttaatattctttatgtgtatgtgtttaggcagatacagtacatagttctcttaataataaagttaaagtctgtaacattaattttaagatataattaatctcaatagcatattaagtggtatttgttttcatatgcatgtgtgtgtgtatatatatataatgtttttaaaagctaatataccattttatatattcccatgccattagacttagtataccatctgtatatatctccatgccatttaatatacctcgacgcagcattttaaatgtttttcataatattcttttatgcctgtgtcatactatctaactrttcctttgttagaggcagttagtggtttaaaagcaaggactttggaatcagattgcttgggccagaattttttctctgccacttactttctcagcagtaaaatggggatgataataatatgtatctcatgggcttgttgtgaagattacatgtattagtttctttgaatctcttagaacagcatctggcacatagttattgtgtaagtgttgtgatggatgcctttgtacataaatctttgtcagagtaattatttccttagaattttagaaagagaacatcttggtcaaagaatatgaattcttaggccaaggcaggcggatcacgaggtcaagagatcgagaccatcctggccaacatggtgaaactctgtctctactaaaaatacaaaaattagccgggctgggtggcgggcgcctgtagtcccagctactcgggaggctgaggcaggagaatcgcttgaacccgggaggcgggttgcagtgagccaagatctcactgctgcactctagcctggaaacagagggagactctatctcaaaaaaaaagaaaagaatattaattcgtgcaccaccactactggctgattttttgtatttttagtagagacggggtttcaccatgttgatcagtctgtttctcgagctcctgacctcgtgatccgcccgtctcagccccccaaagtgctgggattacargcgtgagccactgcacctggccaagaatatgaattcttgaggactcttgatattccagttgttttccagaaagattgtaagataaggatatgatagactatgggatagaatagttaaggttgtctaactttggcaagtacttggcatggcatctacaacaaaaaatacatgctgtgcctaagatatatggatttgagtatagcctgtatagtgtgaacagaagtaatgataaagtcgttggtaaagtaccaatactaatgttggtactagaaagatgttgaagaaacaaaacataaacagggtcactacaaagcagattttaaaagatagtttttagattttatccttttttaaaaaaactgagcaacaaataatgttgggtgcagcttggttggaaatatattatctcataattccataggctagaggtccgacttrggtctgtcccactgtattgacaggactgtgttccttactcagaggctctggggaagaatctgcatctaaatccatttagattgttccctgaattcagtttctttccactgtcggacaggggtcccagcttccttgctggctgtcaggcgtggatgggtatggtggggtgggagcagagggcagctgcctttaactcctggcacatgtgccccatgtctcagagccagcacctgcaggttggccccttctcacacttggaatctgtcccacttccctttatgccacactcctcttctactttctttgcgcgcgcacgctcgctctctctctctcctgcttttaaggtcttgtgtgattacattgaatccacctcagtaatccaggctaatcccattttaaagtccactgatgagtgaccttaatttcctctcagagtctctcacagcagcacctaggttagtgtttgagagaataaggaaggacatctttagaatttagtccttgcttgcacctccctccagggactgcagtgctccctcctragactgagaaccagtgctgggaggacagatctcccccatgaggcctgccagctaaagtctgtgtgattgtgtgtggtcgggcctgacagatcatacataagactttgtcctgcaggtggcttcctcaagcaaacattgtaatcaatagagaagyagctaccactcatattagctgggaaagaaggatgtttgttattttggtagtgttcatagtgccttgttttaatgtatacttagaccggaatatgaagtggacatggtcttgctgctttaaattttttttttttattttggtatcacatcatggcagccacagagtgactttatatatgttcaacaggagaaaaccaaggcccagctgtgagtaccaggccagcacttggatgtgcagagctacttttctctttctcagctgcttgataaaatcgagacctttaggactgtagcatctgactgagaaaagcaacccaaatgttctagaaacatgtaacctgcctggcatgtgattataagctgcgaataaagaatttaattattatatttattaagatcagttttaataagataaagtagtttttaggctagttttgttttaaatgagaattttaatgcctaaaagagtatgtttcatttacttaaaatttagcaaaagagaaaaatataatttcctaatgaggctgaatgaactatatttgtattttatatgatgtgagttatataggagaaagatggcatgtggctccaaagtaagtggtcagaattttcaggcctgttttgtcaagccatgggtttaacagaaaaaaaaaaaaaatctgttaggaagcaccagtgaggttcacagacttatggtctggaaggtacataccaatggtaaagggagaccaaaacttagaggccttaaacagttaattactcagtgtcagcttctcatctacaacatggggtatgaatatcgacagtaataccatatagagttattacacctagttaagtcctaagkagaattattaatgctattaataatcttaactccatgaatttacataccttctacccttttctcagtcaagccttctgtttcctgataagtaagttgaatttcccaaaggtgttagcaacagtaactttttacccttttagttatttaggagtctaggatcttgtgagtaactctttgctaatttgcgtggtcaccagtaaatggttctagaagggcatttatgccttcattcaacaaatattgtagtgatcaacctctttatgtgtaaaatcagtgtcttagtttgggtagccccaaagcagactagagagaatggtgtggttttaagtttttgagaagtggtcacagagagctctgcagagttagggagagagggtgatcataggtgtatacgagtggattaccactgtgggcaactgaggttcaatcctgctggggattctttgagggactttgtggtacctgcctctgaattgtcccaccaagggacagggatgccaggttttttatcgaccattggttgaaggtcattcctgcagtggaaactttctgacactttggacttgcatcacacaggggcctgcaaccagaagataccactgagcagagagcccttgcaagttgtaggtggtaggttaacaattgtgtttgtatcttgttacagaaagcacaattaatgttggtaataaatggtaaaagtgaaagatgtttaatataaatatttttccataggattttytattgcagcagaccatgctacgagtgaaggatcctaagaagtcactggatttttatactagagttcttggaatgacgtaagtcaagtacttattggcaccttaatgtttaaatatatagctttgcaaatctakagagtgttttcagacccatcttaaagtttgtttcagaagtaacagaagttcttttggccaggagtctgtgattaggcctggctggacagggcttctctcgtaagttctttttcttctctatcycagccagcctgaaagggcaaaacaagacacaaatagttgcattttctccagtctgccttctctgagcgctcccagctaaatccttaatgtgttcagaccccttttgatgttctggccacttttagcctcttgtttacttcagaaaagttatagataataagaacttactactcagaaaaccaatgggtttacttaaaactgaccatctgttctatttttctaggctgtgttttcttttgctcaacaggtcatatccactgatcttgcaatcctaaagcatacttatttttctaaagcatgtttatttttctttttttctccagctttactgaggtatattgagaaataattttgtcatattgttgatttgtttccctaagttatgtgagcattttgcttttgagcatatagatacatgaataataaaataatctttaaatttagtgcctagataacttccattcacattgagagaaaaatttaagtaatatatgtctatatttagaaaatttgaccagttcagaaaaatacaaaatgaaaagtaatagcttccctccccaagttcttctccccagagataactgctgtccagtttcttgtgatttttttctagaaaaaggtattatgaatatatttatgacatatttaaaggacaaaatgaaaacagatttattgaacacttttgccaggcacttcaaatgttattttgttcagtcttcacaccagtcttaggaggtagcttttatccccatttcacagacggagaaaccaaagcttaatgagatgaagttactagctccaaatcccacagttggcatatggcagggctggaacctgtatccattgtctgatgggctctaatgtagacttcctgtgcagagcccccaaatagggtacaagttgacagtaagctggaagatttgaacagctgagaaaagcaagttgcaacagtttcatttccttcagtcccaactgattggtccatgagggttgtgtagtctgctttagtaggtgcagagattgtttttcatgattggagtatttgaggtgtttgatactttattataaacatgttagagtaaatcttatttgtgataagtcaatgcaaggatctaagtgggccaaggtctattatatagcagtgataatgaaataaaagattggaagcagaactctagaaactttccatttgctatatggcaataacagccatttgctcttattgattatgaacaaagtcatctttgaataatctaaagaaaatcatatatgcattctcakgccaccttactccttgccaaataatcctataccatttaaagtcatttaaggttcaggacttcagttatctttcttaaaacctcaggattcataattcattcactctctctcccatcagtctcttctactgtctctttcccctcagagaagcgtaagtcttctttgttccagaatatttcttgccctctgctccttcgcctacctccccattgtcactgccatgcttgctactgttttacctgctcacctgccattctctctccccagtacagtgtaatccagctgatgcttccccactctgctgacattgctctcatgggacctttccatatctcatgaccttttcttagtcttaatactgtttgacctttctacagtatctgatactgttagccaccttactgttgacattcacgtcttctgtgatactagtctgtccttcctccttctttcttaccacctatccttaatttcctttcctagatgttttggcatagtaagaactcaataaatgtgtttatttaactgaatgacatatttatatatgtgtttgtatgtgtgtatatatatgaaatagcaacaaggttctttatatttttcagtacaaataaacacagttctcttttggagatagccgtttctatttattaacaagtaccataatttcagctaaatgttactatatttacagaattgatgaattacagaagttttcatttttgtatttcaaatatttacagatgcatttttmatgatwttttttcactgatttttcctcctgcttattccattaaaataggcttactacatatagctcttctttttagtaaaacttgaatattaagttatgttgattatagtatgaattagcctttcctgttgttaatgattcaggcttgttgttttttcattgcaggctaatccaaaaatgtgattttcccattatgaagttttcactctacttcttggcttatgaggataaaaatgacatccctaaagaaaaagatgaaaaaatagcctgggcgctctccagaaaagctacacttgagctgacacagtgagtatgagtttctatatttatatatattatagattttttaaggtagtttttaaaaatcttttttgttttgtttactgaccagtataattcaaaccagatctgcctakgacttcacatttttaataatatattgaagtgtttttcatgcatcttttgayctttgtattgttcttggscaaatgagatgtgttttttttagagacaggctctctgaagcctctaacttctaggtagtcttcctgcctcagcctcctgagcaccttggactacacatgtgtgccaccacacccagctagtttttgtttgtttgtttttggtagaggcrtagaggcaaggtctcactatgttgcccaggctggtctcaaactcctggcctcaagtgatccgcccgcctcggcctcccagactgctgggattataagcatgagccaccacgcctggcccatttgtcttttatwtttatttatttatttatttattttttgagacagagtcttgctctgttgcccaggctggagtgcagtggcgygatctcggctcactgcaagctcygcctcccggattcactccattctcctgcctcagcctcccaagtagctgggactacaggcgcccgccactacgcccagctaattttttgtattttttgtagagacggggtttcaccatgttagccaggatggtctcgatctcctgacctcgtgatctgtctgcctcggccgcccaaagtgctgggattacaggcgtgacccaccacgcccggcctccatttgtcttttagataagagaatataagaccctgaaattgtaagatatttgcctgtttgtctctaactaatttttaggtactataattagtctttcagcatccaaaattttgttcttttattattttgctacattttggatccagaaatgtgatatcatgtgttcctttaaaaattcttcaaaccattttgtaataattaacattcaaatttggtatttttataacttgagcacttaaaaatgtaggcaatttctttacattgtttatctgcatactttaaaagagattgatttcagagtgtgtgatttcgtgtgtcccttgattcaaaataaagctttggaatcaggcaggsttagatatgagtctgwgactctaaacaagtaagtggcagtttcatcaawrgaatggagatgttcacacctagcccatggagctgttttaagggtttaaatgaaatataaagtacttagcacaataaatgagcattattattattcttattattgttcttgtccagtacctgtatttactgtctcyttagtctcgktaaaatcatactttggccatttgtcctttctatagttgaaaacttaatatttttgtagcaggggttaggccaattatgtaaagtagcatataaacgtggtaagatttcaaagatgttacttgytttkcagaatatctattccctaggacattgtagctatgttttccttccttttgtagcaattggggcactgaagatgatgmgacccagagttaccacaatggcaattcagaccctcgaggwttcggtaagtttgcctgtttttatgtgatatatgtagatttgtgtgattttgtattatgtatataattatgattttaataaacctaaaacattaatgtcctaattaagtatgatcaatttattagagatatgattatttttattttccacaaataatcttatttaggagttgtttaatttcagagtctcgatctaaaattacacttaccatctcaccatgatttacttttaagtctcagaattaatttccagtagacttttttttttaaaaaagctgtagttaatactaatcccagtttctgctagcacatacacttctgccttgatctccagtctctcaatcaagatgacagtattgcaggcttcagctggctgctatagtcaatgccaaccacaaacctrttaagtattagtaaatgattactgttttttggtgtcgattattcttaactgattagactgtatatgagctgatattgattaattttaaataatttataattcaaggcaactaattaactacttatacccagcccattagatctatatttgttctttaatgtattatagattttgaacctacctaagtctgttcccaagtgccttatgttttgaaataaacaagttttggaatctacttgtggtacttggacaccctgttataattatttcttccttctctctgcttttttcggggggtatcacgtaaggtcatattggaattgctgttcctgatgtatacagtgcttgtaaaaggtttgaagaactgggagtcaaatttgtgaagaaacctgatgatggtgagtctactacttactgtgttcaggcctgtctttagttgatatttactaaccacctacagaggccactgttgtagtaaaacccttttggctacaagtaacagaagtctccacttcaaccagagttttaaaaaagagaaatgattggaagaatatctgggtattttagggaactgaaagacagcaactagggtggctttccaaggcactagacacaggacctggacagccatcaaaaccctacgcttcctctcccactgcccgaccccaccactttctttcattggccaccagctttcactatttcagtgtatatctttccgcccaaaaataagttccttaaagtccattttatctgatgctcatataatgacaccagctctctttagtttataatcacatggtatttctttttcatcttttataacctttgtatgtccttaagttttaggtaggttttttgaaatagcctacgtatggattttgctgggtttacatgtattgttattattttacttagatctctttctgaactatttcaaattaaaattgaaatattaaatatttcagagtctcaatctaaacatttgaaatatttcactgtttaatttcaatccttttttaaaaaaattaaaatacttaatatccagtgctgggcgtggtggctcacacctgtcatcccaacactttgggaggccaaggcgggcggatcacgaggtcaggagatccagaccatctgggctaacatggtgaaaccctgtctctaccaaaaatagaaaaaattagccaggcatggtggtgggcgcctatagtccgcctactcaggaggctgaggcaggagaattgcttgaacctgggaggtggaggttgcagtgagccaagatcgcaccactgcactccagcctgggcgacagagtgagactccgtcacaaaaatatatatatatttaatatccaaatcttctccccaataagaaaggaatttgcttcactcygtcctcattgtgtcactattacctagagtgggatagtattgattttattttttaaagataataataaatatatcacggtgtttgatcactttttcttcatatatctcttgtagtgtctcctttgagacaggatctcactctcatccaggctggggtgctgcaatggcactgtcatagctcactatagccttgaaactcctgggctcaaacaatcctctgcctcagcctcctcctaagtagctaggaccacaggcacatgccaccacacccagctaattgttttatttttttgtagagatgagttcctgctatgttgcccaggtttgtctcaaactcctgagctcaagygattctttcaccttggcctcccaaagcactgggattacaggcgtgagccactatgcccagcctttttagcatcttttggatttttctgttcttttatttaaatacctcaaccaaaatggtctttaaaggggttttgtttttgttttttgagacggagtttcgctcttgttgcccaggttggagtgcaatggcacggtcttggctcaccgcaacctctgcctcctgggttcaagtgattctcttgcctcagcctcccgagtagctgggattacaggcatgcrccaccgtgcctggctaattttgtatttttagtagagacggggtttctccatgttggtcaggctggtctcaaaatcccaacctcaggtgatccgcctgcctcagcctcccaaagtgctgggattacagctatgarccaccgcacccagccctttaaagggtttttaaggcaaaacttttgagattctgtgtaactgaggatgatgcctttatgtctgaaggacagttttatggaaaagcctaggtttaatttccttcagtcttgaaaatactcttctattttctttttgcatatgatgttgctgttgaaaaatstgtcaattcatgttcctttgtatattcttctgttttattctrgaagctttttatattatttctttgtcactgcctgcattctgggagatttcctcaaactggaataccaattagctaattttctcccaaatgtatctgttctgatatttaattcatctattttgttcttaaacacctgttataattttgatctctaattttcgcttagtttgcttaatatgttcttgttctttttttcatattggtaatatttcatattgtttattacttttttttttttttgagacagagtcttgctctgttgcccaggctagagtgcagtggtgtgatcatagctcactgcaacctcaaactcctgggatcaaacaataatccacctcrgcctcctgagtagctgggactacaggcaaatgccaccatgtatggctaattttttattttttgtagagacagggtcttactatgtatctcaggctggtctcaaactcctggsctcaagtgatccttctgcctcagcctcccaaagtattgggattacagatgtgaaccaccacacccrgscggtcawtayttttacatgtctaaatagtccttgggtctgggcatggtggctcatgcctgtaattgcagcactttgggaggccgaggcagaggattgggaggttcgggaggatcacttgaggccagcagttcaaggctgcagtgagctatgattgtgccattgcattccagcctgggtgacataggaagaccttgtttctacaaaaaggtttttttttaaattatctgggcatggtggcacatgcctgtagtctgtatgcctagctactcrggaggctgaggtgggaggattgcttgggcccaggagttggaggctgcagtgagctatgatccactgtacttcatttcagtataaacgacagagcaagaccctgtctccagaaaaaaaacaaaaatagctcttggtccattattctaatatttcttctgtttgaatctacagtccattgctttgggggtgttttatggttatgtttctcaaattattakktttygcctctgagcttttttcccctrcaactgttcgctattctaacacatcaagcagtgtgaataggagaatggccagatccctgtccttaacaacccacatgatctcaggacaatgggctggataagcctaggccagagattcctaggcacctagaaatgagacttaaayttatttcaccttccacaaaacacctcttcaggttggatcttcccacttcatccctcagggaagagtattagtaggagacacttccgatagtgttattccctagccctgggcgtggagagagggctggggagatcattcggccctaccagtttttctcagtttctcacaagcacaaggctcctgcactgcccttgtttactggtaaggacatctgaacaagygagagggcaggtgccgatgcacacagcagtgagggaggarcaagagcaaaactctgttctctcgcagccattatgcactgccttctggtccaggccagaactaccacctcccacacagcccaagttaaaacagtcacccggccccatcctcacccattctccccagctgtcacyagccgggtttctttctttctttccttttcttttcttttcttttcttttccttttcttttccttccttccttccttcctctctytccctccctcctkccttccttctctctytytctctttytctttctctttctctttctctctttctttctyyttcctgcattttccatctatgttcctctaggattgatcttggagaaaggaggcagagataagagtcaaaccaattcaacataatggtccccaaataaatttctgaggtcatatttttccatttaagcaaacagctctgacatactagactctcaatctcagttttgaattcctgggagaaagactctcgcagagcttgggttgcyyaggatagtatttaaaagggtttgtatgacccaagcatctgggtcttttggttgtgggggtaagccatgctaccagctcccttcagcacctccctattttctttttcttctttaaaataagacaatttctgtaactactgaactggtagtgtggtatcatgaaggtgaggsaaatgcctgatacctaaaagatgcagccagtcccacagtttatttcaggagggctggtatttgcaatgtgtgcaagataacattttagtcattatgaaaagtatgacttttcatactttyctgacaataagaatttttaaaatttaaaactgtaaacaaaataatgtacttcattaaaatgcaaagtaaatctttaattaataaaagtttttaaggccaggtgcagtggtttgtgcttgtaatcccaccactttgggaggcaaggcaggaggattgcttgaggscaggagtttgatagcagcctgggcagtacattgagatcccgcctctacaaaatcaaaaaattagccaggcaaggtggtgcgtgcctgtcgccccagctacttggcaggctgagctcaggaggtcaagcctgccttgggccatgatcatcccatgcactccagcctgacattcagagcaagaccttgtctcaaagaaagaaaaacatttttatggtgttttcttttttagtcttttcaataatgaaaattttcattttacaggtaaaatgaaaggcctggcatttattcaagatcctgatggctactggattgaaattttgaatcctaacaaaatggcaaccttaatgtagtgctgtgagaattctcctttgagatttcagaagaaaggaaacaatgtgattcaagatatttacataccagaagcatctaggactgatggatcactgtcccrattcaaattattcttcagtccatttccccttcctatttcagctgttccttttcacctaactgttcagtcattctggttttcaagcagtgctttatctcatgtccttgaatatagttgtgtaactttattttttaggtaataattagaacagttcccttcagaggctgcatttgccttcttctgccacctaaatattacttcccttcaaatctgcctttgaatcatcatttttaaaaaaaaattaacatgtttttgttgtagttatcttctggggtttcaattcctcagaaacaacttttttcacaacggaaaggaaagaacactagtgttctttcagtaaagtacaaagtgtttattttacaaaagagtaggtactcttgagagcaattcaaatcatgctgacaaggatactgatagaaaaagtgatttcttcttattataaagtacatttaaagttcaaggactaaccttatttatttgggaaaggggaggaggaaggaaatgatatkgtacccagacactgggctaggctgcaactttatctcatttaatactcccagctgtcatgtgagaaagaaagcaggctaggcatgtgaaatcactttcatggattattaatggatttaagagggcatcaatcagctcaactcaagatttcataatcatttttagtatttagattgtgcctcaaagttgtagtacctcacaatacctccactggtttcctgttgtaaaaaccttcagtgagtttgaccattgtgctcttggctcttgggctggagtaccgtggtgagggagtaaacactagaagtctttagtacaaaactgctctagggacacctggtgattcctacacaagtgatgtttatatttctcataaagagtcttccctatcccaaggtcttcatgatgccagtagccatatatgataaattatgttcagtgataacttagttatcagaaatcagctcagtggtcttccccgccatgattcacatttgatgagtttttaaaaatcaaagtgattttgaaaatctctaatggctcagaaaataaaaacatccagtttgtggatgactatatttagatttctctagactctagtggaagacctttggaaaggccatgccaaccgtgcttgtactgctagaagcactttatgtttcctttttgrgtgaaatggatttatgtgagtgctttaaacaaatagcaatacttatagactgaaataaaatgaaacttcaaataagactatgtttaatttgtaaacctttgtccatcatgttctttctttaaaaaaaaaaaaaaacaactccccttagtgagtactgaaaggatttgaaaaggcttgtaggctcattctgaagagagaacaattgtgattctgtacagcccgtaaagcaggtagtgtctatggataagggagtgtgggaaaggtgggaaraaraaagtgaatacggaataaaggattgtggtagataaagtgcaaacagaagaawatcaaaaggtaaggaacttatgaagaccaatttcacatgttgagtgctagaactgacaaacgggagggctaatacattcacaaattcagtaatttaagctttatttccaaggaaagaagccttctccacttgctgagtaaaacttgccaaaagatagcccttgctcattctttaaattcattcctatatgcattttttttaaatgtacagttggcccttgaacaacataggtttgaactccactggtttatttatacagggatttttttcaagcaaatgtgggttgaaaatacagtacaaagggggctgacttttcatatgccaactgtgggacttaagtatgcacagattttggtatccatgggcagtcctggaaccaatcctccacatacaccgagggacaactgtatatggtaacactacgccttgttagggaaaagaacaattcacttccaaattcacttacctgagaagttgtacgaaagtacaaagtaggtcacaagaagtaagttttcttattttccatgatcatggtcaatgtaaaacaagtcagtctcctatgagccctacatagctaaggckagaatgattataatacaggtggtttgaatgaagagcagatggctgaaagggaatcacttgaggctttcccacacagtattttgaccatgattgcatagagtgtgtcttagttgaggcaattttaataaaaataccatagaccgggtggcttaaacaacaaacatttatgtctcacagttctggaggctgggaagtcccaagatcaaggcaccagcagatccagtgtctggtgaggacccacttcctgacttgtagacaggcaccttctcactgtgttctcacacatccaagataaatcatctcttaaaagggcactaattccattcatgagggttctaccctcatgacattacctcccaaaggccccacctccgaataccatcacactgaaaattaggcttaaacatatgtatggaagggagccgcaggacacaaacattcagtccatagtacagtatatataaataatcctcagccatccaactgattatgaagagtgttagtaaggatgcttgctattggcaataagaaaaaaagccagcacttaagagattgtaaaatggattggttgaccaggcgcagtggctcacgcctgttatcccagcactttgggaggctgaggcaggtggatcacttgatgtcaggagtttgagaccagcctgaccagcaagatgaaaccctgtctctactgaaaatacaaaatttgccaggcatggtggtgggcacttgtaatcccagctgcttgggaggctgaggcaggataatcacttgaacctggggggtgagctgagatcacgccattgtactccagcctgggcaacaagagcgaaacttcrtctcaaaaataataataaaatgggttggtagagggttcagagataacaagaaccccagattatttccatctttcccatcctgtcatttttagcattttttctcactggaccaataatatgatcaaagatgcctaccatgattctaggtatcatgtgtagaccaacaatgttgataggatttggctgtgttcccacccaaatctcaccttgaattgaagttcccataatccccacatgtcattggaaggacccagtgggaggtaattgaatcatgggtgtggtttcccccatgctattctcgtgatagtgagttctcacgggatctgatggtttgataaggggcttcccctttctccttcctgccaccctgtgaagaatgatgtgtttgcttccccttccgccgtkattgtaagtttcctgaaaccttcccacccttgcagaactgtgagtcaattaaacctcattcctttataaattacccagtctcgggcatgtccttatagcagcatgagaacggactaatagaaatgtccagtgaaagaaaatatcattttattcctcatgtgtctttgataaggagtgaaaaacctttccctaagctcctcagcaaaattcccgtcatatctcaaccagtactgggtcacttacctgtctaatcactggccaagggggtgggaacactctgacttagatggatcrtatttacccaagctggctgcatgagggtggacagtgaatcagaattgagactgccagaatggaggagcaaataggggcttctgggtaggtgtaaacagaaaccgcacccagagtcaaattagatattgagaattagatattaggtgcagagtactgtaagaaatgaaacatttcttgccctcagagcttaggtctgagattgtggttctcaatcatattagacttagctgaccctgtttataataacattgtaacataatatctatcacatccactatcctgaaatgacattcacatgatataacctacttattggcacgacatgaagaaacatcagtcaatacctttatggtaatatgaaggagaaatataatcaggttgcaataaaattgtgcattttagtatgtcagtgcccacatagactagaagacaatggagtagtcaggtgcttgcccttacatatggaagaagaaaacatcagagtattgttgacactctttgatattttaaataaagactgaatttatgattcatgaagagctataattttacaaatttaaatacatattcataacaggtgcattttactgatgactcaaaaacatgatgttatgttggaaatatttcccaaaatggtgatcaattcttgctaaagtttcgaataaaagagtaacttttttgtttatagaatagttttttccctagcaaatattaaaattataaatgcaaataagtaagatacaagttgtaagttcagataataaaaagcaggctttaattcttttttaaaatttagaatagttttagatttgcagaaatgttgcaaagatagtgcagaattcacatacaccacatacctagtttcccctattttaaaaatcttacattagtgtgggacatttatcacaattaatgaaactatattgatattattaactgaagtccatacttattccaatttccttcatttttacctgctgtttcyttacaggtgacattcaggaaaccacattccatttagtcaccatgtatccttaggctactccagactgtgacagtttttcagactttccttgtttttgatgactttgacagctttgaggagtactmactaggtattttgcaaaacgtttttcaattgggatcttctgattttttttgtcatgataaaactgggattattgttttttggaggaataccacagagacaaagtgctcttgtcacatcaaggggacatactatcaacatgacatgtccctgatcttactatgttaaccttaatcacctggcagtggtagtgatgaggaagaaactcattatgtaaagcccacactggctggggggagttatgctccatctccttgaggggaaaagtaggctttttacctatatgaatactcagtgggactttccaaagttatacaggtcattacaggatgtctaacatccctgctcaccatccactaaataccaatagtgaaacccaaccaaaaatgtcccacaagtctccgaagtaacccctaggggtcagtactgctctgttgagaaccactggtctaagatttccaattcaagtttccttagagtgtgaatttaaagcatttataaagaaatctgagtacagaattcctaattttatgctttcctccttatttacagatgcttttttcctgcctctaattcaggaatttattttaggtatttgcctttgagtgttcttcttttatataactttgttttacaaaaactcatattttacataaactcattttctttttacatgaactcatattttattgccttatataatatttaattaaattatatatttaaaattacaaggatgattggattgagcacattggcagtagacacaatcgacttgacaagtaactcatctgaggaagtagaaatgcacagagtggccaactggttatagttactcagcctgacagggcatcagttctttattgaggaaatggtgagtgcggttaatccaataacaggttaagtggaaattggttaagagaatttctactgtaaatgcatcgatttgagtcctatcaatattagcaaaggctgagtgcggtggctcatgcctgtaatcacaacagtttgggaggccaaggcgggtgggttgcttgagctcaaaagttcaagaccagcctgggaaacatagggaggtccccatctctagaaaacataatacaattagccgagtgtggtggtgtgcatctgtggtctgagctacttgggagctgaggtgggaggattgcttgagcccaggaggtcaaggctgcagtgagctatgattgccactgcactaccgtctgggtgacagagggagactctgtctctaaaaatatatatataagaaaatattacagaagattgtttaatgccagtacctaggattgctctagttgtaatgaaataggcacttttatagacttcatccaaaccacttcaattttacagtaagtttcacgagttattttataaagacttaaaatgttcacatcttatctggaaataatgtgatattctgggaattctgtatcctaraaaatattgtatccttgaaaatttattgcttgtatcacttttcataatagcaaaaaataaacaaatgtccaaaacttgggaaatcattaacttttatagtacccacaatgatagaatattatctattctactttaacaccactaaattgtgtctttaaagaatgcttaaagatgtagagaaatggttatgagatatccagtggaaaaagcaagtttaygtacattatgcttttgttagaaaagatacatgtacacatagaaatcactagaaggaaatayaccaaattttgattattgctggctgctgggattaccaatgattttatttccttcattatatttttctgtattttccaaattctctaaaatgaacaagtgtcacttttataacacggaataattaagtgatattgcttaatttgctaacatttacatttttaccttttgagtaaaatgaggtattttaacaacatctctgctacccaaacttctattcaggatggtaacatattaaagattagaaggtactttttttttttattttttgagacagagtttcgctctgttgccaggctggagtgcagtggygtgatctctgctcactgcaacctccaactcctgggttcaagtgactctcctgcctgggcctcccaagtagcagggactacaggtgtgcaccaccacgcccagttaatttttgtatttttagtagagacggggtttccccatgttggccaggctggtctcgaactcctgacctcaggtgatctgcccacctcagcctcccaaagtgctgggattacaggtgtgagccagcgcacctggccttagaagatacttttatatattaagttattcaaagctctgtatggttaaaatgacttataattccaaacgatcaagttccatttagtgacatgcaaaatttctttaatcatttaaggataatgtttagttgwgttyttktttttttttttttttttttttgagatggagtctcactctgtcgcccaggctggagtgcagtggcgcaacctcggctcactgcaagctccgcctcctgggttcacgccattcccctgtctc

SEQ ID NO: 10010 - DNA, 40318 bp, Homo sapiens
  misc_feature (27151)..(27170): n is a, c, g, or t
cagggatgcgtggccttcagcccgagggcaagcgatggcctggatgctgtttcctgaagtccaaaatcttggctgtgctctccttgggggttcgctccgagaggtgggaggcctcagttgctgcaggggaggcggcagcagaggtttaaggggctgaatttgcctctgaatcctgccgcctccaaacggaaactcgagtccctgctgtctccatgtcctgtcccacctggactggggctggtggaaaggccggctgcaatggagctggaggacaggagcagatggttgccctaggggctccatctttcagggaggaaaaccatgggtattctggaggttgtggcccaaaggccaaggctgggagcagaagaggcctgtgggaggcagtggtggaagcgcagagcttgtcagagggcagccttgtggagaagctgaccagccgggcctaggatcaacacctgctgtatcacaggcttatcagaggaggcgccttctgcacttcggggcacccacagaagattttyagtatgatgcaggtcttggatcaacttgatattcttaaggtggtaaaattcccctttcaaaggtttctttgtcagataatgaaatgttctaaaattgcacagtcggttgcacaactctatggatatgcttaaaaaagaattgaatgatatattatatacgggtgaattgtatggtatgtgaattatatctccataaagctgaacccagtaacagacccgcacaaatgtgctcaactgattttttgacaaaagtgcaaaagcaattcaatgggggaagaacagcctttcaacaaatggtactggggcaatggaccgtccataggttaaaaaaaagaatttcagcctaaatctcacattttatacaaaaattaaaggataatgaaccaaaatgcaaaatgtaaaacaataaaacttctagaaaaataggagaaaatcttcaggatctagggtgaggtgaaaaaaaatctcagactaaacaccaaaaacatgagccataaaatgaaaaaatgatatattggatttcatcagaattacaaatttttgctcagtgcacaaccctactaagaggatgaacagacaagctacaggccgagagaaaatatttgcaaatcacgtatctgacaaagtctagcatctagactatgcaaagagctctcaaactcaacagtaagaaaaaaaaagagtgatccaattagaaaaggtctaaaggacataaagagacatttctccaaagaggatatacagattacaaacacacacgtgaaaagatgctcattagccatcagggaaatgcaaattaaaaccgcaataagatatcatgacatacctatcaggatgggtaacacacagcaccaaatgccggtgaggatgcagagaaactgtatcacctacacattgttgatgggactgtgaagtggcacatctactctagaaaagagcagaaggtttataaaaaatgaaacatgcaactaccatacgacccagcaattgcactccaaggcatttaccccagagaaatgaagacttatgttcacacaaaaatctgaacataaatgtccatagcaggtttatttgtaatagccaaaatctgagcacaatccagatgccctttatgagtgaatggttaaacaaactgtggtacatccataccatggaatactactcagcaataaaaagagacaaatgactgattcacacaacaacctgcatgaatctccgaagaactatactgaatgaaaaaaagctaatcctaaaagcctacctaccctataatgccacttacatataacattattgaatgcaaaattatagagatggagaactgattaatggtttggaggggttaaggaggaggtgatgtgggagggaaataggtgtggctatagaagggcattttgagggatccttgtggtgatagaaatgttttatatagtagtttgtgcttatcctggggagayacgttccaaggcccccatggatgcccaaatcctcacatagtatcaaaccctatatataccctgttttttcctatacatacctatgataatttttttttctttttctttttcttttttttttttttgagatggagtctcactctgttgcccaggctgaaatgcagtggcactctttcagctcactgcaacctccacctcctgggttcaagtgattctcctgcctcagcctcccgagtaactgggattgtaggcaaccatcaccacacccggctaattttttgtatatttagtagagatggggtttcactatgttggccaggcttgtctcaaactcctgacctcaggtgatccacttgctttggcctcccaaagtgctgggattacaggtgtgagccaccatgcctggcccatacctatgataaagtttaatttataaattaggcctagtaagagattaacaacaataagtaagactataaaagaaaaattataataatagactgtaatcaaagctatgaaaatgtggccaaagcatctataaacaaagttaagacaagtgacagactgggagaaatgttgcaacatttacaacctacaaaatattcttattcagaatatgtacagagtttatgtgaattcaagcaaaatataaacaacctgatagaaaaatgagcaaagtctatcaataggcaatttgtagaaaaagaatacaaaataagaaacatataaaaagaaacatataaaaacatataaaaagattttcaggccgggtgcggtggttcatgcctataatcccagcactttgggaggccaaggcgggcagatcacttgaggtcaggagttcaagaccagcctagtcaacatgatgaaaccctgtctttactaaaaatacaaaaattagctgggcatggtggtgtgtgcctatagtcccagctacttggaaagctgaggcaggagaatagcttgaatccaggaggcagagtttgcagtgagccaagatcacgccatcgcattccagcctaggtgacagagcgagactccacctcaaaaaaagagagattttcaaactcgcttatcagttttatgctaactaaaacaaaatgtgatttttcacctatcagactggcataaatgaaagaaaactgataataaatcttggcaaggatgtaagggagtgggaactcaaaaacactaatgaggaagtattcagtggaacggtcttactagatatttattatacatattaaactgcaaagaatatatatcttttgacccattgttaaacttaatttagaaatcaggctgggcatggtggctcactcccataatcccagcacttgggaggccaaggtgggggatgatgaggtcaggagttcaagaccagcctggccaacatgatgaaactccatctctactaaaaatwaaaaaattagcgaggcatggtggtgggagcctgtaatcccagctactcaggaggctgaggcagaagaattgcttgaacctgggaggtggaggttgcagtgagctgagatccagccactgcactytagccttggtgacagagcaagactccatcttgaaaaaaaaaaaaaaaagaaaaaaagaaagaaagaaagaaagaaagagaaatcaatgttaccatagtagttttgcatgtactaaagggaatatataggaggactcttttctccttttttttctgtaaatgtcaaaagaaatggaaatgttcattcaatgggagagaagtgacatacagtcaccatacatccctataatgaatacaacatacccatgaaaaagaatgaggtggtcctacacatactgagtttaaataaaaatcttcaagacaagggaaaaaaagaaacaagtcgtggaactatattctagtgtgatccatttcatatttttatgtatatgtttgtagaagcatatggatataaatacataaacaattttgtaaaaatgtttgccaaactggccagtagttatctctggaaggaaaaaaaagaggtgaggttggggcaggtggaagggggcttttcacattttgttctgtatccttctgtatcatttaagttctgtacaactagaataaataaaaacttccatgttctgmcacacacacacacacacacacacacacacacacacacacgccacaggcatgggaaaaaaagaaaggtgtctgtttctgaagatctctgcaaagcctacagccactgccactaatcctctcaggcttctgagaatggcagccaccctcatgggagcgttgattgccccaaatgtttgctttaatcaatgcaattagcagaacaccaattaggctggaaggctgaaaggctctgaagccttttgatttgcaagagccttgttcctgcctgctgctctgtgtcaggctttccatctttcttaatcggtgactctgacttgtaaacttttccactattaccccaaactgcagcttctccttttccctagctcactgagaagttccactgtgcccaagtcactaaagccagacacctgtgagttatctatgtctccaccctcatatctggtcaaccactaaaccccgtggagctgatccccgtaagtctctcaaatctggccaccttactccgtctctactgcaagtacattactgcctctcacccggaatttgaattttgaaaaacagaagagccttgaagagacagttcctctatggctcagccctgcttcctgaagtaaattttcagctttcctctgattctgtgagttgccttatatacaaccttcatatcaactcgttttcggctgaagctagccaggtcatttttggtgcttgtgtccaaagaattcccaatgaaccctgcccttctgcaccagataaaatcttactcatccttcaggatccaagtcaagtgtccatttactcactcagtcattcattcaacaaatatttactgaaaaataccatgatagtgctgtgttaagtgctgaagattcttgaccacatgtatccctaactgtctccaaataaagaacttttgggagacttcaggtgcagaagttagttgtattcctttcttcgtggcactctgtcagcagtgatctgggtaattgattaattacctcatatccacattccccatcctcctccctcgacaagcaaccatattaattggtttgatatgtacttgaatatattcttgtgaagtgcatactgtagttttgagattaaaattcaagagtgtaagtgtagaagcagagaagccagttaggaggctgctgcgataatccaggagagatttgatggcaacttgaaccacaggtatgttatgttcctatacaagaaatccctgcatttaaatgagaacaaaacccaacagaaagctgaaaaaaatacaacagaaaaccccaaactaacaaacaacgggagatgcaaatggttgataaccagagaaatgcagattaaaacaataacaggacattgcatctgctattctgataataattagaaagttgatctctatcccagagaaagttccacgcaggatcctaagggaatgtgtatgaagaagttcattgcagccttgtttgtggccacggggtggtgaggacagcctgggtcaccatcagtgggaggatgaatgggtaaaatgtgtatcagatttggggtaagcacttttcacgcattatctcatctttttttcaaaacatccctaagatagtggaacttttcatagcattcccattttacagacgacaaaacaaaacctatcctctcctacacacaaaggctgcttgtcgtctggtacattcgtcctagttttaggacgagcacacggggttcagggcctcagccccgttctgcggtctcagagaggagtccccccttcggccgtgggcgacctcgggcctgggccgccagcaccgtggacagcgccaggagcggggcggggcatccatggagacgtcacgacgcgcggagtctcaggggcgcgcgcccgtgggcggctgcgtcacgtgacccaggtaattggcacggcgcgcgcgcaccccttccgcgcagccccctgacctgcagcctccggacctcgctgcagcgcggacccggcccgcccgcccggtgagcgcggcggcccgccccctcccggtccctgcgccgctgcttctcctgccgtcctggggaccggccccacagctcctctctcctgggtcctggggcgccgctgcccgcagccctgagtctggccccgccggggggagggggaggaggaacagactgtgaccttggctctgaccttggctggccgtggcctcccccgggacccccagcccatcgcgcgcgtaccacccggctagtccagggtcctgcgcagaggagcgggtgctcgcggtgggtttctccagcccgaggacttcagactgccccgcgccttccgtggccaggggagggcccggagctgcgagggctgtgcgggggatggggagggtcagcgctgtgcacctggcgggacccataggcagcttcggactaccaaggagcctaatagacggttttaaccgcggtctccgattacagatgagaaaactgaggcctgagagagggcggcatggcctgaggtcgctgcttgcatgggatgcgcttcttccgccccccgggagatgtgggagggggacggggtaatcccgaggccacagcaggctgcagtacgcattcgccgaaccggagagaccctttgacgcccctcggccacctggctcaagcaggccctagcagcccctccccagtgtcttggaacaggccccaactaaatagaattgcggtttgttgctgagcaaaagctcatctgcttctcagaaagtggggtcagagtagacctgctgctgagagaatccaggctctgctgctgcccagcttggagggccctctggggagaacccttcccggcctctgtttactgatctctgcaatgggtgcattagggagtagtcctcactagggcaccccagacagggttgtrtgtgtgggagtcttagtggccatggtgtcggcagttttctggggttgggttgaggttctgaggttgggttggggatgctatgtgaccttgtcctcagagaagagacccccaagagatacccagggcaactctgctggagtctggactgggcagggggttgcacagggcacctgactctcactccttgttgctgtccttgactgtatgggcaggaactagtagggctggcttgggctctggctctagatactgagccctcatgccctgctgggatgcaggtgggggtgggtggcaggctgccctcctgccaggctgggtcaaggtcacaacagtgcccagtggccaacccagactgtttagtgtttataaaacagtgttcctgcaccgggccattctggacacagccagactttgtccctatctggcccaaactgccccattcccctgtgggggtgggagtggcgctggcagagggagcagctctggctcagctgatgggaactgcatcgctaagagaaatctggcttacatattgactgcagtgatcagggcacagtcgctggaaccccacacagccctgtcactcaccagmttagccagcttagcctcttgcacctcagtttctctgtttataaagtggaactgatatgagtgcccaccccatgggatgttgggaggattaaatgagcacagtatctgtcctagaatcagtgctcctgacggtgcctattatgtttattcccatgacgatggtcttgatatctagtttcctttgccatagactggggatgataaagcgtcctgggttgtggattctttttgatgctctagaagattctccctgatgcttcaggagctcctgggcctagtggccagctgggctggcacgaccttctctttgcccaggcctctaggatagtcagaggtggaacaggagttgggaccctggctgcctgaccccagagctcatgcctggcacttggagaggtgctgctcccagaggagccggccccaagtgccccgcgctctagggcttggcatcactggctcgtgggctgggccacatgacccgaagcctcaggggctgagcaytggggagggaaacttgggggcactcagaggctcccaagctcacctccctcctccctgcagtggaatcttttttgttttgaaaattttctctgttcaggcttgctgctggttgccccaggagcctgtcctccctccattgaggtgacatcacccctttcctctggctcatgtgagttagaaggagggctgtgccctgccctctggtggggcctgaccttttgtggaaagtccagccagtgagtttctggtgacatggttgagctgatggcaggggtgaggcagaagggtgcaacaggtgttggctgagcacacctgaccaggagcgttggctcagggcctggcctgggcagtacttggaagccagttataccccagaatgcacattttctggggcctgagctgtccaggggtaggggactcctcccgcctgggcgaccccttgtggggtggtccttgcacccagcttacaagctgggcggtctgggcaggagggcattagctggtattcatggggagctgctctatggcagtggctgtgctggagcagaggaaggggttctgctcacagttgtagggtggggaacagaggtcccactttacacatcatgtgtaggatgaggtggcaggggtatggggtgatctgggacctcagtaggccctatcaacccctaacctgcctggatagggatatctggggggttctccaggattggcagaggctcttagaactcttaccgtctgcggaatagagaaagcccccatcactgaaagcccaagatttagatattttccctgggaaggcacaggtgacagagtgaggtgagatgagctgcagggcctggttccccgtggtctgggtgggcttccagtctgtacctgcctggrctgttagctgtcttgagtggcgctgggctgggcctggggctgccttccattctactcttcctgcccctccagaccttagcccttcctgcaatgaagtggggctattgttgggcctagtgtcaccagccttctggctgggcctgggagagagggcactctggcccaggattgcagtcacagggagtcactggtcacttttggtcgcaatgactagagccacagccctcctgagatagtgtgcctctatcacccccgacacctgtgctcactggatgcttttgcccctgcttttccctgaccatgcacaacacacctgacccctggaggactgcctgccctggttctagggtggtgggcctgagacccactccttcttggtggtactccctgcacctgccctgtggctctccgagtgggctccaggacctaggtgggtgctccctgaggcagggcctggggagttcatgtctctgcacaggctttggggactatccgggaaggagtgtggtctgggatgagtgtggcacagcagggctggggctcagggctgtttgatatctattgatagagtttactgagctgggagcttccaccagacagtaagcccagggggctgggagagtgtcacattcccagtctcatcactgcctagcccagcaccatctgcccagtgggaatgacaagtgctgatgagcggacagtggcttggtagagcctcttcctgtcttggtcctgccatttatgcctctccttcattgcctgtgtccagaatgagtcagctgaggctgctgccgtcccgtcttggggtacaggctgcgaggctcctggctgcacatgacgtcccggtgtttggctggcgcagcaggtcctccgggccaccggccaccttcccaagcagcaaaggtggaggcggctccagttacatggaggagatgtacttcgcctggttggaaaacccccagagtgtccacaaggtcagcatccccaccctaccctgggccaccgcaagggagggaagccctcgggggccgggctgtggcagggcagtggggagaagcagcttgcctgctgtgtgatcctgggyaggtttctttgcctctcaggtcctcagtcatcaaagcctgttgctttccctttgctgaatcagccagtgggtggtgrttttgattgagaggccctggccatgtcctgctcagccacacctgagccctgccgtgccccctttgtcgtgctatgctgcctccatatgctcctttgtatgtaattagggacatacgtgtttgtgtatgtattgatctgataaaataaatacttgctgatagtaaagaaaaaaattaaattagatgggagggtgaaaagtgaagttgttctctgaccccttcacctgcagtggaaagcagtgcagtcacatgatccaaagccagaaggtataagaagttacacagtcagaaagctccctcctaatctatcctcatctgctcagttcccactgtcccccaacttagtgtcctctatatcctttccaagacttgcattaggtaaacttactgcaaatgtaactctggatttgtctccctttacgcaaaagtaacctgtaacacatactgttttgctccctgctgttttcgcttggtgatgtatctccaagatctttccatatcagtacatgaagagcctcactattcactctgtccagctgtgtagtattccattgcatgtatgtgccacccctattcctgctgatggacatctggttcatttctagtctctgactgtggcgaacagtgctgcagtgcatcatcttacaccttcatcatcttgcacctgcagagccatctgtagggtaaattccccaaagtggaatagttgggtccaggagtggctgtgtataattttgatgggtattgccaagttgctttccatggggattgtaccaactgagtctcccaccagtgccgtatgggagtgcacggaggaaagcgcttttacattgttcttatggaaaacacatgcaaatgcctgtgtgtgttcacatctgctttttgcttctacacagagagtagcagccatacatcctcttctgcttcattcactttaaaacgtatcttggcaatattccatgtccacaatactgaaagcacctttttaaaagactgtgtaatcttccagattctaaatgtaaaatcgttatttagccagttttctrtggatagccatgtaggttgttttcacattgtcaatttttgtaaacagttctgcagggaacatcgttgtatgtacatctaggcaccctgggaaggccctgagagctgtggtcctcaaggaagacctgacactccttggggccccagcctgggccacccctgactcttcccaggccctgacctggctgcgttcttgtttctgccctgcctagtcctgggacagcttcttcagggaagccagcgaggaagccttttctggctctgctcagccacggcccccttctgttgtccatgagagcaggtctgcagtctcaagtcggaccaagaccagcaaattggtggaggaccacctggctgtgcagtccctgatccgggcctaccaggtgaggggcagctgaggcacagcctgggaggctgcactggctcctggggtgtggccaggcrctgaagggaaggggtctcagctccaacatcatctccccagagagcccttctccttgtcctctactgagcggcacctactcctctagccagtctttgccacatcaycattcagagcacttaccacctgcttgaatttttttttgtgcatactgacttgtgtccttgtggtctgttccttgcacacaccatgccccgagtacgtggaggagcacttagtaagggatcaattccaaagcctgttgaatgaggggtgagtagattaacccttgttaattctgttttctcctctagaatgggcatcctgggagaacagggactgatacagcaggtgcctaattcatgtttatggaatgaatggttcagtaaacaattctcccccaccagttgctcctcctggagacttaggctctcccatgctgggcccctgctctgtcagagtcccagtgatggtgtgtgtttttggtcttgaccagacaggactaattggaggactgctgcggtgttcaggccataacaagcgtaatcatttggaatatctctgggaactgctggcaggaggtattccrtcagggaaatgtgaggcagcagcaagccacagcaaggctagggtacaggggggcattagcaaatggaaatgatgctttgcctctgaatgagctgcccaatctgtgggatggaacagagttccctgtacacyacccacctggggatggaagagggaaggtgagcagggttgggttcccttctggcctgaggacccatcaattgtgggccacctaggagcaaacagcagctattgtgtattgtgtctttcctggctggctgaaagaagcagacagtgatctaacccttgacttcaaaaatgaagaacaaggatgtaaaactgtatattaaatacagggaaacgttcagggtgctgcccgagggccttatcttctaagcacagatctcagcccttcagtagctctttgttctttgattaaccaagacgaggcattagagagttttcctggcagggtggcttctggattcaggtgtgttactctgttgtgcctggtgtggatgagctcccaccaggagggctgcagccccttacaggcgagtagcaggcacagctgtggttagaatcacctgcacactgtgctgaaaaaaaaacactgtattattataagcattttcaaacatrtaaaaggcagaaggatagtgcagtgagcccaccacccatcaatcatggccagccttgtttcatcaatttcccccttagcccccgctcactgctgattatcttgaggcagatcccagatatagcatttcattcattgaacatttctttgtgtatgtctagagaaaagggcttcttaaaaaatgtgccatgataccattatcgcatctaaacataataatgcctaatatcaaatatgcagttgacatttgtgtttgccttttgtcctgtgctttctttttttctttttagatggagttttactctgtcacccagactggagtgcagtgatgcagtctcgactcactgtaacctctgccccacgtggtcaagtgattctcctggctcagcctcctgagtagctgggattacaggtgcttgccaccacgcctggctgatttttgtgttttcagtggagacggggtttcaccatgttggccaggctggtcttgaattcctgacctcaagtgatctgcccgccttgscctcccaaagtgctgggattacagcgtgagccattgcacccagcctgtgctttctttttactgcttctttgaagcaggatccagctaaatccacaggttgcaataggctaaagtggctcttacgtctcttgtactttgcaggttccctctgtttctttttatgatgtggaaaaaccaggtggtttgtcctgtagggttttcccaagtctggattttgctgatggcttcctcatgatgtcatttcatctgtcccattgtcccatgtaatttctgtactttgacaattagatctagaggctcratcccatagacatttgattttttttttttttcaaaatcagcttcctggtggtgatggtgatggcacttgagcagttagcagctgtggatagtgatttcctagatccattaactcactaggggttgcaaaaatggtgatatgccaattctgttttgccttctttattaactgaagtcccactatcaggagaaacttccgtttgttaactctgtttatcctgaggtgcagattgtgtaggaaagacaggatcactgctttatttttttcttttattcagtgatttymaaaattatgaggtgattccctagcacactccaaaagtgactaatgaaagtttatcttcttttttttggattcatatgaatgcatgaatrtaaacatatttgatgagtttcaatctgctgtaggtatactgtccttatagttgctcaaaacttgtccttattcccagcactcrtggtgtttgaacactgccttgatgttggtataacaagatrcttcaagctcagcttgtacatttctgcctattccagaactgtccaggtctctggctgtttcctgctattggtttgatcattacttctgggccctttcaggaatcagagccaggaaagggtttatactgatgcttctaacgtgctacaaatgtgggatttggggtttgtccttgaccctgtcaatcttatggcaacattgcctttagagatgtcaaaaatagaggttctcaaagatgccagtacaatggcttgtttgatttcscagagctcacatgcaacaatcttagaataacagktctttttttttttttttttttttttagatggagtttctccttgtagcccaggctagagcgcagtggtgcgacctcagctcactgcagcctccacttcccagattcaagcrattctcctgcctcatcctcccaagtagctgggattacaggcatgtgccgccacgcccagctaattttgtatttttagtagagatggggtttcaccatgttggtcaggctggtcttgaactcttgacctcaggtgatccacccatcttagcctcccaaagtgctaggattacaggtgtgagccactgtgcccagccagcataacaattctaacactattacgactgactggtaataaaaaagacttgatgaatttttttctgtttgtctttagggaatgttccattagtcaattggaatggtttctctctgtatttatgccactaagtggacatatttattcatttgattcatttcactttcaatttttaagacttaattttgttttataagaatgtaaaatatttacaaggtttgaaagtcaaatcttcaaagtaagataacttcttaaaaatctggctcctagccctgcctctctatcctattttgtcccctcccctagakgataatttttcttatgttgtggtttttttaaattttatgattttcccttctaatgcatatatttatttgtgtctcctttttattagataatgtgtagttcaccatacatactttgctagaatttgcttttttgcttaacaatattttttagagactaccttgtagtatcagatggggatttttcttcttccttttaatggctctggagtgctccgctgtgtggatcgcccatatccatgcgccagtctcctgctgatagacagtggggaagtttctagaatttcactattactagtagcaccgcagtgaacacctttgtgcataggtctttttcctgtttttgcccgtgcatgttgtasttccaaaccaggttgagctcctgccaccttactggctgtggctggggtctcgcaggcagcagtgaagtagccgcggggcagagacatggggaagcttaacattcgggaatgggaagagaggggctggggcccagagccttaccctggaggaggtctgtccagctgggtcccagccccaccctgctcttttccctcctcccagatccggggtcaccatgtggcccagctggaccccctgggcattctggatgcagacctggactcctttgtgccctcagacttgatcacaaccattgataaactgggtaagacccttcctcaggacggccatggcagtgctgtgtgggtggcccagtaaggggcccacgggcactagggacagcctgatccttgggaatccatggagcycggggagcagcccacagggcctcctttctaccttgcctgtgtactgcctgttgttcctgagaaggatgcctgccactttccctagcttgtgccccatgtgttcaagcctgagaggcttgtccaccctgcctccctgggctcactctcacttctgctccccaggttggacccagagggagggcactggggagactgggaggtctggtgagactgcggggctccacctrggcctgacctccctccctccactttgctgcccggggctcggccacgcctccttctccagccttctatgaccttcaggaggctgaccttgataaggagttccagctgccgacaaccaccttcattgggggctctgaaaacaccctytctctgcgggagatcattcggcgcctggaggtgagcacaggcrggtgtgtggggtgcagctgaagcagctctttggagcttgccagaggacgggaaggcactgtcttttttgttctagacagcagggatgtcagccgtccctcttccccgctcctcatggggtcccaatgtgtctccccagaacacctactgccagcacattggcctggagttcatgttcatcaaygatgtggagcagtgccartggatccggcagaagtttgagacccctggtgtgatgcagttctccagcgaggagaagcggaccctgctggcccggctagtgcgctccatgaggttggcaccacctggagggccaagtggctggaggtcctgctccagggctctatgagacgtcccacaccctgcctaagagagcaggagggtrccacaggaaggcaggactggatcggcctcaccactggctgcagggaggagagttgggaccaggtgtttaggcagtttggccaagagctggcccaaggcasagcaggtcaggtgggcagggatgaggctctaggagaacaagagagcggggacactgagcaaggccagaagtggcgggaagtggctgtgggaacatttgggcagaaaattatccctggtgtggagtgactgtggccacaccacctgtctgttcactggacttttctgaagctgggtcccccagggctkcaggggcttgggggagcacctgactcagctgctggatgcaaagtggattcstgagcagcgaggtgtgggctggagtttggatctggctgggtggagatctttgggacttggcgaagagagcccttgagtgtggcaggagggtagtgggctaggagtgggtgggcagtggcctgttggaggagcttggctatgaggaagagagagggcggcagctgggaaggggtgtaggcagaggcgtttggttcagctgggaagatgcctagcctcccctaaccctgtgttcctttgctgggtgggacaggtgtatccatggtgggccctggaccatgtaggtggaaggaggatttgtgacttcctctgtcctcagcattcagctctgagcactcatgaacagcccctgtgagccccagtcccctccctctccatccctttccctttcctcttcccatcctctccccaagcaggtttgaagacttcctggcccggaaatggtcctcagagaagcggtttggcctggagggctgtgaagtgatgattcctgccctcaagaccatcatcgacaaatccagcgagatggggattgagaatgtcatcttggggatgccacacaggtgggtccccctccctgctgtgccttgygcattctcctccagcccagggracagaggtgggagagatgagatggaaatcagagcggaggtgttggtgggacctgggggtagaggtgggtttcctggaaagttctgagtcctgggcctggcctgctcgtcacagaaattgccgggtacttggccagagtcacctggggccgggtgctaaccaggttatcaggcaccctctctccctggccatgttgcctctgtccctagcaagggtgagatttcagaaagcggtacactatacttcttgaggttcctgtggacaaggagaggtggagggatttcttccagggaagggagggcagggcctgggcagttgttcccgggttgtgtccccaacagggaggtctgtggaggtgagccgagggtctctgacctggctgcaagctgactgcgtgttcccttgaccttgatgaagatctaggaggcttgctcagcagtggggcgttacctctgagctggagcctgtggggaagcaggagggggaatgcaccctgggggacagagacgtctgtggccaggggtcctgctgagtgggcatgtgcagatgtgcagagtggcctgtgggaagggccctgggcttttcccgtgaccagagagctgcttgtggttggactagcccagggctacatcagcatgagggcatccaaatgcatggtgcaggggtccccattygtggctggcctgccaggactttggggtttgtctgtcatggggggcctgggaatgcccagtgtctggtcagagagttaggcagagctggcccagtggcctgaggcagcaagaaagcatggggctttaagcctcgggccattacagcagcaggagaggatggtgcctggtgattgggtggyctgaggagggctctgggcacgaaggggctgtattaggccaggccaggcctccacagtgggggagggaaccctgaggcctgcgggctttgccaggtgagagcccggcccctctggctccaggggaaggctgaacgtgctggccaacgtgatccgcaaggacctggagcagatcttctgccagtttgaccccaagctggaggcggcggaygaggtgggtgccatgcccaggtcccggcacccttggagagctgggtgtttgggaggtggactgtggaggggctgagccgggagcttccgggctgagataaaccttaagatggatgcattggagaagcctgcaggagagaggctgggtgtttgcctgaggaccctaaggctttttggagcaagggctgcagtctctggtagctgggagggccctcagataatctgggtcaacctccctgttttgagctagggaaactgaagyccaaagatgcaaaggcttgctggaagttgctcagttctgctcatgtggctgtgcctccatgtccaaagtcctgtccaccagccaggaatgactcccttgctcatttgtttgcccagcagagccttgggaggtgaggatggttttccgtacccatcgacctgctgaggaaatgttgttcctgctcccacccsctccctgggaggcctkggccaggccttcagcccatactgcctagcctctttctttccttttctttttgagatggggttttgctcttgttgcccaggctggagtgcaatggcatgatcttggctcactgcaacytctgcctcctgggttcaagcgattctcctgcctcaaccttccaagcagctgggattacaggcatgcgccacsacgcccggctaatttttgtatttttagtagagatggggttttgccatgttggtcaggctggtcttgaactcctggcctcaggtgatctgcctgcctcggcctcccaaagtgctgggattacaggcatggagccaccgcttccggccactgcctagcctctttcaaagtcctgyccatcttccctttcggtggctctctgggtcccctgggcartgagcctgtcactccctcctctgtgtccctttgccctcaggactatctctcctgctgtctccagcctgctgccgtgtgtgtgtgtgtgtgtgtgtgtgtgtgtgtgtgtgtgtgtggacccatacctactggctcctatcccaggtctttctgacatcctgttccttttgttctagcaccttcagccttctaagcctcactttgctcttcyrtaaaacagggataaaagcgcatgcccgagaatggttgcaatgagtcaaagatgacctgtgtgtatagtggaaaacttggccaaaggatgtttaaaatgaaattactattttttttcaactgaaaaagaaatttgatcattgtgaaaacaacaaaacagaacaaagcttatacaatgagaatatgttcctcagtgagactccattcttgtggccaattttgtttgtgtgcttctgttgtgtttaggtgtgtacttctagaaacatttcatgctgatacaaacaaacctctttttccagtgcaaccttatttctaagaggccatgggcatagccgtgacaccgggtggcaccttgctgttttcacttaacaagttgtcattgtttcctgcctgcacacatgggctaccccaggcttcttacagctaaagcatcccttgtgctggacattgggttgttctcatgagggtccttgcacatgtgtgagcgagtttatctgttagatggtgtccgagcagtgcagcggctggagctacggrggtgggactgaacgaccctcccaggagctggcagatgtcagcgagcccatccacagtgtgtgatggtgccagagcccccaccccacttcctcctacaygctctcraatcctttcatctttgccgatataataggttcaaaagaggattttgttgtaatgcatttctttgttatgaattcagttgcttatcttttcacatgcttttgagccattcatatttttctgtaaattcctgcttgtggcttttgctcattttcctatggagtttttgggctttatcttcctgatttgtaaaagcgttttgtacattgagggaatttgccctttgcctgcatttgtttatgaatatttttctcagcttgatttgtttcccctatcgctgggcgtgggtttgctcccccatggcaaatttgctagaatttaggtgtcttttgtgttttctggtgttaggatattgtgtagaatgctgtaagtcttccttgcttcagggtcataaaatgttgtgtgtycctcattgctaccattggtgtgaggagtcaggggattcagcttcagtgtttgctggtggcctggccgagggtctctgcgctgatgcctaggcactgcccttctctccctgccttccccaccgctggatggccttccccactcttgtgctctcctgctccatggtcagtgtacagagargctctgagccaaggcctggggtccctgccttcctccctcaggccagtgaggaggggcagtgtgatgaggagagaggggtcagagacagcttggccctctgaggcagtgggatcgggggaatgtgccagcctgactgtgggctgcagtgcctgcctgtgtatctgcctgtctgatgtgggaggggaggatccatcatgttcccatctccaccttcagggctccggggatgtcaagtaccacctgggcatgtaccatgagaggatcaaccgcgtcaccaaccggaacmtcactctgtcgctggttgccaacccctcccacytggaggcagtggaccctgtggtgcaggggaagacaaaggcagagcagttctaccgtggagatgcccagggcaagaaggtgagctcacctgggggaacccagaggacctgggcccttcagggtgggcccagagggctgggctggaccctgggtctccacagtacaggtgcyggctgggctacatgggctggggcacgcagcccctcctggctcacacctgccctgcaggtcatgtccatcctggttcatggggacgccgcctttgctggccagggcgtggtatatgagaccttccacctgagcgacctgccctcctacacgaccaatggtaccgtgcacgtcgtcgtcaacaaccaggtgagcatgtaggctccacgctgggcctcacagcgtcagcatccctggaaatccaggcagtagcttgcggggaaagtgagatgctcctggctctgagcccactgctgtgctgcttaccaggcaggaccctgctctttccagccttggtgtcctggtctgtgaaattggaagacacaatagggagggataagtagggctggaaggaccaaaggagcacctgtgtagcgagtgcctcatggaggctggccgtgtgcagccccacatgggcaatcttagacacagggaccttggtgccctttctctaaggcagctgagcttctaacagctcatatggagtctagaaagccctgtgttcactgccttgtttgcattaagtcacgtcatcgtccttgaacatcctgtgaggtgggaatttaagtgacccctttttatagatgaggaaacaggctgtgggtatgtaagcaccttgccccaggttgcagttagccgttgttaggactggattttccaggcctatgttcctcactaccagtgtgtcaaagtgactggcgaaaaagagcaggctccacccggctggtgctgctgccgtccccgtgggagctgttgccgtgtctaattgtggggctgctcaccatcaccctgttgtgtcccacattcctcctgggcacctcagtggaccttgagcatccccctgctcagtctccaaggctggcaccttctatctcactctaagtaaattgagaggcgcagcaggtttctcctgcctctgcagattggattcaccacagacccccgaatggcccgctcctcaccatacccgaccgacgtggcccgggtggtcaatgcgcctatcttccatgtgaatgccgatgacccagaggctgtgatatatgtgtgcagtgtggcagccgaatggagaaacactttcaacaaagatgttgtcgtggacctggtgggtctggggaytgaggccaaggcatgggtgggtggcccatccctgctgtgctgagccagccakgtcatcagcatcttcagcactcagggctgggagtgcttcttggatgagagatttatgccaccaagagcaatctgtgcaaaggcctgggacgggacattcattcggtgataggtgatagtggagctcaaagggctcccagtgggtgtgccctacccagatattccccarttttgcagcagctacattgaccacacagcgtagggaagggcctgagcccctctggctgctcctgcaggtctgttaccgccggcgtggccacaatgagatggacgagcccatgttcacccagccgctcatgtacaagcagatccacagacaggtgcctgtgctgaagaagtacgcagacaagctgattgccgagggcacagtcaccctgcaggagtttgaggtgggcaggcaggctgcaggggcgcccaagacaaactttgggtggggaccctggagagggkttgtagatgttaccagcccagtgctgggcactaaggatttaaagaagtagccactatggtccttgtccccaagaggccccagttaccaaaggggaccaagaactaaggatgcagttacagccaagtgggacacagtgggtactgcaatgtgggggaagtccagccttgagcaggagtgcgggaaggcttcctgtaggaggcagccctgagctggggttgtccccataattatctatggagtgttcgtccttccaccttcatggagctctgagggcaaggactacaagtttccrgagccttctccaagccccttgctgagcgcactgcaggcctgcccagcctcggggtacctgtacaggatcccctgaactctgagactttggcttctagccatgaggtccctataggccagagacagagagttctagaagaacttggtgatggggaccaggacttacgagtccaagtggactgggcrtctggctgcgcagggctttggtgctctgtccacatcttcatcctgattccaggaagaaattgccaaatacgaccggatctgtgaggaggcttatggcaggtccaaggataaaaagattctgcatataaagcactggttggactccccctggcctggtgagcgagcagtgtgtggctcagagggactcccctgggccttgaggtcttgcactgggatcaggactggaatggccctgggtgacagctgtcattgcctagtctagaggctgcaggctctatcactgagtccccaaagctgcgtggggccgattcctgcaagtcaaggatagcattgccctctgagcatggatggccaggtgctcactgaaaagggagggcatagccaggtgggagaggaagccctgggcactggatgcttggggccagggtgctcagagggcctccctggggggcagggttagaagagctgttaccctggggcccagaggtgggtgttgggcctgtgggggagttgcagctgtggctgtccagctgtcccaggtcccaagggtgggctcagggtgagtccgagtgccggtggagtttgggaagccatgggccactcagtcctggggaggcaggctggccagggggatcagaacccaccactgacacagtgtggacagagcctctctccctctcaggcttcttcaacgtagatggggagcccaagagcatgacatgcccagccacggggatccctgaggacatsctcacccacatcggcagtgtggccagctctgtgcccctggaggactttaagatccacactggtgaggttgctggacaggctgcagcccaggctgctggccccaccccaacactgtgcctygaagggagattggttgggatgcaagagagatggtgtgtcgcattcctgctcagtctgtagtgggtccacgtagctctcggcaccayrtctgtgcccgtgacagtagctcttttcagggtgggygtggcgagctgggcagctcyagatgccacactcccagctgggtaccagtgactagtcttaggttggggaccttggattttccaaatgcctttgccggggcgtccctgggtcaggcagaagagcaggaaagcaagggctcccayacaggggctggaacgcagcctggaacgtgggcagaattctgcagctgaaaggacggtggcttgccggggcctggaccaatgaccgagggcagccccccmactccggggtgagactagaatgtgggtggtcaccgactgcatcccttggctggggccactgtgacctttgcctgggaagtccggagggtcccctgtggctgtattggggtgcctacacaccctctgacccacctgggrgagttctgagggggttcccttacagtgtgcaccgagaccgagaccgaatgtcctggggcagctgctgacagcgtttggggcatgtgcccgctctgtttgtgtgttagcctctgtgtgtggggctgacaggagcacagcataagcctggggacttggagtcaaatccgtgtaccttgacagctgtgtgatctgagtaaatgactctgagcctgacggtgtctgcarcgtggccaatgcttgccaagtggtacctgctccacccctccacaggctyggggtagccccttgtctcagctggaggaggggtgcctggccctgggccctcctgcagcatccctgccctccaaccaaatcaacagatggctgccctgctttgtgcggggtgtgtgctgagcacctacctacccgccccagggctggctgtcccttggccctcaggccagcactcctttcccacaggcctctstcgcattctgcggggccgtgcggacatgaccaagaaccggayggtggactgggcgttggcagagtacatggcctttggctccctgctgaaggaaggcatccacgtgcggctcagygggcaggatgtggagaggggcacattcaggtgagcgcagtggggctcagcatccgcacaggagacctggagcagaagctgggcctggcttggggatcccgagggggcctttgttggggtgggatcttcacagcatccctagcccctgccctcaggtggcatcatcagatggccacctcgctgaccccccagggcaagtgtgcagagctcactgctgggcccaagctgtccactaaggtcaagctggtggccatctgtggtcctcaggatcatgtgtgtgtggggggtgtgtggtgagtgtgggcgagttgygtgtggtgtgtgtgtgtggtgtgtttggtgtgtatgtggtgtgtggtatgtggtgagtggggggagtgtatagggggtgtgtgtggtgcgtgtgtgtggtgtgtttgttgtatgtgtggtgtatttggtgtgtgtgtgtgtatggtgtggggtatgtgtgtggcatgtttgtgtggtgtgkgtgtggtgtgggtgtgtgatgtgtgtgtaggtgtatttgtgtggtgtttggagtatgtgtgtggagtttggagtgtgtgtgtgtgggtgtgtggtgtgtgtggatgggatgtgtatgtatgtggtgtgtgtgtggagatatgtgtggtgtgtatggtgtgtatgtggtgtgtgtgtggagtgtatgtgtagtgtgaatggtgtgtatgtggtgtgtggtgaatggggggtgtgtgtatgtggtgtgtgtggtatttgtgtgtggcatgtttgttgtgtatgtggtgtgtgtggtgtatgtgtttgtgtctgtatggttgtgtggtgtgtcgtgtgtgttgtatgtgtggggtgtgtatgtgtgcagtgtttgtgtatgtgtgtggtgtgtcgtgtgtgttgtatgtgtggggtgtgtatgtgtgcagtgtttgtgtatgtgtgtggtgtgtcgtgtgtgttgtatgtgtggggtgtgtatgtgtgcagtgtttgtgtatgtgtgtggtgtgtatgtgtgtctgtgggggatgtgtatggtgtgtgtatggcatgtgtgtaggggatgtgtgtggtatgtaggggtatgtgtgtctgtgggggatgtgtatggtgtgtgtatgtggcgtgtgtgtaggggatgtgtgtggtatgtaaggggatatgtgtggtatgcgtgggtgggtgtggtgtgtagtgtgtggtgtgtgtgtggtgtatggtgtgtgtgatgtatgtgtggtgtgtgtggagtgtgtatgtggtgtgtgtgatatatgtgtggtgtgtgtggagtgtctatatgtgtcgcgtttttcattctatgatgcacgctgagggggggggcgtatgttcccttctctgtgctcttctcccccatacatttcgtgccccccctgaccttttatttactccccctcaggatgcccacctctatgcacatccacccctcgcgatattatcccggccatacctccatttccctccccctttctccccccatatcccccagtcctccgctccccccccccccttattgctctcccgacccactccattctccattccctatttaaaattttcaccccttcactaccccccccatatccctgcccccacccatcccccctcccccccttccttttcccacccttccacatctctatcccaccctccnnnnnnnnnnnnnnnnnnnngaagactgtgtgtggtgtgtgtatgtatgtgtgtggtgtgtgtgtatgtatgtgtttggtgtgtggggatgtgtatgtgtgtgtggtatgtgtggcatgtgtatgtatgtgtgtggtgtgtgtgtgtactgctgttaagtcagcccctatcttgcttgtttgcagttgtctttgtgaatccaaatggggacttgacacttgtcagttgtccacaccacatttcctctggttcgggttcctaaaatgttctagatcctgcctcagtccgctcctggttagcaagccagggtggtgtggcttccaggacttgaccagctggctttctcattcctggttgcttatctcggctggtcttgctccagccagggcccaggtggccctctgatgcacccwgagctacctgtcagtccttgccagggactggggttcagccaggcgcccctcacttactgtgcccacctcggctactgcacrgtggtttctgcctcttgtgagttgggacagggctggtgagatggtaaagaagccagcaagrcggggcaggggaagtggcctcctagggtctctggctctagctggcacctgggaagtgtcttatcaggtcccctttatgggtgaaaagctgacattcagagaggtgccacaactcacagctccttcccccagaccccccagtgcgtggtgtgtgggcgctgctagcaggcagggggcaggctggggaggcctggtgggggacaggctgcaggagggaccacatggctctggttttccacagccttcttggatgccatgttgtgggaccctgcaggtttcctgggacartgacggaggcttgcctgcctcctgctgcccagctcccctgctccaggtgaacaggtgccagcccacctgccctctgtccctgcccyggtctgtgtctctgcagtcaccggcaccatgttctccatgaccaggaggttgaccgcaggacgtgtgtgcctatgaatcatctctggcctgaccaggccccgtacaccgtgtgcaacagctccctctcggagtacggagtcctgggtgggtccacgctctcctgcaggccaggcaggccccagacacctggggacaagagatgggctgggaagggaccrgggccagggcctgggaggggcgagagatgctcagaggcccttaggggatggccctgggggatggtgattgggctgccctcacctaargccatgtgggaggtgaaatcgtgtcccatctgggccccttggggatcccagttggggggacctccttrccttgaggggttttgtgggtatcagggccccagtgggcgcagacagagagcccaacacagtctgctgtgggttccagctgctgagcagtccagtcttggcccagccctctcacattcctttgagccccatcttgcctcctctgccctgcaccctaggaacactgcactgagatcccttctctgggctctgggcttccctgcctgtgtcccctgtgcatgctctccctcagatgcatcattagctggctcacctcgtcctcactgcctgcccctagaggccaggcagccccccgcccccaggcagatgcctctagggctgtttctgccccttctccttagcagctctgcatgtttttaaggagttcttgacagatggtccctgttgcctccccaggatacctaaataaggttgaacctgaccacacatgatagcagggctgagggtagcatctctgagcatgttgtcagcccccaggatgktacattgtaccctttgaatcccagggaatccctgggttcgtcctggcttgtgagaaggatgggtgggggcatggaggatatactgagaaaggctaaatttgactggagccactgccacttggtgactgygtgcagcaagctctatcttgtcttctgtttaggctttgagctgggctatgccatggccagccccartgccctggtcctctgggaggcccagtttggggacttccacaacacggcccagtgcatcatcgaccagttcatcagcaccggccaggccaagtgggtgcggcataatggcattgtgctgctgctgccccatggcatggaaggcatggtgagggctgcggtggtggctggtggcttggtgggttctggcgggccttgaaggggcgggatggaccctgggccccttgtcgggttggacggtatatgccttccaggcccytggagcacgtgggtctgtgcagggtggggtctgcacatgtgcatgctgcagctgctgagacgatgatgctacccctggcagcagaaggcgctaccacgtatgagtgcttgctgtgcgccaggcactgttcaatgcttctgaatgttaactcttccaatccatacaacttaatgaagtaggctgtgttcctgcttttcagatgaggaaacagaggcacagagctggggagtaggttgcccaaggtttcacagctagtagctggggtttgaagctatcctgtgcagtactgcctgttctctggtcccctcctgtatgacctgcctctgcagccacacatggggcagagggaagacatgcaggctgggtgcatcctccggaggctcctgggctagcaggaagggaggaaggagcagggtgtcatgtgataccatctggtgggcaggtggcctgaccaggcagaagggagacaggcagggggctcattgccaccattatccctgagtggcatgttatgagcactttacaggctgcatactcggcatcctcacaacaccgggtatcagtgaggagggaggtgaggctccctgcttggggctgcctgccgtgaaggcagcttcttgggaggccagatctgggccaggctgggtgtggggggctgggtccttggccgtccccaccaagagagggcaagtggcagctgtgcagtgggtcatccccgtcctgcaggagctggcttggagatgcccctgggcttgtcttgctgctttcatggagcagagcggtccgtgtgggtgagggtgggcgaggcccaggccgagttgggttggcccctgcctggctgtgtggtcatgggtggtttcttacmctctccttgcctcttcatctgtgcagtggggaagagtgtctgcatcatggggctactttgggggttagcgataaggcgtgtgggattcctagaactctgcctcctgtacagcaggtgctcagtcagtggcagccactgttccaggacattccagagaaagcacgtctcagtgcgggctttttgctttttcttctgtccctgcaagttcacatactgtgctagctctgggcagaccccactctgaggattcccattctgctcttgttccacattcttggttcttttctatggttcaggctccagggtgagggcacctctgctgagaagccctccagactttcccctgagcctggggtccctgcagrgccakatgtctttcccatggtggggtccagccttggctgtctggcgtttgctttcagggcccagagcactcgtcagcgaggcccgaaaggttcctgcagatgagcaatgatgactcggatgcctaccctgtgagtgttgctgctgtccccaggacagggacgcgccctattgtgcccacagggctaggggtccagggtgtgggtgcagcagacagccaccctggccatatgcatctcgtccccacaggcattcaccaaggacttcgaggtgagccagctctatgactgcaactggatcgtggtcaactgctccacaccggccaactacttccacgtgctgcgccggcagatcctgctgcccttccgcaagccggtgagtctccgtcccagggcaggggtcacaggcagggggcctggccaggcagggccagctggcagctgggcgtgtatttcccttccagctgattatcttcacacctaaatctctkctgaggcacccagaggccaagtccagctttgaccaaatggtatccggtacgtgcctggcctgggtgtgtggggtagcccacaatggggcggtggcccaytgtgtggcttctgcttctggggcttctccaacctcccctctgcctgtggctctgctgacctgcagcagctcctggcatggtcccactagcagtagggttgggaggttggcacaatggctgacctgggccagctcaggtcatgtgggttgcgtccatggtagagtccactggggcccccttagaccctagcagggctggtcgaggcctggcagaggcctgctgagttcgcaagatattgagtatcattcattcatttgtccattttaaaaattcatgagccaaacagacattacaggccctggggtcctggtgtcccctccaggagtctttggccttatttccctgggagtcagatcagataaaacactatagttgcaactgagaggtgactatgtccagggaaggacaggtgtgaggctggtggagcagagctgtcttggaaaatggtcctgggcagtagagggagggctgggaagggcctcagcatggacaggggttggattttctcccatgtgtgtttggatgtcccctctgtgcaggtgggcagctgttagagctctgatgtcgggactggactacctgggctacctgccctgtgctggcttctctcttgagggcctgggatccatttgtcctctctaccccagagtcttcacctgagatgcagggatgtgaggacactacagtagcytcctgagaggttttgcagtgtgcgtgacctggggtcaggatcatgggctcaggaaggaagaatggttggggcttggaggtgaagctcagctgccaggctgaaagaggwggagcatgcagcagcctcctgggacatctgcttagtggtgggggactgcagtgctctgcaggaggtgggcgcagctgggcagaagcaaggttggggcaaaggatgatgccatcatgttgccttctctgtctccttcagggcgcttcttattgtacccccacctccggtcaccttaaacgtgatgcttccagggctcaacccttgggtgtctccacccctctccctatgacagctcagggtgtcatctgccccctgctccatcttttagttcaagaggtgtccactgcagccacaagtccaaacctgcagttagtgtcagtggctaaggagagcctggggatgcaggcctggtcctgagctgccccarcccctctgggtaccaacgcctctgccatgtcctgttggtccctcagggaccagcttccagcgggtgattcctgaagatggggcygcagcacgggcccctgagcaggtgcagcggctcatcttctgcacgggaaaggtgtactatracctggtgaaggagcggagcagccaggacctggaggagaaagtggccatcacgcgcctggagcaggtgtgcctgaaccccttgtacagtcaagtgatgggcaagctcacgtcgctggccccggctctggccaatgtgccaggcaggccagatgaaggccggtgaggccctgtgcctcctgtccrggggtgctggggacataccgcccctcctctggctatgctcctttgtttctgcctccccagatctctccattccccttcgacctgatcaagcaggaggcagagaagtacccaggtgcggagctggcctggtgtcaggaggagcacaagaacatgggctactatgactacatcagcccacgcttcatgaccatcctgaggcgcgcacggcccatatggtacatggtggggccgctgattgcccctcacctcggccctgaggctctgtcctggctccrtctgtcccataggccatgctacccagaactggccctgcccttctctggtgatgagcaatgatggggcatcatcagtactggctttgtgtttgttctgcagccagaactgtattaaggaacctgctacatgtctcaaaactcctgccttagatcttaggccggttatgtagtccttggagccttagtccctgcatctctacaaagggcggtgataagattagatctgatgtatgtattagctctggcacatggtgcgttcccaatactggcatcatgtgttcctgggaagatgggagagggtcctgagaaactccaagaagccaaaagtatgtttgtccccaaagtctttgagttgttgcctcatttgttgtcctcatgggcaagtgcagtgacatggagggacagtttctccccactcttctgtggctaggtgactgagtttgatccgggctttgcagctcattggaagtggtgccagggccaaaaggcagggtctatggcttcgaggtcagcggttctcagatgcgtgccccctgcagtcccggagtgagggcagcggttggggggcggctaggccccgccttccccttagcttgtctctcctcctccaggtatgttggccgggacccagcggctgcaccagccacaggaaacaggaacactcacctggtgtcactgaagaagtttctggatactgccttcaatctccaggcctttgagggcaagacattttagagctgggcaaaacctgtgtaggtctygctgtgggtttgctggggaccaagggggtgatgaaaaggggaggggcggagctcctgcccargagaggggctgtggggccccaggataaaacagacacagtgwcagggccaagagccagcactgctggccttggtgtcatgccagaatctaccaggactgagggagccagaggagtcctrtaggcaggctactgtgctggagcatcccccagctgctcccatcttgctggaatttcttgggcggcttctccacctgtatctcaagacagacacccgggggcctgtgtctgtggccgctcccatcccggcagccctggctgctgctcgccccaccctcgcttatctgtagattcaaagcgatgttctcttctgtgctcttagaagtagggagttcagcagtaacagccaggtgaagcgaacctgctgggtgatttgtttgcgctctgttttatggggcattcctgcgagatgtgtcagcttctgtrtgaaatgcagccacagctcatgtgtaccaaagtagaaaaccaaatcacagagaaataaaaacatgcttcagagagatttgctgttttcatttcatgttgtaaaactgggggagggataggcagttgagagaaggtagggaatggggagaaagttaaaaaaatggagagaagaaaatatctgcctccatggatatttttttgagacggagtttggctcttgtcacccaggctggagtggagtggtgcgatcttggctcactgcaacctccgcctcccagattcaagtgattctcttgcctcagcctcctgagtagctgggattacaggcatgcgccactatgcccggctaatttttttgtattattaatagacggggtttcaccatgttggccaggctggtctcaaactcctgacctcaagtgatccgcctgccttggcctcccaaagtgctgggatgacaggtgtgagccactrcgccagattttcatttgagcaccaggtagtgtctgttggcttctccactctggccttttgtgggttttgcttccctgtggagatactggagaagctgccacagaggagggatgttttgcttggaacagatcatgtgttcatttatccccttctcagagcacttcctccgtgcgggacactagggcccgggtggaaggcatctgtctgcatgctggcttttcgcatcgggagtccagtggggagacatgtcagctgtttaattcattgagttacragttatgttggaagtcaatgcagacagctgtgggtgtcagggaaggatccctggaagaggtggtgttcaaaggaagaggaaaagagagatgaacctctctggaacagacagaaatactgaccatagggctggcatgagcaacctaaaagaacgatcagcgtgaggttggacagtggagtgttaagttttatcagcctcaaaaatagcttgttgaaaaattagctgggcatggtgacacgtgcctgtaatcccagctactcaggaggctgaggcaggagaattgcttgaaactgggaggcggaggttgctttgagccaagatcgtgccactgcactccagcctgggtgacagagcaactctgtttcaaaaaaaaaaaaacagagtatgtcttgttgagatatactttgaatcctaccacagggacattcaaagtgacataaagtgaaaagaattgtagcccccatttatagtgtctgtcgtgtcttgggccttctgctggatgttttgcgtgtgtaattaaacgctgtctaatcttcaccatggctttgcatgttgggaatatttccattttatagacgaggaaatcgaggttcatataaagttatttgcccaaggtcacttcytaaggaagtggtggttttggacttcacctctgtcctcaagaccacattgcttcccttggggaaatcagctcttcccataccatgcattcctagccccacagaaatccactagtctgggctttctctgcgattggctgaggcagcaactggtgaggcacctgggctgtgcaggagcccttggggatcagatggtggatgtggcctgcccaaggtgcatacagtcccttccttagtgtgggtacgggaaggctgtagataggccagaggtcatctcctgcaggaagaggtacaatcagccaggcatggtggctcctagctatagtcccagttactcaggagactgatgcaggaggatcacttgagcccaggagtttaagaccagcctgggtaatgtarcaagaccctgtctctttaggaaaaaaaaaagggaagaggtgcaaccaccagattaccaaattggggaaaaccaaccacataaaaaacggctccaaaccctataaacataagaactaaccctgggatgccgggtgcggtggctcaagcctgaaatcccagcactttgggaggccgaggcgggcagatcaccaggtcaggagatcaagaccatcctggctaacacagtgaaaccccgtctctactaaaaatacaaaaaaaaattagccgggcatggtggtgggcgcctgtagtcccagctagttgggaggctaaggcaggagaatggcgkgaacccaggaggyggagcttgcagtgagctgagatcacaccactgcactccaccctgggtgatagagcgagacgccatctcaaaaaacacaaccaaaaaaacaactaaccctgggaaataaaacaagctcatggaacaagcagaaggctttaaatgaactgtagtaacttcagagggcaaggagaatattgctgctatgaaataataacagactatttttaaaataattggatgttaagaaaatatgaaattttcccaaaattaaaacctcagtagataggctgaatagcagaacaaacacagctgaaatacaaaataagtttgaagacaaggccaaggaattctccaaagaaagttgaacaaagaacaaatatatatattttaaaattctttaaagaaacatggagaacacaggagtttcacaatgctgatactgcatctaacaggaatcccaggaggagaagacacaggggatctttgtgatggaatgtctgtctcttgactgtatcaatgtcactgtatcctggttgtgattatcctagagtattgtaagatgttattattggagaaaaatgggtaaagattctctgtgatgtagttcttaatgatggcatgcaaatttacagtgatatcagatacaaaagtttaattaaaaaatgagttgtctgctccctattgagttgtaagggttccttatatactctggaaacaagtcctttaccacatgtattttgcaaatattgtcagtctgtggcttgtattttaaatttcactaagagtgaaagatttttattttcatgaagttcaatttatcatttttaatcatttgtgtttgtctgtttgggttgctataacataatgccataaactgggtggcttgtaatatttctcacagttctgcaggctacgaaatctaagatcaaggcactggcagatctggtgtctggtaagggcctggcctcctcagagatgatgccttcctgcagtgtcctccatggtagaaggggcaaacaagtctgcccctggacctctcttttaaaaaatttttaatttaatttaatttttwaaaatttcaataggtttttggggaacaggtggtgtgtggttacatgaattttagtggttgatttctgaaattttggtgcacycatcacctgagcagtgtacactgtacccggtgtgtagtcttttatccctcacccccccaactctttcccttgagtccccagagttcattgtatcattctttattcttttctttttttttcthtattgcgcaggctggagtgcagtgrtgcaatctcagctcactgcagcctccacctcccaggttcaagcgattctcctgcctcagcctcctgagtagctgggattacaggtgcacaccaccatacaaaataatgtttgtatttttagtagagatggggtttcaccatgctggtccagctggtcttgaactcctgacctcaagtgatctacctgctttggcttcccaaagtgctgggattacaggtgtgagccaccatgcccagttccgttatatcattcttakgcctttgcgtcctcatagcttagcttcgccttatgagtgagaacatagaatgtttggttttccattcctgagttacttcacttagaataatggtctccaattccatccaggttgcygcaaatgccattatttcattcctttttatggatgagtagtattccatggtgtgtgtgtgtgtgtgtgtgtgtgtgtgtgtattacattttctttatccactcgttggctgatgggcatttgggctggttccatattattgcaattgcgagttgtgctgctatatgcatgcatatgcgattatcttttttgtataatcacttcttttcctctgggtggatacccaggagtgggattgctggatcaaaccgtagatctacttgtagttctttaaggaatctccacactgttttgcatagtggttgtactatttacattcccaccaacagtgtaaaagtgtttccttttcaccacatccatgccaacacctatcttttttttattttttgattatggccattcttgcaggagtaatgtggtattgcattatggttttgatttgcatttccctgatcattagtgatgttgagcattttttcatgtttgttggccatttgtatatcttcttttgaaaattgtctattcatgtcctcccactttttgatgggattgtttgtttttgtttttgctgatttgtttgagttccttgtagattctggatattagtcctttgtcaaatgtatagattgtgaagattttctcccactctgtgggttgtctgtttactctgctgattatttcttttgctgtgcagaagctttttagtttaattaagtctcatctatttatctttgtttttgttgcatttgcttgtgggttcttaatcatgaagtctttgcctaagccagtttctagaagrgtttttccaatgttatcttctagagtttttatgggttcagttcttagatttaagtctttgatccatcttgagttgatttttgtataaggtgagagatgaagatccagtttcattcttctacatgtggcttgccaaatatcccaacaccatttgttgattagggtgtcctttccccactttgtttttgtttgctttgttgaagatcagttgactgtaagtatttggttttacttttggattctctattctgttccattcgtccataagcctgtttttgttgttgttgttttrttttgttttttgagacagggtcttactctgtcacccaggctggagtgcagtggcaccatctaggctcactgcaacctccgcctcctgaattcaagtgattctcgtgccccarccccccaagtagctgggattacagatgtgtgccaccacacccggctaatttttgtatttttagtagagacaggttttcaccatgttggccaggctggtctcaaactcctggcctcaagtgatctgcccaccgcggcctctcaaagtgctgggattacaggtgtgagccactgcacatggtctatatgcctgtttttatataagtaccatgctgttttggtgactacggtcttatgatatagtttgaagtcggataatgtaatgcctccagatttgttctttttgcttagtcttgctttgactatgtgggctcttttttggttccattcacgttaactttaggattgttttttcttgttctgtgaagacctagaacttttttataaggactaatcctattcatgaggtctctaccttcatgacctaatcaccttccaaaggtcccatttcttcacaccatcaactgaggggtcagtattccaacatatgaatttggtgaacacagatattctagccatcatagtgtcctaactaaaaaaaaatttaaacctaatgttaagattttctcttgtattttcttctatatatttaatagttttaacttttttttttttttttttagacggagtctcactctgtcacccaggctggagtgcagtggtgtgatcttggctcactgcaagctccgcctcccaggtcatgccattctcctgcctcagcctyccgagtagctgggactacaggtgcccaccaccatgcccggctaattttttttttttgtatttttagtagagacagggtttcaccatgttagccaggatggtctccatctcctgaccttgtgatccgcctgcctcagcctcccaaagtgctgggattataggcatgagccaccgtgcccrgccaatagttttaacttttaagtttaggtctataaacatacattttgagttattttgtatatggtgtraggtgagggtccagatttattatttactggatgataatcaattgaccttgtaccatttgtttaaaagactatccattactcatggaattaacttggcacctttgcgtacataatatatagtcaattacatagcataaaaatgagaaaatatgtgcaagacctgcacactg

SEQ ID NO: 10011 - DNA, 32443 bp, Homo sapiens
agccccattcactctcaaagaatttctaatgagcttttcagtgcctcaagtttatggacctgtgaatacagacccaagaattactgagcaattaaagggagcctctaatgtgaaaggcaaagtcaaaagyaaacaaatagaaaatgaatccagaggcactgcaaagggcaaaagaaacctcaggggggaccactatacttaatatcttcagaaagataggagaataaacatattgcatacataaaaagaataggatgccacagaaaaggcacatcccagtaacaagaaagagcttttgaaaatgaaaaaggagtatagacaaaattagaaatttaggcagttatggtggctcacgcttgtgatgccagtactttggaaggctgagatgggaggatcccttgtggccaagggttcgagaccagcctaggcagcatagaaagactccatctsaacaagagaaawattttaaaattggctgggcacaatggtgcatgcctatggtcccacctacttcggaggatgagccaggaggatcacttgaacccgggagttcaaggctgcagtgagctatgattgcaccactgcactgaagcctgggtggcagagcaaaaccctgtctctaaaaaaaaagaatttagtagaaggagcaaaagataaaggcgaagacatctcttagaaagtgaaatgaatggcaaagaaagaaaaactggagaaaaaagagaatacaattataggatcaatttaggagttccaacatcttgctaatgaaaatggacagaggaaattatcaaagaaattcccagaactgaacgtcatgagttgctatattgaaaagtactcaacataatgaagggaaggaaacttggattaaggtatatcataaaagttcagaacaccaaagatgaaaggaagttcaaaaaacatacagatagaacaaacaagtcacttttaaagggcaggagtcagaacgatgctagccttccaacagcaacaayagaagccaaaggctaatagatcagtgctttcaaacttctgagggaaaatgatgtccagcttagaattctatatttggccaaactatcatccaacatgaggataactgcaactaactctcaaayggttcacaaaaaaaaaaaaagtatgcgcttataatctagagaaaagatgtaattcaacaaatagggcaaaaggttaacaattggtgaattggtaaggacactttttgtaatattcttgcaagttaagtcttctccaagtttgataaaaaaaaaaacccatacaactaatgggggtaaaataaaggaatttttagacatgtagggcatccaaagtttatctccgtgcccactttcttactaagccactgtagacgtggaggtgttcatgcaaacaagaaaatgaaagaactaaagtgcaaccatgggatcaagaaaacagagaatccagcacaaaagagaagagacgggaagtcctgagacaacagctgtgggtggctctggacaggagccaggctgacctggagtgggaggactgaggacagaaggtttatttccaataaaatatgaaactaatagattagctgtttgagtaatcttagagttcagagagtttggggatgaataagtggctggggccatagaaaatagaacaaaccaaaatttgagttaattattaactccagaggcaatgaacaattgcacaagaaaggtttcttacatggttcagctatgaacaagatttatatgggcatattaatataaagatgaatatataatataatcatgttgggaatgaggggagggaaatggtgtatgaatacagggcataaaagacagaattcctcatcgtccatagtaagaaatcaatagataatgtataaaatggaaaaagcaagaaaagcagtaaaaacctattctttgaaaatatagaggtaaacatgaaaaaattgctaaaataattgaaggcagtgtctctgaggaatgggaatcagagatggtagggaaaagcaggggatgtggtcttttgttttgttttgttttgttgagacagggtctcactctctcacccaggctgcagtaccgtggcgggatcacatctcactgcagcagcctcaaactcctgggctcaagcaatccttccgcctcagcctcctgagtagctggaactacaggagggtgcccaccatgcccagtttatttttattttttgtatttttttgtagagacagggtctcactatgctgcccaggatggtctggaactcctgggctcaagtgatcctcctgccttggcttcccaaaatgctacaattacaggtgagccacctcttctggccaatgtgtttttttataagcagggtttgtcagggacattctcagtttttcctccctagtctggtataatttcattaccattgccccttttactcccaaagttgtcccagttttgtatgtagccctgaaatgctacttcattttttaaactatgtgtgcatgatattttgataacagtgaaataaaaagagaaggctctttggaccttaaataaaataactctggttcatcaagctcagtcaaagactttaattttcttttttccaaaaaccgattcttggktttttttttttcaatttttaccctctgtacattagaatgtatccaaaaactaattcttcattttaaattaattacaagcaatgtgtacttcaaagcacttttacaatcactcactcatttaatccttacgacagcttcatagggtaagcatcctatcccattttatagataataaaaatgaggggccgggcgcagtggctcatgcctgtaatcccagcactttgggaggctaaggcaggcaggtcacaaggtcaggagattgagaccatcctggccaacacggtgaaaccccatctctactaaaatacaaaaaattagcccggcgtggtggcacgtgcctgtagtcccagctacctgggaggctgaggcaggggaattgcttgaacccaggaggcggaggttgcagtgaactgagatcgtgytactgaactccagcctgacaacagaggaaaactcycaaaaaaaaaaaaaaaaaaaaaaaaagaggttagggaggtcttctgattgtctaccaaggtgacactagtccactggaccaggccctttaattgcagtttgcrcactcttgccacaatatcaaatgataaagcatttaagccatcctacatatgaacagaatctgagatataaaaccaataacccagattaatagcctattagaaaaacagattatgaaaatgaataattcatacattcttctgtttttgaaaataaattctaattagtctgcccagctaggcttagtggaaactgaaatcaatctcatgggaagacagcccacacctccaacccctgtcatctttggagtcccagaggatgaaccgctgcygctaaacctccggaccaggaaaacagtcctagtgggtttttttgttttgttttgttgttgttkttttttttttagattacaaagtaatacatgattatttcagaaaatataataaaacagagatatagcataaaagaaaaaatattctaaatcccatcacttagaggtgaatacacctaacaatttagtggatacatctctgtctttttgtaatacagatacaaaaataggatcatatgacgcaaacttctcagtcacctggtttttttcaccaaacactatattttggacatggttccatgtccataaccgtgtgtctacatttttctttttagtggctgcctcatggttcatcatttgaattactgtatttgatcaatcctctgtcactagatatttgggttcttccttttttctttccagcattaactctgcaacaacgacgaaattctatacacacatctttgtgcccatgtccaattattcctcaagataaatttcctgaagagagattactgtgccaaagagcttgtattttatggggggcttctaacccacattgtataccccaccaacatagaatgtgcttgtccatactctcttattcagatgacccaatgtgttctcttatcaatgcttttatccctcctgtgggttaaccatgaatgaaacaaagcaagggggttgggatgggaggcagttgaaacaaacaagaaatttaaaaagagttctttaattccttctttctagtccctcccacactctaatgtttttttccaatttggaactctggcctgactggttccaccctcagctcacacacyaactttccctgcccatgcctattctgtatttttgagattgggtcagtctctcctcactagcgagtacatacattcctttgaggtgagggacatcaccttcagtgtcaaggtttggacaatatcatcaaagggtcaccaagacatgcccaagaattctgaaatttcagaaccaggcttgttagaatcagttgtttaacacagtctcccacactgatctgccagccacgagaacaaagccacatggaagctaaagacacaggggcagtgtccagttgctggctggacattcctacacctcctcctctgattctcaatgctccctgggcccatccccttccaactcctcccccactagcccggcactgaaatgcccttgttcactttattttaaatgggcaccattcggaggctacattctcacagtccattctttgcttcccgttcctcccttgctccatgacctgggatcatgatccctttcttcctraaactttcacccctagtttcagatagttgacagttttgcacaaatagtaacatttccccgtaattactgttttttttttccttccttatcaaaaggggctggtcaaagccaaccttgttcagtttatgaacccaactccttcctccctcaagactgacacagagattgacgtaaagagtacgctcggcccggttaaatttataagcacagaaccaggtatcgcatgcttgtccatgtgactcttttttttcttttctttctttcttttttttttttttttttttgagacggagtcttgctatgtcacccaggctggatggagtgcagtggcgcgatctcagctcmctacaagctccgcctcccgggttcacgccattctcctgccttagcctcccgagtagctgggactacaggsgcccaccaccacgccggcctaattttttgtatttttaatagaggcagggtttcaccgtgttaaccaggatggtctcgaactcctgacctcgtgatctgcccgcctcggcctcccaaagtgctgggattacaggcgtgagccactgtgccaggcccatgtacaaaataaagcacccggaactttgcacctggacktatctacactcgacaatctttgtcctaggaactcagggagtccacaccaggcttttaacacccttgagactgaaggagggaaaaggctgtaactggcagcgacaactgggcctagtakaacgcgaactccagttttggccaaacctcctccaacacacatgtgcaaagccacattctcatgaagagggggcaaaacatttgctttctgggtttaaccttctaccatctcaaaccaactgtgccaaaaatttccctgttcaccaggattcatcaaaaaacgtacatttctattttcaccgattttaagagaataattaactgctctatttttacaaaaaatacacaaagtgatacaatctaaagactaatcctcagacaaaatcaattgctaaacattggaggggcaaaaggggagaccacgccgcaaaagcacggagaggcaactttcggcaccgcgggaaggccccgaccacgctgcggctccgcctctcctcccgcccctcgttcggtagtccggtagccccgcggctccccgaattccccgccctcggcccctgcgggcgcaccctgcaggccccgccccggccccgcctcatcgcgacgtcagttgttatgkctcggctccggccgcggccgccgctgatacacggttgtggagggtacggccgcggtctccggaggtggcgggggtgttggggacgggtgctgcgaccggcactgcccatccgagcgggacgggcgctgagtggccgggaggcagccgggtagccgcctggaggagcagtctcggggcctattattggttttttccctccgagaccgattccatctgcagagaccgcgacgccccatcctgggccgggccgcagtgcccgcccgcctgagaggcgccgcccgccagccggcccgagcgaacctggagccgccgccgtgcccgccgctcttctcgcggagcctgggcggtcggcggggcctggggcctgggcttcgggcgcggcgttgcggcggccgctcctccccgcgcagaacacgctgggccccgggcctggcccggccgagcgccgcgccctcctgacccgcggccgcgggagtccggcccccacggcccctcgggccccggcctgccgcccggatccccgcctcctgggcggatctgagttattttttggtctccccctcccccttgagatcgcggcaccggagggccgaccccgccacctgggtcagtgcccgccccgggggaagcgtccctcgttttgttcttccccgcgagctctccccgcgcccctctcctttctgtgcttaatggatgggggttttgagtttttcccctttatttttgtcggctcttgactgggaggcccggcgcgaggctctgcgtctctgcgtccctcgtcgccgcctcgcgcccgcgcggatcccgtcacctgcttccccgccggggatggccggccagtgacggcgccgggtggcccgcgcgtggacacggggccctcgcccaagctgccaccgagccgcggccccygccctcgacccttctctctcccgtattccgagctctctggaaagagaggaractmcagggaagatgtggctgaagctttttttcttgctcctctatttcctggtcctgttcgtcctggccaggttttttgaggccattgtgtggtatgaaactggcatctttgccacccagctggtggatccggtggcgctgagcttcaagaagctgaagaccattttggagtgccgggggttgggctactcagggtkgcccgagaagaaggatgtccgggagctggtggaaaagtcaggcgagtatcgggcttcccctagggtcccctccacctgggagaggggacgacctgtacctcctggtacctggctgttcccccagagtgaggcctttcctggaagcgttaaagctgcccaggtttcttcgtccaagcttcctacaatcaagtatgcggatcccagctttgaggaggagtctgaaattatttggaggagtgttggtgtatccttttaaggttatcgtaaaatgacagtttaaagtgtggcttcttagcgttgtttactaagttgagtgattttctcaaaattckggaatatcaactagttacaaactggaaagcattatttgtcagttgaagttcataaaaacgtaagaaaaactccaaaacgttgtctgtcaatagcaatatttgtcacgatagtaataataagatacccagagtggggacacatctttggaatacttactatcagaggcacttgggcctaggatttaaatgttaaatcatgagtttgaatatagacagtatacaccgtacagtattagcttttcagactttaagtttggtgaaaataaggcgagcattttgtataaatgcctgccatgttcgagtttatattatatttctgttaggatttttaaaaatttgcatcttggatgtgtaaaagaaaawttttttttgtcttctgtgtcacaggtacccttgcattgtttaatgggttgagaaatatacgtgaaatagtgctgagagaatattcaatgtcttaaagaatgtgtttttagtaattgttggktttggtaggattgggtgagaaatatggttaatttttttcactgctgcacaaagtatatctttggatatacttcctgaaagtggaatgtaatttgagaaaggctttctgcgttgctrtgggaagcagctgaaactgatggttatcttttttgttgtttcaagtatttttgtcagctgtatcttttacaagacaaatcttttccttctttagtaccttatagacatgtagcgtgatagacaagagtatgagctcgctagcagtttaacacttggatatttgtaggttgcgggttataaaactcatatctcactattagggtagaggagaggaacacactctgcagaagtgataaatgtttctttagagaaaatataaaatcgtatattattcttgccccttgtttgctgactggtttatggcgattcttatttctaccatagggggaagaagtggagtaactagggtaaaagatctctaataaataaactctcttggtttagagatgagaagtgtctcaactgccaaagccatcatttttttatggaaaataatttggtcacacatttttttttcttttgactgttatttattattgccttcttttgggcctaaaaatacttggcacattgaatgtactagaagtccacatttaactttaagacgcacagcccagtatgactcaaatcacacgttttatggcagaaaagtcatggtatagcagtttaaaatttaagtgtttattgtgaatggttttgctgctatcatggtgcagtacttggtttctcactgtttaatatttaaggcgaaagttaaaataatttgaytttagtgttttcctttcctttttgtttaatgatacaagctctaaatttataatataaatttgtatatgaatatggagtttgttctgtctaacaggtaaagttctaacctccaagtcatacaaaccctgttgctcttttaagcagggctgmtggcaaattctgtgaacccaattctacatcttttaagtaagaagcatataagccatactgtttaaaaatgtatatgaagcctgtatgtgtcattcataaaactaaataattaagaaagttgtgcctttttggagtggtacaaatttggtaagttcctaataattatgtgataaccccactaaaatataagccctgttctataagagatggatttttgtctattttgttcacttttccctgatgcataggaagttcttactacatatttattgaatgtatgactcctaagtgggtatatccaggttcttctagtagttcttgtctataaaatacaatgaaagtacaatatcatgattcttaacagtgtaaaaaatagaattactgaaattgggaatctaggattcttgcaaccttattagtgttattcttttcctttcttcaggtgacttgatggagggtgagctctattctgctctcaaggaagaagaagcatccgaatcggtttctagtaccaatttcagtggtgaaatgcacttctatgagcttgtggaagacacaaaagatggcatctggctggttcaggtatgaaaagcagtaataatttgataattcgagagccctaaaaaaattatttttaccaaaatagtatgtaccagccagtgacacttccgtgtccttgtgtcttgtttctcacacataactcagttctcttagggaggctccagtatcttcttaaaaaggttttggagactgaggaagatgaaarttgagtagtgggaaagagaaagatgggggatgggggtcaactttttgtttagaatccccagaagcaaatctattttagttattggacctttgttgaattgagaaatacacatatatatcccttttatttagtgatttgcactgtttctcttagtttttattatctccagtttttaattcagtggcctgagtaatttttatatataagtaagaaccctaaagtaaaagtaaaggaatcattgtattagggaaatagccaactttgtgactatagaggagctgttgtggaaaatggtgggggtgctcattacgtaactcaggatgatgagattataatttttaacccttgtttttatgatagcaaaactgtgagacttaattagcatattagaattttagagctatgawggaccttaaaaatattttatgctttccaagatgtaatttatggtgagtgggcatgcattatcatttacatattttaatgtaaattagaaaaattatattaacataaatttcataaattttgcttaggacaggactaaagttatttacattttaaaactgtacattcaaagtgacatatcaagtaaattaacagcgtgaatgtggctaaaattattaatgtagtctgtgaatggctgaagcttggaaattatatcagactaaccctttctgagactctgagaggtgaagtagcttgcccaaggtcatggaactagttggtagtattgaaccaggatgaaacccaggtcttctgatttcttgactggtactcttrtcatttcacactggagtgggcaaagtttgattcagggcatgaaaattaaaacagtttcttcatatttctttctgagagtaaagactgcaaaatatggtaggaaaagctatgagttcagagacattagttgcaggtctggtactgtcgctgttacaggtctggtactgtcactgactagcagtatgattgtaaataggtatatttttctgttgcacgtggcctcaaataaatacatatacatctaaaaaggataaaatggtactgtagtccactgtgctaaagggttgaggtttgggaattcttccagagatttacattgttcatccatggcctttctttattgtatccttcctattgcatttgtccttttaccttccggataatctaattcagtaatttttaagttcagcaatgggagagaatgtgagagtatgagtgtagtctatacattatctatttaaattttagtttatttctgtgtcagttggagttgaaaaataaggtggagcttttttaaagctttaatgtataagtatattgttattctgtttcttttctctggtacttatttctaatagtctgattgagaaagacactggttttgataattttagattttattactgaggatgaattgaatagccagtcccactgccctgctttcagtgtctaaatgtcacccacattgaatgatcccatggaaataaatggtgaagatgttgcacacctttgaaacttggaagggctatgtcaaaagtcttgagttcttttgctatataggctgctgcctatagacaacaaatacattctggttcaatagttagcagtatgttcttggcttgtaaatgatctactgtttttgatgtcctgttaaagatatccatgaattaagctcctgtaataaatatgtgacagaattcatcaaaagtttattcagttgtgggtgtgccaggccctgttctgggccctgaagatataccagaaacacacaccaagctaaggccttgctctgtcaggcagctcacattctagttgggagaggcagacaccaaataaataaatatttaatataacatcagttagtggaaagtagtaagaagaaaaataagcagattaaggagatgagagtggcaaggaattctctggtaaggtgacaaatgaagtgaaggacaaataatgatagtaaatggtagcattataaattctagttgctaaattttttttctctgaaaatatttttaaaccttataggtattaatagttgaaaaacaactctttaaaaatagaatgtatttctgtggtttttctatgtatggaaataatgcagtaggacacctgcttaatttttccagtgatgctcaaggtttgcattgaccaccactgtctggcttgtgttccttgaggccagtggcttacatctgtcaaatggctggcctggtctgaaagaacaatctctggcaggacaactgagaagaatgagattgaaaccctgtccttggcactgtgaactagccagctaagccaatcagcacagccaccttggtttaagcccttaaaagagggttgtactttttaaaactatgcttaaaattgaaaatatctactagaaacagaagagaaatattgtctccattgcttgccattctttcagctcagatcatatatattaatctattgtaaaggataactttcaagaattgtttttaacaatttgaattgttgttattttctgtttacagtagtccccccttatctgagggggatgcgttccaagacccccagtggatgcctgaaaccgtggatagtaccaaatcctatatagtctatgttttttcctatacatacatacctgtgataaagtttaatgtgtaagttaggcacagtaacaacaacaactaataaaaatagaacaattataacagtatactgaaataacatttatgtaaatgtggtgtctctctctccgaatatctaattgtatgtagtattttcggactgcagttgactgcagaaagtgaaactgagggtaaggggagaccactgtattttagaagaagctgactaatttgttctctgtcatttgttttaagtctatgaggagtgttttcataaatgaagatgcacagatggcagccagttcaatcctcttcatatttttaagcttttccaggtccatgttacgtatagtctctgtaatgtgaacagaatttattttagttttcaaggtagcaacatacatatgacatctttaccaatgacacactatgaaatacatgtagaaccaagtgctcttttttctaagttattcctaacattgtttttctcctttgtccctaacccaagctcatatctttcattagctattcatttaacagttttgtggattctttggccccagtcttcatagcattacaaatagaagatggttacttttctttcaaaagacccttggtcagagaggcagatggcacagtggataggcttctgaagtggagaagttagcataatttatgggttttatggatttatcctcctcctaacatttctgtttctccgttttgactttygtcatagttcaaagaaggacatatttgttccctactggctgtgttacatcatatggaatttaaagtcactggaattgaggtagcagtgagaagcatcatatgatttaaaataaagctttgggtcaatatttactgaagtattacatcaatatatttcctgtttsgctgacaagagttaatagctgattttaaacttgtttatctttgctcctagacaaaagttttgttcgaggagattctaaattacgtatttctttcttgatactgctatggaggtgaagcacatagcaagccactttatcttatattttgtattggtaaaaaattttataaattctatgtaagaatacaaaaaaattaaaagaccactgttttttgtcaatcacttgtccttactcttaatggttttatatagtttgcatgtatatactagrttggcttatgattttgaaagtagagactccctattataatgaaatactgagaatgcagaaaatatcatagcacaatactctcattgttccagggagttatgttacttaactaaacctggatgtcgttgtatggagattaacagtattaaaaggggtatgccacatggtttgatcagtaataaacctcacctctaaataatgggcattttaaaatgcactgaattaaacatctttatgtctgactgaggtcaagaacattaatatgcagttgcttagcagggtaccatttatgccactgtttgtccagaaaacatcttggtacaggttgctggggaagggactttgattataacagaaatcaaaagcttaagagtttcctttagagactctgtgtaatcagaactagaagaatgagttattaaactgtaagaagctgaaattgtttggtttgacataaatacttattgagcacccatatgagttgggcactgtattagctgcagggactacagtggtgagcaagtgtggggatgccagaggcagataccctgggaaagggaatggaaagattgcttcacttctagcctgtattgccaggtctgttccacacctggaactcaagctgtactttgtccagtttttttgtagtctttraaaatgttccccacatacagtgttccttcctgagctgctgaggaaaatgtctccccttttaatgagaccagccatatgaatgccactcagaatcatcatgcatccttctaggatatgagctataaattggggactcttactggtatgacatagtgtgtgtgtgtatatatattatatatatatatatatataaggcatatgwatatatatatattaggctgayaatattttgttgtgctgtgtgactcaaccagatgagttattttgtgaaaatattagcatttttatagtggttggttaatttaaactccaccaaatttaatttatgctaaaccttcagttgaattatataactatgtaggacattggacacatttttaattgcataaatataactataaagtaatataaaatgctttcatgcaatgcctacaagatttttcatttttgtgtagctctgtcagtcagggatccttaaactcttcaaaaccaaatgctagaacacgttgctgaataaataaggccctggcattgaacattgtcttgtacctgccccaggtatgttcccaactcttttcactcacttctactatctctgctataaccaagaggtacctgggaagaacccctctcattcctccttcttttcctaacattggagytcttatcacatgtctcaaagatacctgtgcagtgaacaagatcttcactgaaagatgcctccagacttaggaactaaatatttacactggcgaggcaacctctaaactccttggagcagtgtcattctgcacacagacctgaaatgtttgggttatttgcaaccttgatcaagaaatgggataatgcctgaaaagtgagttatttttaaaagagggcaaagagtagagagtatggtagtatgattgcacagatacttcttaatcttcctaaggaatctgaaaaataagttaaacktgtctttgattatttgaccaaaagaactaccagattgactcttgagtggtagcaataaaaataaaataaaataaagaacaagaggcaataggcgcctgctttgyttgatcttcctaattttctaggtacaacttttttttctctcttttttttgagatggagtcttgctctgttacccaggctggagtgcagtggcataatctcggctcactgcaacctctgcttcccaggttcaagcgattctgctgcctcagcctcccaagtagctaggattacaggtgtgcaccaccacrcccggcaaatttttsttttttttaatagaggcggggtttcgccatgttggccaggctggtcttgaactcctgacctcaaatgatccaccagcctcagcctccaaaagtgctgggattaaaggcatgagccactgtacctggccttctaggtaaaacttataaagtacttttggaccagagaaaaatgtaaagctagggacttactgggtagggaaacgtgtgagcatccttcaaaagagctttcacctattaagtgcatgtccccagattgccttcttcctsgttacttcagctgtctgagtatttgaataaattgtatctgcctcaataagaccacttattttcattaaaaagtactatcaaaaccatggttgggtgcagtggttcatgcctgtaattccaacacttgggaggccgaggcagaaggaaccctgaggccaggtatttgaggctgcagtgagccatgattgagccattgcacttcagcctggggaacagagtgagaccctgtcccttwaaaaaaaatgtaatatcaaaaccatttgcttaatgccctaaattgtgtatatgtattcattaagcttcaaacttatgtgataagatgttatgtatgcacgtgtgtctcggtaagtatgaggatggtagtggagtgtcacagaggttatttggcacataaagtgaacttcaagtcacttgtcatcacaatgtgctgtttcttctgctgccctctgacatttgttagacgttctagcacagaggccacagatgaggtggctgcaccacctcttgcgtctcccaaggagttgactgtcagcactcattttacacacccacctgcaacttcacttcctggaggctttgtgagtgtgaaaatggtccttcctcccagaaagaktagaggcccccagagtattatgttgtaattttgaattgtatagtatcagaaatataacatttatgaaaataaacttggcctatataccctggacttaaacagatggtttcatgatgactttagacatttttggctttcctttaacttcccatttagttatttttatggtcttgtttttaatgttttttggtttttactggtatctgcattgaaattctgccttcattaaaggcaggaagattaggagataaagggaaaaggtggtaatgattagaaaggctgacacttataagagaagtcttgacatattttgaaggtcttgctctgtcacccaggctgkattgcagtggtgcaacctctactcactgcaacctccacctcacaggttcaagtgatwctcatgcytcagccttctgagcagctgggactataggtgcctgccaccatgcctggctaatttttgtatttctagtagagacggggttttgccatgttggccaggctggtcttgaactcttcgactcaagtgatgcatctgcctcggcctcccaacatgttgggattacaggcgtgagccaccacacctggcctctttttcttttcttaagaatcttttgcttttcctaatcctaattgtgtttgaaagctcttgcaaatttgaagtacaagttcaataatgtaaaattcattacattaaagaatgaataagaagaatggtaattcttattgtatgttagagccgttcatgattaagcaaaaagccatagaactagtagtatttattgatttagtcaaagcaccctttaatagaaaacatgtgtttgactcttggctccataattatactttttaaaaagtgaaatttgaacttgttgaacctacatgtgataatttttagtaagctctatttggattattgtttaaaattttcttttcagagcaaagagaaattattccaagggccattttcttcctgtgtaacttaattagagagaagaggccacatggtggagaatgtggctagccttttaatacagttttgactccctccctctctttgtaactgccacagagtgtgggagagtttaatttacgtttcagtgtttcaagtctttttcctattggatagttgctccttctataagaattgtaatgataatktgatgatacagtaaacaagaactgggaacagaatatctttttttttaagtgaaattatattgttgatgtaaacggttggcttgactccattttaggtaattcaagtttctttttctctatttttgggaataggtcatagcaaatgacagaagtcccttggtgggcaaaattcactgggagaaaatggttaaaaaggtgtcaagatttggaatacgtacaggcacatttaactgttccagtgatcccaggtaagttgattaggcaattcttagaatttgagtcctgaccaggatctttcttatttaaaaagggcaatgatactagaagcctgcttgaactgaaagcttattataatgtgtagcacactcttagttacmtaggtgcttgattaatggtttttgataaactggcagctaatgactttcactctaagatctctctctgtctcctctatctccctctctctccccgtccctttctctggctcttctgtgttttttctattgaagatatctcttaagattgtgtctttagtccttttcatttcacctttcttttccaaagagatctcagcacattcatggctttaggtgacacctctgtgctgatataaatcttctatcattctgacctctagtttgcatttctttgcttatttccatttgctctgcaactatccctagatatattcttttccctgaaacctagtatctgaaatcagattcatcctctttttctttaatcatccatgtatccttctacctttcttttttctgtccttcgccggttttcccccccattttctcaaataagaatcctcagaggtgtttttgtttatgttttgtttttttgtcatcatttccagtattcagtctgtcacattatttcttgttttattattccattatttcttctttgaaatgcctttttttccatttctcttgctaccaagttataacttagtctcattcattgattgtagaaaactctcctaaaccattactatacctcctttccttagccttacatttacttctcttctgcttagaacccttgttttgcccactagtaatatagggtgagatggatggtagagttcctctaagagttgggaataggagggaagttcctgtatctcttaactcacatttagtctccttatctacctgcaaagctgtcatgctcatcttcaccacaaagtctttttttctgattttttttttttttgagacaggatttggctctgtgactcaggctgtagtgcagtggtgtgatcatagctcactgcaacctccagctgatggatgggctcaagtgatcttcccacctcagcattccaagtagctgggactacatgcatgcatcaccacacctggctaatttttttttttttttttgtagagatggagtcttgctatgttgcccaggctggtaaccacagaatcttagtcacatcccaatgtcttttgttgaaatgtctgagatagcttaagtcttaatgttcttttgaaaaggaaatcattctgatctccattcgtcatttaccaaagacttaggatttgatctgattccatcatttccaaatagagtcaaagtgaaaggtctttttcttcctcactgatttttacaatactagaacaaatgataatgctgatattttgatttttttagttatgccaaaagtcagtattcatatcactattttcttttaaaatacccaatgtattttttaaaaatcagtggaactaaataatacatttcaaacattatagtttataaatatattagaaaacatcaaataaaaacacattttaaaaatatataaagttgaatgcattaattaaagtctaatgttattagataataaagaattcaaaaacaaaataaaaataatctgttaaacgtgaaaaactgaaagaatgatttggtgggggcagacaaaccataatcttataatcttataaatcagagtgcatcagaagtatcataattcagtccagtggattttagtgcaaatttatttagctcttcttttgaaaagctctgattctgtattagctgagaaatggtgaagagatacatacaagctagctccagatgttttcctctaaatccttcatcttcaaataatcctacctcttatttacaattgaagcaatgtttttttggataactttttgcttttttgttgattgtagctatagtttttgttatttaaaaaagtacttctactcagcttcatcagaaaatgattttgttgcacagtgacttgtaccagttccaataatgtgcccatgactcctcatttggaaagtcctccaactggaataagaattgttcttgccatagaagctatgcttagtcagggtcatttttcttttcttttgatgactatggagatatagaagaacaaaatttagagatatagagaagagtgttcagaatttcaatgcagggtgtaagtgggcagagaatagtgttattcaggaagtgttttaatcacatattttgaataattgagtcatcatcttgattttggagttttaaaaataccaaaactctgtgccccactgtctatgctgcattctttgactgtagtcccttctctggggtggcctctgggcagctgacttcagtgtgctggtcccactgtacagctgtactttcctgacctgtttagctcctgccttagtctgttttgtgttgctgtataagaatacctgaggctgagtggtggctcacgcctgtaatcccagcactttgggaggctgaggcaggtagatcaccggaggtaaggagttggagaccagcctggccaacatggtgaaacctgtctctactaaaaatacaaaaattagccaggcgtggtggcgggtgcctgtaatcccagctactcgggagactgaggcaagagaatcacctgaacccaggaggtggaggttgcagtgagccgagattgcaccactgcactccaagcctgggtgacaagagcgagactctgtctcaaaaaaaaaaaaaaaaaatacctgaggctgagtaatttatgaagaaaatagatttatttagctcactgttctgcaggctgtataagaaccatggtgccagcatctgctcagcttctggtgaggcttctgtgctgccagaacatggtagagaaggtcaaaggggaagtggacacatgtgaagggcatgtggctttatgtcagcccactctcgaggaaactactccatttccacaagaactaattcagtcttgccaaagctagaactcactaacttgagagcagcactaagtgttcatgagggatccacctccatgacccagacacctcccactaggcctcacctctcaacactgccacactgggaagaaaatgtcaacatgaggtttggtggggacagacaaaccataaccaaaccagagtagctcccttaagaacatttaggactaccacttctgagcaacttctgactgtctagttgtagcagctttaatttctttccctatgtacccagaaggagtggccttgcctggctctacctcttctcattccctaaccarcagatcgatttcagagggcttttcctgtgaggttcatactctgtactttttttgacaaagtaggagatgaggtggtaatgatgtgtagagagggttggggagatggggattagtaaagagaagatagaggacatggaaattgcaggagctgagtggtaaacaggaagccttatggcaagagtgtcagggatggtggcctgtggaaaaaacggggaaggagaagagaaggggggattgcagagagagcgaggaaaaccaaggaggccaatgaccttgtctgaaaaaacagcatatataaacagaaatgttaaggtttctctctcttcctttcttccttttttttttttttttttttttttgagatggagtctcactctattgcccaggctggagtacagtggcacgatctcaactcactgcaacctcagcctactgggttcaggcgattcttgtgtctcagccccccaagtagctgggattacaggtgcgtgccaccatgcccagctaatttttgtattttcagtagagacagcgtttcaccatgttggccagactgttctcaaactcctggcctcaagtgatccacccaccttggcctcccaaagtgctgggattacaggtgtgagccactgagccctgcttcttcttaaatatagcatgccacatcagcaactggaagaccaaaactcacaaggcatatttcctatcgtttttagtcttaaaattctctaagagaactcaaaaggtttagtttaaaaactagaggatattttcatggtattgtcattgaatttgttcagatcataaaaaaattttttttgaattggcaataaaagtttttatattgatgtaaggtaatacaaccttattctatctggaatgataaaattattacttagctctgagctgaaaagaaagcacataatatgtttgttttcttatgtgaagaaatgtctgcacttagaacttgttcattttacaaagtaagttttctgtcagaaaggctgtcatttaatttatgacacaaatcagaggccatagtaggaagataaaatagatggccaagagttgaaatgtgtcatcacaaatatcaagtgcaatgaaaacattaaagatacttgaagatatttaagatataaataagacagttgtccatatgcatttgacttgttacttttttgggatacggtaaaaatagaattcatgtcaatcaatgaattattattttgcattgagtagaagatatttattttgtaggaatatatacttttcagaccatttcagttaaaacagtaatgatattaatggaatctgtcttattaaggtagtgaatcaactcaacaagaagctaagagtcacagtctgtgattttgagtcacctagacagttttccagagtcatcactaaccttgtcttaagacatagcgtgttgtcttcatttatcttaaactatatcacagaatccctgagataaaattmgtcatattatcattatacagccatatgctacctacgtcaagactcttctcttcatctgatcatatgatgtgtaatatgtttatttaataaaatataatccatgctaagtaaagcataacatctatgacttttacatcaatattctgagtagcaaaatgcgaagtcagatatttattactatgcatatacaaatctgtaacaaataaaacgtttccatgtggtagattgtcttttttacaactttattgaggtaaattttacttaaaaayttcacatggtaggttttggaaaaaaaaatactttttaaaaacaaaagattaactcttctgtgtggtacatgaaaaactaactaaaaccaaaaacaaaaggcagcctgggcgacatggtgagaccccaactctacaaaaaattcttttaaaacttagcctagcatggtggcgtgcatatgtggtcctagctactcaaggaggctgaggcaggagaatcgcttgagcccaggagttcaagactgcaatgaactgtgattgcatcagtgcactccagcctaggtgacagggaaagaccctatctcttattataaaaataaaataactaaaaattaaaaaataaaaacaaaaggaaaatattttcacttacagtctctttactgggatacaacagctgttttcattgttctttcttttttttttttyttttttttttgagacgaagttttgctctgtcgcccaggctggaktgcagtggcgtgatctcggctcactgcaccctctgcctcccgggttcaagcggttctcctgcctcagcctcccaagtagctgggattacaggcacgcgttgccatgcccagctaatttttatatttttggtagagatggggtttcaccatgttggccaggatggtctcaatctcctgactttgtgatctgcccaccttggcctcccaaagtgctgggattacaggtgtgagccactgcacccagcctgttttcagtttttaatatttcttttctctcattacctacttttttaagggaagatggatatcacaaatatcctagcaagaacctgtcaatagacaggtttccaaaaggaagagtcatgatcctactgcataaatctaaatgaatgatttaattttagttaaattcttctgaatataatctgctgtaaaatggggatcattcttgaagtgaacctcttaatctaaatacttcctgtttttgtttcctcttgttaaatactccccttcatgatcttcactgaagaaataagagaatacaaaaatatatggggcttgctgttgctcttttcttggttggcttttgtgcagattastttgtagcagtcaggcattgtggtagttgttaattaaatgggtaagcatgactcctaccctcaaggagcttgcaccaaaccagtgactcagccttaggataatctgttttcttctcttttctccacccatctggattctaaccatccttcaagacctagttcaattcctaaaccattcatgaaatctgcaccagcccaaactttgaacttcttttgcattatttagcaacagaatatatacagttttatctctattttgtctcattaataggattttaaattccttctgaacatgaattattttcttgtcttctggatcttagcacataacgcagttgtaggtacatgagagatgctgaagtatttgctgattcctttgactcagaggcttttcaagatacactttatttaataaaaaaaaaagaaacacagaaatacaaaacaaactagaaaaacagagcttgtttttcacagctgccaagtagtggtaccactttttgattatttggaaattatttggctttggggtgaggtgctaaagaaatttgtcagggaagataaattgtttgcattacagcctagctgtttatttacagtttcctctcttgtagatattgcaggagaagaggctgggtccgatccacactcattatgtctgttccacaaacaagtacttcaaaagggaaagtcatgcttaaagaatacagtggacgcaagattgaagtagagcacatttttaaatggataactgctcatgcrgcttctcggatcaaaaccatttataatgctgaacacttgaaagaagaatggaataaaagtgatcagtattggttaaaaatatacctatttgcaaaccttgaccagcccccagctttcttctctgcactaagtataaagtttactggaagagttgagtttatttttgttaatgtagaaaattgggacaacaagagttatatgacagatattggcatatataatatgccatcatacatacttagaactcctgaaggaatttacaggtatggaaaccacacaggcgaatttatatcccttcaggccatggattcatttttgcgctcattacaacccgaggtaaatgatctgtttgttttgagcttggttctagttaatcttatggcttggatggacttatttattacacaaggagctaccataaagcgatttgtggttctcataagcactttagggacatataattctctattaattatttcctggctacctgtgttgggctttttacagctaccttacttagatagcttttatgaatatagcttaaaattgttgagatattccaatacaaccacactggcttcatgggtaagggcagactggatgttttactcttcacacccagccctgtttctcagtacataccttggtcatggtttactaattgattactttgagaagaagagaaggcgcaacaacaacaatgatgaagtcaatgccaataacttagaatggttatcaagtctgtgggactggtacaccagctacctcttccacccgattgcttcttttcagaactttcctgtagaatctgattgggacgaagaccctgacttattcttggagcgcttagctttccctgacctttggcttcaccctctgataccaactgattatattaaaaacttaccaatgtggcgatttaaatgtcttggagtccagtctgaagaggaaatgtcggaggggtctcaagataytgaaaatgactcggaaagtgagaacacagacactttgagtagtgagaaggaagtatttgaagataagcaaagcgtacttcacaattctccaggaacagcaagtcactgtgatgctgaggcttgttcatgtgccaataaatattgtcagaccagcccatgtgaaaggaaggggaggtcatatggatcatataacactaatgaagatatggaacctgattggttaacttggcctgctgatatgctgcactgtactgaatgtgttgtttgcctakagaattttgaaaatggatgtttgctaatggggttgccttgtggtcatgtgtttcatcagaattgcattgtgatgtggttggctgggggccgacattgttgccctgtttgccggtggccttcttataaaaaaaagcagccatatgcacaacaccagcccttgtcaaatgatgtcccatcttaaccatgtgcaatttgtcctttataagctttgagtatcttacagcttgcctttttaatgttagtcacaatgtttttgtggtttgaagtttaktttaatgttagtgcagtgacgggaaatacacattatgctaatgttgatgacagaatttatttggttgccttgtgtgttaattkaatgcatacctaattgtaaaatttttttatttacaacattggaaattcagaagttaatgtttttttgtaagcacaaaagaagtattatagaaatttatcctagcaagactttacaagataggatcaaattctaatggaattgagccggtttcttatcctaaatgtttcctccctttttacaatctctgtccagcacctcttggttaaataatgtatgctgtgagacatgaaattaaaacagacctatgaaataaattattttaaaaccagaagattacrgattttccaatgttaaatttttttgataaggtggctgaatgatataggtgttttgctggtttgttaatttcacagatagatcaaacatgattcttgactcacgttggggaggaagacaaaatgttgctggcacttgctagatgtgacagttcaccttttagcttggttagctgtgatgggaaagagtttcatggtgggcttttgaaaaagtamtaaataatttatcagtacttagcacattcatctaaataaaatcaactatagcatattagccacacatwaattatgttttttctgacttttgaaattttttaaagctacagaaagctgtaaacatagtacagtgaacatccatttctttttatctaattcaccaagtgttcacattttgttatatgttttatctcctatctcttatgtgtatatttctttttttttttttttttttttgagatggagtctcactgggtcgcccaggctgtagtgcagtggtgcaatctcggctcactgcaagctccgcctcctgggttcacaggagtagcagggtctacaggtgcccaccaccacgcccggctaattttttgtattttcagtagagacggggtttcaccgtgttagccaggacggtcccgatctcccgacctcgtgatccgcccgcctcggcctcctaaagtgctgggattacaagcatgagccaccgcacccggccgctgatccttttgaaaataaatttcagtcatcatgatgactgactgctaaatatatcaccacatatctaagaacaaggacattcttttatgtaaccactataccattatgacacccaagaaatttaacattgactcaataatagctaatgtatataaaatcgatactccccaattgctcctgaaatatcctttatatctaaatgtttttgttttatttttattgtgaactcagacatagtcgatacattaagtttagtctcctccttttcatcctttcctctagagtaattccccctgccgccaccccttttttttctttttcttttcttttctttttttttaaagacagtttccctcttgttgccccggctggagtgcaatggcgcgatctcagctcaccgcagcctccacctcccgggtccaagcgattctcctgcctcagcttcccgagtagctgggataacaggcacccgccaccacgcccagctaatgtttgtacttttagtagagacggggtttctccatgttggccaggctggtctcaaactcccgacctcaggtaatctgcccgccccggctcccaaagtgctgggattacaggcgtgagccacggcgctaggcccctgccccctttttaaaaaagtagactcttctttgatttctctctggtgttctgttttatttttcttttatcatttttttctttttttgagatggagcctctctctgtcgcccaggctggagtgcagtggcatggtctcagctcactgcaacctccgcctccctggttcaggcgattcccctgcctcagcctccckagtagctgggattacggacatgcaccaccatgcctggctaatttttgtatttttagtagagatgcggtttcactatgtaggccaggcttgtctcgaactcccagcctcaggtgatctgcccacctcggcctcccaaagtgatgggattacaggcatgtgtcaccacacctggccaatttgttttacttatttttattttatttttttattttattttatttattttattttattttattattttattttattttaattttattgagacaaggtcttgctctgttgcccatgctagagtgcagtggcatcatcatagctcactgcagcctcaaactcctgggctcaagcgatcctcctgcctcagcctcccaagtagctggaactacaggctcaagccacagtgctaagttttgttttgttttgttttttgtttgttttgttgttgttgtttttgagagttggagtcttgctttgttgcctaggctggtcttgaactcctaggctcaagcaatcctcctgagtagctggggttacaggcataagccataatgccttgctagttgcctttttttggtactaacatttttggagactacaggatggttgacttataaaatgctccacattctagatttgtctgtttctttcatgattagatttaaaggatattgtctggaaggtatgtactttccatttgtatggcatcagaaggcacatgtcagtttgtcctattattggtgacatttggttaaagtgatatttgccttttctttccattctaagatactttttcactttaagaaggaacctgttgagactatgcaaatatcctattcctcaacaatctaacccaatggctttaacatctgttgattctttgcatcaatcagttattaaagaagagttgcaacatgggaatttcatttatttatttcaagacagggtcttggtcacacaggctgcagttgcagtggcatgatcacagctcactgcagcctcaacttcctgggtagctgggaccacaggtgtgtggcaccacatccagctaatttttgtatttttttgttagagacagggtttcgccatgttgccaggctggtctcaaactcctgggctcaagtgatccacccgccttagcttcttaaattgctgggattacaggcgtgagccaccgtgcctggctaagatgggggttttctaataccatcattcattctacatttattgacttttttgtgaacaagaactttccatttttcacacttttgattcacagattttttaaaataccctatgtgttagaatttatgattcttcttgattttcaaatcatcccagattaggctagagggagcctctctaagccggctcttatgtcctattgacagtccctttaatctcgaagcacttccttgccttttgacacaaaggtatcctaagttcactttgtattttccctgagccagccctgtaatcagccatttcttcaaagtgcccgtttcatggtagacttgtaaaatccttaattggatgccccccaaaatggcaagaaatttttttcattctgaattgctgctgacattttttccccttcatgatgcattgtgtctcactttcatatgctaaggaataataaggcctagcagttactttgtattaatatttgggagtttttaaataaaagtgcaagcactgcttcttgtgctctaattttacttttgaaaaaagtaatcattcacagttctcaaatatgagcataaaaacaaattttaaaaaatttttaagtgcccatattattgtaaatgttagtgtttcccaagattctgccattggttcattgattttttttctctcttcattggatgtctcctaaatctacatatctaagcaaagacccctcctagatcttcactttcatttatagctgtctgctggacagcttctcctcatgtttttaagtacttaatgaccctaagagagcttttttattcatttatcccacccccagtcatcctcttaattaaggtcctgatttcagtgaatgaaaaattatatatatacacgtgtatatatatgtatgtgtgtatatttatatacatatatacacgtgcatgcatatgaaatatacacaaaagcatagaaattttttaagagaattaaaatttccccagtattccagggcacaccatatgttggagactactaacttggaagataaaccaatctctaacactggctttcaaggttcataatctgctcctggcctacctcttacactcatcatgacactctattctgcttgtggcccaggctcatgctctaatttttcccagcttggtgctttgctattccctctacctgatattctcactccttcctctctgctttgcctggcaaaatcccacattctccagaaattctgtcccttcctacctatcttctccttcctcaccaggcttataaagagacaaaaatatrcaatggacactcaggtgaatgtcacccaagtgatcaaacttatcatcatccaatgtgtgcctttcctccatatcccactgatataccatgtacatgcctgtcacacttagctgcattgaattaaaactctgtgtctttggtgagctcctttatggtaggaactgttttgtttgtccaagtatccacagtgacggcacaaaatagacataatacattttcaacgttagatatgcaataaaaatattacaatgagatcagtgggaaaataattgccaaagttacatgtctccaggcaagcttgactcatcacttaattgtcaagcacaacaagtaataatgcttttgtcagattttcctggaggtggagcattgaaggaaatatttaaggttgatagactgtaaactttagctgtgtttaaaataaacgtttgaattcttagaacaacctatctcatgtaatgagctacggatttcaagtacgtgggctatgtagttactgaactctatggttaactgtaatagtaggtaggacagataatttcttctgatcaagagtttttctactgtcttctctaataattccttgtgtagccttttctttctttaaggatgataagctctctgagggcaggagtaacactataatctactcttatatccttaacatattagaaccagagtagatattcggtcaataattgttggcttgaactttaagaatctattttattttttccctttaccaaacttttwtttatttatttatttatttatttatttatttatttatttatttatttttgagatggagtctcattctgttgcccaggctggagtgcagtggcacgatcttggctcactgcaacctcctcctcctggtttcaagtgattcttctgcctcagcctcctgagtagctgggattacaggcgcacaccactgcacctggctaatttttgtatttttagtagagtcggggtttcaccatgttggccaagctggtcttgaactcctgacctcaagtaatcaacccacttcagcctcccaaagtggtgggattacaggcatgagccaccgtgccagcttttgccaaactttttactatccatttagaataggtggaaaagattgaagaaaacagattatatttttagtgcccattagaagtgacaaaaatattaatatttatggcctgctccaagacaaaaatcttaattgttccccatagttacatacttcttttcgtctattccttacattgtttgagagcctgggagattatttatgtgatctttctccttgctctcccacgtttttctccttggccattttattattccttaaaattctaccaaagggacgtgacgtagagaaagatctggatcttgtgttaggtcctttttgctgttggatctgattaaaaactcaaagaagaataaattgaaatttaattgttaaaatatgttttaatcatctgtgttttaatcattcttgttctttgttgtcaattaaatatattgacatgatcaatttaggcaatcttttcatttaattttttaataaatgtaatgatgtaaaatcattacaytttttgtaatgatgtaaaatctcatcaaaatattttattgttttatatatactagattatttcacttcataaaatccctgtgcaacaggtcgagtagaagaattcccacttaccagacgatcaagaactcaggacaacgcagatagttacagatgtgactaggatgcagctttcaaatttgcatatcttcagggtcccaggaaagtttaagtcgggtgatgagagcagaagtgtgtatgatctgcctttaatttttttttttttttagacggagtctcgctctgttgccaaggctggagtgcagtggcttgatctcggctcactgcaacctctgcctcccgggttaaagcgattctcctgcctcagcctcctgagtagctggaatcacaggtgcccaccacta
